United States Patent Application Publication US 2007/0214517 A1 - sequence listing, part 27

SEQ ID NO: 32393 - DNA, 938 bp, Arabidopsis thaliana; identical to SEQ ID NO: 28803
  misc_feature (1)..(938): Ceres Seq. ID no. 13491243
  misc_feature: MA Experiment ID: 108462 Result: Up-regulated in Transcription
  misc_feature: MA Experiment 108462 PARAMETER Experiment Name: At_Germinating_Seeds_cDNA_P Parameter: Age (day) Value: 2 vs. 0
  misc_feature: MA Experiment 108462 PARAMETER Experiment Name: At_Germinating_Seeds_cDNA_P Parameter: Tissue Value: Germinating Seeds
  misc_feature: MA Experiment ID: 108463 Result: Up-regulated in Transcription
  misc_feature: MA Experiment 108463 PARAMETER Experiment Name: At_Germinating_Seeds_cDNA_P Parameter: Age (day) Value: 3 vs. 0
  misc_feature: MA Experiment 108463 PARAMETER Experiment Name: At_Germinating_Seeds_cDNA_P Parameter: Tissue Value: Germinating Seeds
  misc_feature: MA Experiment ID: 108488 Result: Down-regulated in Transcription
  misc_feature: MA Experiment ID: 108501 Result: Up-regulated in Transcription
  misc_feature: MA Experiment 108501 PARAMETER Experiment Name: At_ap2_floral_buds_cDNA_P Parameter: Plant Line Value: ap2 (Ler.)
  misc_feature: MA Experiment 108501 PARAMETER Experiment Name: At_ap2_floral_buds_cDNA_P Parameter: Tissue Value: Closed Flower
  misc_feature: MA Experiment ID: 108561 Result: Up-regulated in Transcription
  misc_feature: MA Experiment 108561 PARAMETER Experiment Name: At_100uM_ABA_cDNA_P Parameter: Timepoint (hr) Value: 6
  misc_feature: MA Experiment 108561 PARAMETER Experiment Name: At_100uM_ABA_cDNA_P Parameter: Tissue Value: Aerial
  misc_feature: MA Experiment 108561 PARAMETER Experiment Name: At_100uM_ABA_cDNA_P Parameter: Treatment Value: 100uM ABA vs. No Treatment
  misc_feature: MA Experiment ID: 108572 Result: Up-regulated in Transcription
  misc_feature: MA Experiment 108572 PARAMETER Experiment Name: At_Drought_cDNA_P Parameter: Timepoint (hr) Value: 1
  misc_feature: MA Experiment 108572 PARAMETER Experiment Name: At_Drought_cDNA_P Parameter: Tissue Value: Aerial
  misc_feature: MA Experiment 108572 PARAMETER Experiment Name: At_Drought_cDNA_P Parameter: Treatment Value: Drought vs. No Drought
  misc_feature: MA Experiment ID: 108579 Result: Down-regulated in Transcription
  misc_feature: MA Experiment 108579 PARAMETER Experiment Name: At_4deg_Cold_cDNA_P Parameter: Temperature (deg C) Value: 4 vs. 22
  misc_feature: MA Experiment 108579 PARAMETER Experiment Name: At_4deg_Cold_cDNA_P Parameter: Timepoint (hr) Value: 6
  misc_feature: MA Experiment 108579 PARAMETER Experiment Name: At_4deg_Cold_cDNA_P Parameter: Tissue Value: Aerial
  misc_feature: MA Experiment ID: 108595 Result: Down-regulated in Transcription
  misc_feature: MA Experiment 108595 PARAMETER Experiment Name: At_Ler-pi_Ovule_cDNA_P Parameter: Plant Line Value: null
  misc_feature: MA Experiment ID: 108605 Result: Up-regulated in Transcription
  misc_feature: MA Experiment 108605 PARAMETER Experiment Name: At_100uM_ABA_cDNA_P Parameter: Timepoint (hr) Value: 6
  misc_feature: MA Experiment 108605 PARAMETER Experiment Name: At_100uM_ABA_cDNA_P Parameter: Tissue Value: Aerial
  misc_feature: MA Experiment 108605 PARAMETER Experiment Name: At_100uM_ABA_cDNA_P Parameter: Treatment Value: 100uM ABA vs. No Treatment
  misc_feature: MA Experiment ID: 108607 Result: Up-regulated in Transcription
  misc_feature: MA Experiment 108607 PARAMETER Experiment Name: At_100uM_ABA_cDNA_P Parameter: Timepoint (hr) Value: 4
  misc_feature: MA Experiment 108607 PARAMETER Experiment Name: At_100uM_ABA_cDNA_P Parameter: Tissue Value: Aerial
  misc_feature: MA Experiment 108607 PARAMETER Experiment Name: At_100uM_ABA_cDNA_P Parameter: Treatment Value: 100uM ABA vs. No Treatment
  misc_feature: MA Experiment ID: 108608 Result: Up-regulated in Transcription
  misc_feature: MA Experiment 108608 PARAMETER Experiment Name: At_100uM_ABA_cDNA_P Parameter: Timepoint (hr) Value: 1
  misc_feature: MA Experiment 108608 PARAMETER Experiment Name: At_100uM_ABA_cDNA_P Parameter: Tissue Value: Aerial
  misc_feature: MA Experiment 108608 PARAMETER Experiment Name: At_100uM_ABA_cDNA_P Parameter: Treatment Value: 100uM ABA vs. No Treatment
  misc_feature: MA Experiment ID: 108668 Result: Up-regulated in Transcription
  misc_feature: MA Experiment 108668 PARAMETER Experiment Name: At_2mM_SA_cDNA_P Parameter: Plant Line Value: WS
  misc_feature: MA Experiment 108668 PARAMETER Experiment Name: At_2mM_SA_cDNA_P Parameter: Timepoint (hr) Value: 6
  misc_feature: MA Experiment 108668 PARAMETER Experiment Name: At_2mM_SA_cDNA_P Parameter: Treatment Value: 2mM SA vs. No Treatment
  misc_feature: MA Experiment ID: 20000068 Result: Up-regulated in Transcription
  misc_feature: MA Experiment ID: 20000090 Result: Down-regulated in Transcription
  misc_feature: MA Experiment ID: 20000169 Result: Up-regulated in Transcription
  misc_feature: MA Experiment 20000169 PARAMETER Experiment Name: At_100uM_ABA_P Parameter: Age (day) Value: 14
  misc_feature: MA Experiment 20000169 PARAMETER Experiment Name: At_100uM_ABA_P Parameter: Organism Value: A. thaliana
  misc_feature: MA Experiment 20000169 PARAMETER Experiment Name: At_100uM_ABA_P Parameter: Plant Line Value: WS
  misc_feature: MA Experiment 20000169 PARAMETER Experiment Name: At_100uM_ABA_P Parameter: Timepoint (hr) Value: 6
  misc_feature: MA Experiment 20000169 PARAMETER Experiment Name: At_100uM_ABA_P Parameter: Tissue Value: Aerial
  misc_feature: MA Experiment 20000169 PARAMETER Experiment Name: At_100uM_ABA_P Parameter: Treatment Value: 100uM ABA vs. No Treatment
  misc_feature: MA Experiment ID: 20000179 Result: Up-regulated in Transcription
  misc_feature: MA Experiment 20000179 PARAMETER Experiment Name: At_Germinating_Seeds_P Parameter: Age (hr) Value: 6 vs. 0
  misc_feature: MA Experiment 20000179 PARAMETER Experiment Name: At_Germinating_Seeds_P Parameter: Tissue Value: Germinating Seeds
  misc_feature: MA Experiment ID: 20000182 Result: Up-regulated in Transcription
  misc_feature: MA Experiment 20000182 PARAMETER Experiment Name: At_2mM_SA_P Parameter: Age (day) Value: 14
  misc_feature: MA Experiment 20000182 PARAMETER Experiment Name: At_2mM_SA_P Parameter: Organism Value: A. thaliana
  misc_feature: MA Experiment 20000182 PARAMETER Experiment Name: At_2mM_SA_P Parameter: Plant Line Value: WS
  misc_feature: MA Experiment 20000182 PARAMETER Experiment Name: At_2mM_SA_P Parameter: Timepoint (hr) Value: 6
  misc_feature: MA Experiment 20000182 PARAMETER Experiment Name: At_2mM_SA_P Parameter: Tissue Value: Aerial
  misc_feature: MA Experiment 20000182 PARAMETER Experiment Name: At_2mM_SA_P Parameter: Treatment Value: 2mM SA vs. No Treatment
  misc_feature: MA Experiment ID: 20000185 Result: Down-regulated in Transcription
  misc_feature: MA Experiment 20000185 PARAMETER Experiment Name: At_Roots__P Parameter: Age (day) Value: 7 vs. 21
  misc_feature: MA Experiment 20000185 PARAMETER Experiment Name: At_Roots__P Parameter: Organism Value: A. thaliana
  misc_feature: MA Experiment 20000185 PARAMETER Experiment Name: At_Roots__P Parameter: Tissue Value: Roots vs. Whole Plant
  misc_feature: MA Experiment ID: 20000234 Result: Down-regulated in Transcription
  misc_feature: MA Experiment 20000234 PARAMETER Experiment Name: At_Siliques_P Parameter: Age (day) Value: 21
  misc_feature: MA Experiment 20000234 PARAMETER Experiment Name: At_Siliques_P Parameter: Organism Value: A. thaliana
  misc_feature: MA Experiment 20000234 PARAMETER Experiment Name: At_Siliques_P Parameter: Plant Line Value: WS
  misc_feature: MA Experiment 20000234 PARAMETER Experiment Name: At_Siliques_P Parameter: Tissue Value: Less Than 5mm Siliques vs. Whole Plant
  misc_feature: MA Experiment ID: 20000268 Result: Up-regulated in Transcription
  misc_feature: MA Experiment 20000268 PARAMETER Experiment Name: At_100mM_NaCl__P Parameter: Age (day) Value: 14
  misc_feature: MA Experiment 20000268 PARAMETER Experiment Name: At_100mM_NaCl__P Parameter: Organism Value: A. thaliana
  misc_feature: MA Experiment 20000268 PARAMETER Experiment Name: At_100mM_NaCl__P Parameter: Plant Line Value: WS
  misc_feature: MA Experiment 20000268 PARAMETER Experiment Name: At_100mM_NaCl__P Parameter: Timepoint (hr) Value: 6
  misc_feature: MA Experiment 20000268 PARAMETER Experiment Name: At_100mM_NaCl__P Parameter: Tissue Value: Whole Plant
  misc_feature: MA Experiment 20000268 PARAMETER Experiment Name: At_100mM_NaCl__P Parameter: Treatment Value: 100mM NaCl vs. No Treatment
  misc_feature: MA Experiment ID: 20000439 Result: Down-regulated in Transcription
  misc_feature: MA Experiment 20000439 PARAMETER Experiment Name: At_Roots__P Parameter: Age (day) Value: 14 vs. 21
  misc_feature: MA Experiment 20000439 PARAMETER Experiment Name: At_Roots__P Parameter: Organism Value: A. thaliana
  misc_feature: MA Experiment 20000439 PARAMETER Experiment Name: At_Roots__P Parameter: Tissue Value: Roots vs. Whole Plant
  misc_feature: MA Experiment ID: 20000495 Result: Down-regulated in Transcription
  misc_feature: MA Experiment 20000495 PARAMETER Experiment Name: At_Guard_Cells_P Parameter: Harvest Date Value: 8/2/2002
  misc_feature: MA Experiment 20000495 PARAMETER Experiment Name: At_Guard_Cells_P Parameter: Organism Value: A. thaliana
  misc_feature: MA Experiment 20000495 PARAMETER Experiment Name: At_Guard_Cells_P Parameter: Tissue Value: Guard Cells vs. Leaves
  misc_feature: MA Experiment ID: 20000573 Result: Down-regulated in Transcription
  misc_feature: MA Experiment 20000573 PARAMETER Experiment Name: At_100uM_ABA_Mutants__P Parameter: Organism Value: A. thaliana
  misc_feature: MA Experiment 20000573 PARAMETER Experiment Name: At_100uM_ABA_Mutants__P Parameter: Plant Line Value: CS22 vs. Ler wt
  misc_feature: MA Experiment 20000573 PARAMETER Experiment Name: At_100uM_ABA_Mutants__P Parameter: Timepoint (hr) Value: N/A
  misc_feature: MA Experiment 20000573 PARAMETER Experiment Name: At_100uM_ABA_Mutants__P Parameter: Tissue Value: Whole Plant
  misc_feature: MA Experiment 20000573 PARAMETER Experiment Name: At_100uM_ABA_Mutants__P Parameter: Treatment Value: None
  misc_feature: MA Experiment ID: 20000574 Result: Down-regulated in Transcription
  misc_feature: MA Experiment 20000574 PARAMETER Experiment Name: At_100uM_ABA_Mutants__P Parameter: Organism Value: A. thaliana
  misc_feature: MA Experiment 20000574 PARAMETER Experiment Name: At_100uM_ABA_Mutants__P Parameter: Plant Line Value: CS23 vs. Ler wt
  misc_feature: MA Experiment 20000574 PARAMETER Experiment Name: At_100uM_ABA_Mutants__P Parameter: Timepoint (hr) Value: N/A
  misc_feature: MA Experiment 20000574 PARAMETER Experiment Name: At_100uM_ABA_Mutants__P Parameter: Tissue Value: Whole Plant
  misc_feature: MA Experiment 20000574 PARAMETER Experiment Name: At_100uM_ABA_Mutants__P Parameter: Treatment Value: None
  misc_feature: MA Experiment ID: 20000794 Result: Up-regulated in Transcription
  misc_feature: MA Experiment 20000794 PARAMETER Experiment Name: At_Petals_P Parameter: Age (day) Value: 23-25 days
  misc_feature: MA Experiment 20000794 PARAMETER Experiment Name: At_Petals_P Parameter: Plant Line Value: WS
  misc_feature: MA Experiment 20000794 PARAMETER Experiment Name: At_Petals_P Parameter: Tissue Value: Petals vs. Whole plant
  misc_feature: MA Experiment ID: 20001248 Result: Down-regulated in Transcription
  misc_feature: MA Experiment 20001248 PARAMETER Experiment Name: At_Far-red-induction_P Parameter: Age (day) Value: 7
  misc_feature: MA Experiment 20001248 PARAMETER Experiment Name: At_Far-red-induction_P Parameter: Light Value: Far-red vs. White
  misc_feature: MA Experiment 20001248 PARAMETER Experiment Name: At_Far-red-induction_P Parameter: Organism Value: A. thaliana
  misc_feature: MA Experiment 20001248 PARAMETER Experiment Name: At_Far-red-induction_P Parameter: Plant Line Value: Columbia
  misc_feature: MA Experiment 20001248 PARAMETER Experiment Name: At_Far-red-induction_P Parameter: Timepoint (hr) Value: 4
  misc_feature: MA Experiment 20001248 PARAMETER Experiment Name: At_Far-red-induction_P Parameter: Tissue Value: Whole Plant
  misc_feature: MA Experiment ID: 20001911 Result: Up-regulated in Transcription
  misc_feature: MA Experiment 20001911 PARAMETER Experiment Name: At_Drought_Reproduction_P Parameter: Age (day) Value: 40
  misc_feature: MA Experiment 20001911 PARAMETER Experiment Name: At_Drought_Reproduction_P Parameter: Organism Value: A. thaliana
  misc_feature: MA Experiment 20001911 PARAMETER Experiment Name: At_Drought_Reproduction_P Parameter: Plant Line Value: WS
  misc_feature: MA Experiment 20001911 PARAMETER Experiment Name: At_Drought_Reproduction_P Parameter: Timepoint (day) Value: 10
  misc_feature: MA Experiment 20001911 PARAMETER Experiment Name: At_Drought_Reproduction_P Parameter: Tissue Value: Flowers
  misc_feature: MA Experiment 20001911 PARAMETER Experiment Name: At_Drought_Reproduction_P Parameter: Treatment Value: Drought vs. No Drought
  misc_feature: Phenotype: ROSETTE LEAVES Curled-Curled 3
  misc_feature: Phenotype: ROSETTE LEAVES Curled-Curled 3
  misc_feature: Phenotype: ROSETTE LEAVES Curled-Curled 3
  misc_feature: Phenotype: WHOLE PLANT Size-Small
  misc_feature: Phenotype: ROSETTE LEAVES Curled-Curled 3
  misc_feature: Phenotype: WHOLE PLANT Size-Small
  misc_feature: Phenotype: ROSETTE LEAVES Curled-Curled 3
  misc_feature: Phenotype: WHOLE PLANT Size-Small
  misc_feature: Phenotype: ROSETTE LEAVES Curled-Curled 3
  misc_feature: Phenotype: WHOLE PLANT Size-Small

SEQ ID NO: 32394 - protein, 246 aa, Arabidopsis thaliana; identical to SEQ ID NO: 28804
  peptide (1)..(246): Ceres Seq. ID no. 13491244
  misc_feature (18)..(241): Homolog of NCBI NO: 6856103 NR Description: glutathione S-transferase [Gossypium hirsutum]
  misc_feature (148)..(241): Homolog of NCBI NO: 11096018 NR Description: glutathione S-transferase [Arabidopsis thaliana]
  misc_feature (18)..(127): Homolog of NCBI NO: 11096018 NR Description: glutathione S-transferase [Arabidopsis thaliana]
  misc_feature (17)..(241): Homolog of NCBI NO: 15218517 NR Description: glutathione transferase, putative [Arabidopsis
  misc_feature (18)..(241): Homolog of NCBI NO: 15375408 NR Description: glutathione S-transferase [Arabidopsis thaliana]
  misc_feature (18)..(241): Homolog of NCBI NO: 11096016 NR Description: glutathione S-transferase [Arabidopsis thaliana]
  misc_feature (13)..(240): Homolog of NCBI NO: 21537210 NR Description: glutathione S-transferase, putative [Arabidopsis
  misc_feature (13)..(240): Homolog of NCBI NO: 15218868 NR Description: glutathione transferase, putative [Arabidopsis
  misc_feature (13)..(246): Homolog of NCBI NO: 15218872 NR Description: glutathione transferase, putative [Arabidopsis
  misc_feature (13)..(246): Homolog of NCBI NO: 13877559 NR Description: similar to glutathione S-transferase [Arabidopsis

SEQ ID NO: 32395 - protein, 234 aa, Arabidopsis thaliana; identical to SEQ ID NO: 28805
  peptide (1)..(234): Ceres Seq. ID no. 13491245
  misc_feature (6)..(229): Homolog of NCBI NO: 6856103 NR Description: glutathione S-transferase [Gossypium hirsutum]
  misc_feature (136)..(229): Homolog of NCBI NO: 11096018 NR Description: glutathione S-transferase [Arabidopsis thaliana]
  misc_feature (6)..(115): Homolog of NCBI NO: 11096018 NR Description: glutathione S-transferase [Arabidopsis thaliana]
  misc_feature (5)..(229): Homolog of NCBI NO: 15218517 NR Description: glutathione transferase, putative [Arabidopsis
  misc_feature (6)..(229): Homolog of NCBI NO: 15375408 NR Description: glutathione S-transferase [Arabidopsis thaliana]
  misc_feature (6)..(229): Homolog of NCBI NO: 11096016 NR Description: glutathione S-transferase [Arabidopsis thaliana]
  misc_feature (1)..(228): Homolog of NCBI NO: 21537210 NR Description: glutathione S-transferase, putative [Arabidopsis
  misc_feature (1)..(228): Homolog of NCBI NO: 15218868 NR Description: glutathione transferase, putative [Arabidopsis
  misc_feature (1)..(234): Homolog of NCBI NO: 15218872 NR Description: glutathione transferase, putative [Arabidopsis
  misc_feature (1)..(234): Homolog of NCBI NO: 13877559 NR Description: similar to glutathione S-transferase [Arabidopsis

SEQ ID NO: 32396 - DNA, 2023 bp, Arabidopsis thaliana; identical to SEQ ID NO: 28806
  misc_feature (1)..(2023): Ceres Seq. ID no. 12370614
  misc_feature: MA Experiment ID: 108433 Result: Up-regulated in Transcription
  misc_feature: MA Experiment 108433 PARAMETER Experiment Name: At_rhl_Mutant2_cDNA_P Parameter: Age (day) Value: 7
  misc_feature: MA Experiment 108433 PARAMETER Experiment Name: At_rhl_Mutant2_cDNA_P Parameter: Organism Value: A. thaliana
  misc_feature: MA Experiment 108433 PARAMETER Experiment Name: At_rhl_Mutant2_cDNA_P Parameter: Plant Line Value: rhl Mutant vs. wt landsburg
  misc_feature: MA Experiment 108433 PARAMETER Experiment Name: At_rhl_Mutant2_cDNA_P Parameter: Tissue Value: Roots
  misc_feature: MA Experiment ID: 108434 Result: Down-regulated in Transcription
  misc_feature: MA Experiment 108434 PARAMETER Experiment Name: At_Root_Tips_cDNA_P Parameter: Tissue Value: Root Tips
  misc_feature: MA Experiment ID: 108464 Result: Up-regulated in Transcription
  misc_feature: MA Experiment 108464 PARAMETER Experiment Name: At_Germinating_Seeds_cDNA_P Parameter: Age (day) Value: 4 vs. 0
  misc_feature: MA Experiment 108464 PARAMETER Experiment Name: At_Germinating_Seeds_cDNA_P Parameter: Tissue Value: Germinating Seeds
  misc_feature: MA Experiment ID: 108569 Result: Up-regulated in Transcription
  misc_feature: MA Experiment 108569 PARAMETER Experiment Name: At_0.001%_MeJA__cDNA_P Parameter: Timepoint (hr) Value: 6
  misc_feature: MA Experiment 108569 PARAMETER Experiment Name: At_0.001%_MeJA__cDNA_P Parameter: Tissue Value: Aerial
  misc_feature: MA Experiment 108569 PARAMETER Experiment Name: At_0.001%_MeJA__cDNA_P Parameter: Treatment Value: 0.001% MeJA vs. No Treatment
  misc_feature: MA Experiment ID: 20000030 Result: Down-regulated in Transcription
  misc_feature: MA Experiment 20000030 PARAMETER Experiment Name: At_CS6630_Roots_cDNA_P Parameter: Plant Line Value: CS6630 vs. WS
  misc_feature: MA Experiment 20000030 PARAMETER Experiment Name: At_CS6630_Roots_cDNA_P Parameter: Tissue Value: Roots

SEQ ID NO: 32397 - protein, 314 aa, Arabidopsis thaliana; identical to SEQ ID NO: 28807
  peptide (1)..(314): Ceres Seq. ID no. 12370615
  misc_feature (69)..(197): Pfam Name: No apical meristem (NAM) protein Pfam Description: No apical meristem (NAM) protein
  misc_feature (65)..(243): Homolog of NCBI NO: 21105746 NR Description: nam-like protein 9 [Petunia x hybrida]
  misc_feature (70)..(299): Homolog of NCBI NO: 25403164 NR Description: CDS protein F9L11.7 [imported] - Arabidopsis
  misc_feature (70)..(299): Homolog of NCBI NO: 18398627 NR Description: NAM protein, putative; protein id: At1g32870.1
  misc_feature (70)..(299): Homolog of NCBI NO: 14334572 NR Description: putative NAM protein [Arabidopsis thaliana]
  misc_feature (71)..(314): Homolog of NCBI NO: 21105740 NR Description: nam-like protein 6 [Petunia x hybrida]
  misc_feature (71)..(314): Homolog of NCBI NO: 21105742 NR Description: nam-like protein 7 [Petunia x hybrida]
  misc_feature (54)..(314): Homolog of NCBI NO: 18399168 NR Description: NAM(no apical meristem) protein, putative
  misc_feature (54)..(314): Homolog of NCBI NO: 25518168 NR Description: BTF3b factor protein F23M19.14 - Arabidopsis
  misc_feature (54)..(314): Homolog of NCBI NO: 18399166 NR Description: expressed protein
  misc_feature (54)..(314): Homolog of NCBI NO: 21618244 NR Description: NAM-like protein [Arabidopsis thaliana]

SEQ ID NO: 32398 - protein, 283 aa, Arabidopsis thaliana; identical to SEQ ID NO: 28808
  peptide (1)..(283): Ceres Seq. ID no. 12370616
  misc_feature (99)..(282): Homolog of NCBI NO: 18398627 NR Description: NAM protein, putative; protein id: At1g32870.1
  misc_feature (99)..(282): Homolog of NCBI NO: 14334572 NR Description: putative NAM protein [Arabidopsis thaliana]
  misc_feature (66)..(283): Homolog of NCBI NO: 21105740 NR Description: nam-like protein 6 [Petunia x hybrida]
  misc_feature (1)..(54): Homolog of NCBI NO: 21105740 NR Description: nam-like protein 6 [Petunia x hybrida]
  misc_feature (51)..(283): Homolog of NCBI NO: 21105742 NR Description: nam-like protein 7 [Petunia x hybrida]
  misc_feature (1)..(78): Homolog of NCBI NO: 21105742 NR Description: nam-like protein 7 [Petunia x hybrida]
  misc_feature (1)..(282): Homolog of NCBI NO: 18399168 NR Description: NAM(no apical meristem) protein, putative
  misc_feature (1)..(283): Homolog of NCBI NO: 25518168 NR Description: BTF3b factor protein F23M19.14 - Arabidopsis
  misc_feature (1)..(283): Homolog of NCBI NO: 18399166 NR Description: expressed protein
  misc_feature (1)..(283): Homolog of NCBI NO: 21618244 NR Description: NAM-like protein [Arabidopsis thaliana]

SEQ ID NO: 32399 - protein, 261 aa, Arabidopsis thaliana; identical to SEQ ID NO: 28809
  peptide (1)..(261): Ceres Seq. ID no. 12370617
  misc_feature (16)..(144): Pfam Name: No apical meristem (NAM) protein Pfam Description: No apical meristem (NAM) protein
  misc_feature (12)..(190): Homolog of NCBI NO: 21105746 NR Description: nam-like protein 9 [Petunia x hybrida]
  misc_feature (17)..(246): Homolog of NCBI NO: 25403164 NR Description: CDS protein F9L11.7 [imported] - Arabidopsis
  misc_feature (17)..(246): Homolog of NCBI NO: 18398627 NR Description: NAM protein, putative; protein id: At1g32870.1
  misc_feature (17)..(246): Homolog of NCBI NO: 14334572 NR Description: putative NAM protein [Arabidopsis thaliana]
  misc_feature (18)..(261): Homolog of NCBI NO: 21105740 NR Description: nam-like protein 6 [Petunia x hybrida]
  misc_feature (18)..(261): Homolog of NCBI NO: 21105742 NR Description: nam-like protein 7 [Petunia x hybrida]
  misc_feature (1)..(261): Homolog of NCBI NO: 18399168 NR Description: NAM(no apical meristem) protein, putative
  misc_feature (1)..(261): Homolog of NCBI NO: 25518168 NR Description: BTF3b factor protein F23M19.14 - Arabidopsis
  misc_feature (1)..(261): Homolog of NCBI NO: 18399166 NR Description: expressed protein
  misc_feature (1)..(261): Homolog of NCBI NO: 21618244 NR Description: NAM-like protein [Arabidopsis thaliana]

SEQ ID NO: 32400 - DNA, 1739 bp, Arabidopsis thaliana; identical to SEQ ID NO: 28810
  misc_feature (1)..(1739): Ceres Seq. ID no. 12324446
  misc_feature: MA Experiment ID: 108434 Result: Down-regulated in Transcription
  misc_feature: MA Experiment 108434 PARAMETER Experiment Name: At_Root_Tips_cDNA_P Parameter: Tissue Value: Root Tips
  misc_feature: MA Experiment ID: 108473 Result: Down-regulated in Transcription
  misc_feature: MA Experiment 108473 PARAMETER Experiment Name: At_Drought_Flowers_cDNA_P Parameter: Timepoint (hr) Value: 7 d
  misc_feature: MA Experiment 108473 PARAMETER Experiment Name: At_Drought_Flowers_cDNA_P Parameter: Tissue Value: Flower
  misc_feature: MA Experiment 108473 PARAMETER Experiment Name: At_Drought_Flowers_cDNA_P Parameter: Treatment Value: Drought vs. No Drought
  misc_feature: MA Experiment ID: 108573 Result: Down-regulated in Transcription
  misc_feature: MA Experiment 108573 PARAMETER Experiment Name: At_Drought_cDNA_P Parameter: Timepoint (hr) Value: 6
  misc_feature: MA Experiment 108573 PARAMETER Experiment Name: At_Drought_cDNA_P Parameter: Tissue Value: Aerial
  misc_feature: MA Experiment 108573 PARAMETER Experiment Name: At_Drought_cDNA_P Parameter: Treatment Value: Drought vs. No Drought
  misc_feature: MA Experiment ID: 108585 Result: Down-regulated in Transcription
  misc_feature: MA Experiment 108585 PARAMETER Experiment Name: At_5mM_NaNP_cDNA_P Parameter: Timepoint (hr) Value: 6
  misc_feature: MA Experiment 108585 PARAMETER Experiment Name: At_5mM_NaNP_cDNA_P Parameter: Tissue Value: Aerial
  misc_feature: MA Experiment 108585 PARAMETER Experiment Name: At_5mM_NaNP_cDNA_P Parameter: Treatment Value: null
  misc_feature: MA Experiment ID: 108668 Result: Down-regulated in Transcription
  misc_feature: MA Experiment 108668 PARAMETER Experiment Name: At_2mM_SA_cDNA_P Parameter: Plant Line Value: WS
  misc_feature: MA Experiment 108668 PARAMETER Experiment Name: At_2mM_SA_cDNA_P Parameter: Timepoint (hr) Value: 6
  misc_feature: MA Experiment 108668 PARAMETER Experiment Name: At_2mM_SA_cDNA_P Parameter: Treatment Value: 2mM SA vs. No Treatment
  misc_feature: MA Experiment ID: 20000070 Result: Up-regulated in Transcription
  misc_feature: MA Experiment 20000070 PARAMETER Experiment Name: At_100uM_ABA_Mutants_cDNA_P Parameter: Plant Line Value: CS24
  misc_feature: MA Experiment 20000070 PARAMETER Experiment Name: At_100uM_ABA_Mutants_cDNA_P Parameter: Timepoint (hr) Value: 6
  misc_feature: MA Experiment 20000070 PARAMETER Experiment Name: At_100uM_ABA_Mutants_cDNA_P Parameter: Tissue Value: Aerial
  misc_feature: MA Experiment 20000070 PARAMETER Experiment Name: At_100uM_ABA_Mutants_cDNA_P Parameter: Treatment Value: 100uM ABA vs. No Treatment
  misc_feature: MA Experiment ID: 20000071 Result: Up-regulated in Transcription
  misc_feature: MA Experiment 20000071 PARAMETER Experiment Name: At_100uM_ABA_Mutants_cDNA_P Parameter: Plant Line Value: CS8104
  misc_feature: MA Experiment 20000071 PARAMETER Experiment Name: At_100uM_ABA_Mutants_cDNA_P Parameter: Timepoint (hr) Value: 6
  misc_feature: MA Experiment 20000071 PARAMETER Experiment Name: At_100uM_ABA_Mutants_cDNA_P Parameter: Tissue Value: Aerial
  misc_feature: MA Experiment 20000071 PARAMETER Experiment Name: At_100uM_ABA_Mutants_cDNA_P Parameter: Treatment Value: 100uM ABA vs. No Treatment
  misc_feature: MA Experiment ID: 20000072 Result: Up-regulated in Transcription
  misc_feature: MA Experiment 20000072 PARAMETER Experiment Name: At_100uM_ABA_Mutants_cDNA_P Parameter: Plant Line Value: CS8105
  misc_feature: MA Experiment 20000072 PARAMETER Experiment Name: At_100uM_ABA_Mutants_cDNA_P Parameter: Timepoint (hr) Value: 6
  misc_feature: MA Experiment 20000072 PARAMETER Experiment Name: At_100uM_ABA_Mutants_cDNA_P Parameter: Tissue Value: Aerial
  misc_feature: MA Experiment 20000072 PARAMETER Experiment Name: At_100uM_ABA_Mutants_cDNA_P Parameter: Treatment Value: 100uM ABA vs. No Treatment
  misc_feature: MA Experiment ID: 20000086 Result: Up-regulated in Transcription
  misc_feature: MA Experiment 20000086 PARAMETER Experiment Name: At_100uM_ABA_Mutants_cDNA_P Parameter: Plant Line Value: CS22
  misc_feature: MA Experiment 20000086 PARAMETER Experiment Name: At_100uM_ABA_Mutants_cDNA_P Parameter: Timepoint (hr) Value: 6
  misc_feature: MA Experiment 20000086 PARAMETER Experiment Name: At_100uM_ABA_Mutants_cDNA_P Parameter: Tissue Value: Aerial
  misc_feature: MA Experiment 20000086 PARAMETER Experiment Name: At_100uM_ABA_Mutants_cDNA_P Parameter: Treatment Value: 100uM ABA vs. No Treatment
  misc_feature: MA Experiment ID: 20000087 Result: Up-regulated in Transcription
  misc_feature: MA Experiment 20000087 PARAMETER Experiment Name: At_100uM_ABA_Mutants_cDNA_P Parameter: Plant Line Value: WS
  misc_feature: MA Experiment 20000087 PARAMETER Experiment Name: At_100uM_ABA_Mutants_cDNA_P Parameter: Timepoint (hr) Value: 6
  misc_feature: MA Experiment 20000087 PARAMETER Experiment Name: At_100uM_ABA_Mutants_cDNA_P Parameter: Tissue Value: Aerial
  misc_feature: MA Experiment 20000087 PARAMETER Experiment Name: At_100uM_ABA_Mutants_cDNA_P Parameter: Treatment Value: 100uM ABA vs. No Treatment
  misc_feature: MA Experiment ID: 20000088 Result: Up-regulated in Transcription
  misc_feature: MA Experiment 20000088 PARAMETER Experiment Name: At_100uM_ABA_Mutants_cDNA_P Parameter: Plant Line Value: Landsberg
  misc_feature: MA Experiment 20000088 PARAMETER Experiment Name: At_100uM_ABA_Mutants_cDNA_P Parameter: Timepoint (hr) Value: 6
  misc_feature: MA Experiment 20000088 PARAMETER Experiment Name: At_100uM_ABA_Mutants_cDNA_P Parameter: Tissue Value: Aerial
  misc_feature: MA Experiment 20000088 PARAMETER Experiment Name: At_100uM_ABA_Mutants_cDNA_P Parameter: Treatment Value: 100uM ABA vs. No Treatment
  misc_feature: MA Experiment ID: 20000089 Result: Up-regulated in Transcription
  misc_feature: MA Experiment ID: 20000090 Result: Up-regulated in Transcription
  misc_feature: MA Experiment ID: 20000111 Result: Down-regulated in Transcription
  misc_feature: MA Experiment 20000111 PARAMETER Experiment Name: At_42deg_Heat_cDNA_P Parameter: Temperature (deg C) Value: 42 vs. 22
  misc_feature: MA Experiment 20000111 PARAMETER Experiment Name: At_42deg_Heat_cDNA_P Parameter: Timepoint (hr) Value: 6
  misc_feature: MA Experiment 20000111 PARAMETER Experiment Name: At_42deg_Heat_cDNA_P Parameter: Tissue Value: Aerial
  misc_feature: MA Experiment ID: 20000112 Result: Down-regulated in Transcription
  misc_feature: MA Experiment 20000112 PARAMETER Experiment Name: At_42deg_Heat_cDNA_P Parameter: Temperature (deg C) Value: 42 vs. 22
  misc_feature: MA Experiment 20000112 PARAMETER Experiment Name: At_42deg_Heat_cDNA_P Parameter: Timepoint (hr) Value: 2
  misc_feature: MA Experiment 20000112 PARAMETER Experiment Name: At_42deg_Heat_cDNA_P Parameter: Tissue Value: Aerial
  misc_feature: MA Experiment ID: 20000113 Result: Down-regulated in Transcription
  misc_feature: MA Experiment 20000113 PARAMETER Experiment Name: At_42deg_Heat_cDNA_P Parameter: Temperature (deg C) Value: 42 vs. 22
  misc_feature: MA Experiment 20000113 PARAMETER Experiment Name: At_42deg_Heat_cDNA_P Parameter: Timepoint (hr) Value: 8
  misc_feature: MA Experiment 20000113 PARAMETER Experiment Name: At_42deg_Heat_cDNA_P Parameter: Tissue Value: Aerial
  misc_feature: MA Experiment ID: 20000117 Result: Up-regulated in Transcription
  misc_feature: MA Experiment 20000117 PARAMETER Experiment Name: At_100uM_ABA_Mutants_cDNA_P Parameter: Plant Line Value: Columbia
  misc_feature: MA Experiment 20000117 PARAMETER Experiment Name: At_100uM_ABA_Mutants_cDNA_P Parameter: Timepoint (hr) Value: 6
  misc_feature: MA Experiment 20000117 PARAMETER Experiment Name: At_100uM_ABA_Mutants_cDNA_P Parameter: Tissue Value: Aerial
  misc_feature: MA Experiment 20000117 PARAMETER Experiment Name: At_100uM_ABA_Mutants_cDNA_P Parameter: Treatment Value: 100uM ABA vs. No Treatment
  misc_feature: MA Experiment ID: 20000144 Result: Down-regulated in Transcription
  misc_feature: MA Experiment 20000144 PARAMETER Experiment Name: At_42deg_Heat_cDNA_P Parameter: Temperature (deg C) Value: 42 vs. 22
  misc_feature: MA Experiment 20000144 PARAMETER Experiment Name: At_42deg_Heat_cDNA_P Parameter: Timepoint (hr) Value: 1
  misc_feature: MA Experiment 20000144 PARAMETER Experiment Name: At_42deg_Heat_cDNA_P Parameter: Tissue Value: Aerial
  misc_feature: MA Experiment ID: 20000171 Result: Down-regulated in Transcription
  misc_feature: MA Experiment 20000171 PARAMETER Experiment Name: At_42deg_Heat_P Parameter: Age (day) Value: 14
  misc_feature: MA Experiment 20000171 PARAMETER Experiment Name: At_42deg_Heat_P Parameter: Organism Value: A. thaliana
  misc_feature: MA Experiment 20000171 PARAMETER Experiment Name: At_42deg_Heat_P Parameter: Plant Line Value: WS
  misc_feature: MA Experiment 20000171 PARAMETER Experiment Name: At_42deg_Heat_P Parameter: Temperature (deg C) Value: 42 vs. 22
  misc_feature: MA Experiment 20000171 PARAMETER Experiment Name: At_42deg_Heat_P Parameter: Timepoint (hr) Value: 1
  misc_feature: MA Experiment 20000171 PARAMETER Experiment Name: At_42deg_Heat_P Parameter: Tissue Value: Aerial
  misc_feature: MA Experiment ID: 20000173 Result: Down-regulated in Transcription
  misc_feature: MA Experiment 20000173 PARAMETER Experiment Name: At_42deg_Heat_P Parameter: Age (day) Value: 14
  misc_feature: MA Experiment 20000173 PARAMETER Experiment Name: At_42deg_Heat_P Parameter: Organism Value: A. thaliana
  misc_feature: MA Experiment 20000173 PARAMETER Experiment Name: At_42deg_Heat_P Parameter: Plant Line Value: WS
  misc_feature: MA Experiment 20000173 PARAMETER Experiment Name: At_42deg_Heat_P Parameter: Temperature (deg C) Value: 42 vs. 22
  misc_feature: MA Experiment 20000173 PARAMETER Experiment Name: At_42deg_Heat_P Parameter: Timepoint (hr) Value: 6
  misc_feature: MA Experiment 20000173 PARAMETER Experiment Name: At_42deg_Heat_P Parameter: Tissue Value: Aerial
  misc_feature: MA Experiment ID: 20000180 Result: Up-regulated in Transcription
  misc_feature: MA Experiment 20000180 PARAMETER Experiment Name: At_Germinating_Seeds_P Parameter: Age (hr) Value: 24 vs. 0
  misc_feature: MA Experiment 20000180 PARAMETER Experiment Name: At_Germinating_Seeds_P Parameter: Tissue Value: Germinating Seeds
  misc_feature: MA Experiment ID: 20000184 Result: Down-regulated in Transcription
  misc_feature: MA Experiment 20000184 PARAMETER Experiment Name: At_Shoots__P Parameter: Age (day) Value: 7
  misc_feature: MA Experiment 20000184 PARAMETER Experiment Name: At_Shoots__P Parameter: Tissue Value: Shoots vs. Whole Plant
  misc_feature: MA Experiment ID: 20000185 Result: Down-regulated in Transcription
  misc_feature: MA Experiment 20000185 PARAMETER Experiment Name: At_Roots__P Parameter: Age (day) Value: 7 vs. 21
  misc_feature: MA Experiment 20000185 PARAMETER Experiment Name: At_Roots__P Parameter: Organism Value: A. thaliana
  misc_feature: MA Experiment 20000185 PARAMETER Experiment Name: At_Roots__P Parameter: Tissue Value: Roots vs. Whole Plant
  misc_feature: MA Experiment ID: 20000224 Result: Up-regulated in Transcription
  misc_feature: MA Experiment ID: 20000227 Result: Down-regulated in Transcription
  misc_feature: MA Experiment 20000227 PARAMETER Experiment Name: At_Root-Tips-vs-Tops_P Parameter: Tissue Value: Root Tips vs. Root Tops
  misc_feature: MA Experiment ID: 20000439 Result: Down-regulated in Transcription
  misc_feature: MA Experiment 20000439 PARAMETER Experiment Name: At_Roots__P Parameter: Age (day) Value: 14 vs. 21
  misc_feature: MA Experiment 20000439 PARAMETER Experiment Name: At_Roots__P Parameter: Organism Value: A. thaliana
  misc_feature: MA Experiment 20000439 PARAMETER Experiment Name: At_Roots__P Parameter: Tissue Value: Roots vs. Whole Plant
  misc_feature: MA Experiment ID: 20000495 Result: Up-regulated in Transcription
  misc_feature: MA Experiment 20000495 PARAMETER Experiment Name: At_Guard_Cells_P Parameter: Harvest Date Value: 8/2/2002
  misc_feature: MA Experiment 20000495 PARAMETER Experiment Name: At_Guard_Cells_P Parameter: Organism Value: A. thaliana
  misc_feature: MA Experiment 20000495 PARAMETER Experiment Name: At_Guard_Cells_P Parameter: Tissue Value: Guard Cells vs. Leaves
  misc_feature: MA Experiment ID: 20000527 Result: Down-regulated in Transcription
  misc_feature: MA Experiment 20000527 PARAMETER Experiment Name: At_10percent_PEG_P Parameter: Age (day) Value: 20
  misc_feature: MA Experiment 20000527 PARAMETER Experiment Name: At_10percent_PEG_P Parameter: Organism Value: A. thaliana
  misc_feature: MA Experiment 20000527 PARAMETER Experiment Name: At_10percent_PEG_P Parameter: Plant Line Value: WS
  misc_feature: MA Experiment 20000527 PARAMETER Experiment Name: At_10percent_PEG_P Parameter: Timepoint (day) Value: 20
  misc_feature: MA Experiment 20000527 PARAMETER Experiment Name: At_10percent_PEG_P Parameter: Tissue Value: Whole Plant
  misc_feature: MA Experiment 20000527 PARAMETER Experiment Name: At_10percent_PEG_P Parameter: Treatment Value: 10percent PEG vs. No Treatment
  misc_feature: MA Experiment ID: 20001247 Result: Down-regulated in Transcription
  misc_feature: MA Experiment 20001247 PARAMETER Experiment Name: At_Far-red-induction_P Parameter: Age (day) Value: 7
  misc_feature: MA Experiment 20001247 PARAMETER Experiment Name: At_Far-red-induction_P Parameter: Light Value: Far-red vs. White
  misc_feature: MA Experiment 20001247 PARAMETER Experiment Name: At_Far-red-induction_P Parameter: Organism Value: A. thaliana
  misc_feature: MA Experiment 20001247 PARAMETER Experiment Name: At_Far-red-induction_P Parameter: Plant Line Value: Columbia
  misc_feature: MA Experiment 20001247 PARAMETER Experiment Name: At_Far-red-induction_P Parameter: Timepoint (hr) Value: 1
  misc_feature: MA Experiment 20001247 PARAMETER Experiment Name: At_Far-red-induction_P Parameter: Tissue Value: Whole Plant
  misc_feature: MA Experiment ID: 20001556 Result: Down-regulated in Transcription
  misc_feature: MA Experiment 20001556 PARAMETER Experiment Name: At_Drought_Soil_Dry_P Parameter: Age (day) Value: 26
  misc_feature: MA Experiment 20001556 PARAMETER Experiment Name: At_Drought_Soil_Dry_P Parameter: Organism Value: A. thaliana
  misc_feature: MA Experiment 20001556 PARAMETER Experiment Name: At_Drought_Soil_Dry_P Parameter: Plant Line Value: WS
  misc_feature: MA Experiment 20001556 PARAMETER Experiment Name: At_Drought_Soil_Dry_P Parameter: Post Timepoint (hr) Value: None
  misc_feature: MA Experiment 20001556 PARAMETER Experiment Name: At_Drought_Soil_Dry_P Parameter: Post-Treatment Value: None
  misc_feature: MA Experiment 20001556 PARAMETER Experiment Name: At_Drought_Soil_Dry_P Parameter: Timepoint (day) Value: 12
  misc_feature: MA Experiment 20001556 PARAMETER Experiment Name: At_Drought_Soil_Dry_P Parameter: Treatment Value: Drought vs. No Drought
  misc_feature: MA Experiment ID: 20001558 Result: Down-regulated in Transcription
  misc_feature: MA Experiment 20001558 PARAMETER Experiment Name: At_Drought_Soil_Dry_P Parameter: Age (day) Value: 27
  misc_feature: MA Experiment 20001558 PARAMETER Experiment Name: At_Drought_Soil_Dry_P Parameter: Organism Value: A. thaliana
  misc_feature: MA Experiment 20001558 PARAMETER Experiment Name: At_Drought_Soil_Dry_P Parameter: Plant Line Value: WS
  misc_feature: MA Experiment 20001558 PARAMETER Experiment Name: At_Drought_Soil_Dry_P Parameter: Post Timepoint (hr) Value: 6
  misc_feature: MA Experiment 20001558 PARAMETER Experiment Name: At_Drought_Soil_Dry_P Parameter: Post-Treatment Value: Re-Water vs. No Drought
  misc_feature: MA Experiment 20001558 PARAMETER Experiment Name: At_Drought_Soil_Dry_P Parameter: Timepoint (day) Value: 13
  misc_feature: MA Experiment 20001558 PARAMETER Experiment Name: At_Drought_Soil_Dry_P Parameter: Treatment Value: Drought vs. No Drought
  misc_feature: MA Experiment ID: 20001559 Result: Down-regulated in Transcription
  misc_feature: MA Experiment 20001559 PARAMETER Experiment Name: At_Drought_Soil_Dry_P Parameter: Age (day) Value: 28
  misc_feature: MA Experiment 20001559 PARAMETER Experiment Name: At_Drought_Soil_Dry_P Parameter: Organism Value: A. thaliana
  misc_feature: MA Experiment 20001559 PARAMETER Experiment Name: At_Drought_Soil_Dry_P Parameter: Plant Line Value: WS
  misc_feature: MA Experiment 20001559 PARAMETER Experiment Name: At_Drought_Soil_Dry_P Parameter: Post Timepoint (hr) Value: 29
  misc_feature: MA Experiment 20001559 PARAMETER Experiment Name: At_Drought_Soil_Dry_P Parameter: Post-Treatment Value: Re-Water vs. No Drought
  misc_feature: MA Experiment 20001559 PARAMETER Experiment Name: At_Drought_Soil_Dry_P Parameter: Timepoint (day) Value: 14
  misc_feature: MA Experiment 20001559 PARAMETER Experiment Name: At_Drought_Soil_Dry_P Parameter: Treatment Value: Drought vs. No Drought
  misc_feature: MA Experiment ID: 20001910 Result: Down-regulated in Transcription
  misc_feature: MA Experiment 20001910 PARAMETER Experiment Name: At_Drought_Reproduction_P Parameter: Age (day) Value: 37
  misc_feature: MA Experiment 20001910 PARAMETER Experiment Name: At_Drought_Reproduction_P Parameter: Organism Value: A. thaliana
  misc_feature: MA Experiment 20001910 PARAMETER Experiment Name: At_Drought_Reproduction_P Parameter: Plant Line Value: WS
  misc_feature: MA Experiment 20001910 PARAMETER Experiment Name: At_Drought_Reproduction_P Parameter: Timepoint (day) Value: 7
  misc_feature: MA Experiment 20001910 PARAMETER Experiment Name: At_Drought_Reproduction_P Parameter: Tissue Value: Flowers
  misc_feature: MA Experiment 20001910 PARAMETER Experiment Name: At_Drought_Reproduction_P Parameter: Treatment Value: Drought vs. No Drought

SEQ ID NO: 32401 - protein, 521 aa, Arabidopsis thaliana; identical to SEQ ID NO: 28811
  peptide (1)..(521): Ceres Seq. ID no. 12324447
  misc_feature (49)..(521): Pfam Name: Glycosyl hydrolase family 1 Pfam Description: Glycosyl hydrolase family 1
  misc_feature (405)..(521): Homolog of NCBI NO: 12746303 NR Description: beta-glucosidase [Musa acuminata]
  misc_feature (36)..(388): Homolog of NCBI NO: 12746303 NR Description: beta-glucosidase [Musa acuminata]
  misc_feature (24)..(517): Homolog of NCBI NO: 22658440 NR Description: beta-glucosidase [Oryza sativa (japonica
  misc_feature (20)..(517): Homolog of NCBI NO: 18875458 NR Description: beta-glucosidase [Oryza sativa]
  misc_feature (46)..(519): Homolog of NCBI NO: 34899014 NR Description: putative non-cyanogenic beta-glucosidase
  misc_feature (44)..(521): Homolog of NCBI NO: 1362162 NR Description: beta-glucosidase BGQ60 precursor - barley
  misc_feature (14)..(518): Homolog of NCBI NO: 17226270 NR Description: beta-mannosidase enzyme [Lycopersicon esculentum]
  misc_feature (21)..(521): Homolog of NCBI NO: 9294062 NR Description: beta-glucosidase [Arabidopsis thaliana]
  misc_feature (21)..(521): Homolog of NCBI NO: 22331147 NR Description: glycosyl hydrolase family 1; protein id:
  misc_feature (10)..(521): Homolog of NCBI NO: 15229584 NR Description: glycosyl hydrolase family 1

SEQ ID NO: 32402 - protein, 512 aa, Arabidopsis thaliana; identical to SEQ ID NO: 28812
  peptide (1)..(512): Ceres Seq. ID no. 12324448
  misc_feature (40)..(512): Pfam Name: Glycosyl hydrolase family 1 Pfam Description: Glycosyl hydrolase family 1
  misc_feature (396)..(512): Homolog of NCBI NO: 12746303 NR Description: beta-glucosidase [Musa acuminata]
  misc_feature (27)..(379): Homolog of NCBI NO: 12746303 NR Description: beta-glucosidase [Musa acuminata]
  misc_feature (15)..(508): Homolog of NCBI NO: 22658440 NR Description: beta-glucosidase [Oryza sativa (japonica
  misc_feature (11)..(508): Homolog of NCBI NO: 18875458 NR Description: beta-glucosidase [Oryza sativa]
  misc_feature (37)..(510): Homolog of NCBI NO: 34899014 NR Description: putative non-cyanogenic beta-glucosidase
  misc_feature (35)..(512): Homolog of NCBI NO: 1362162 NR Description: beta-glucosidase BGQ60 precursor - barley
  misc_feature (5)..(509): Homolog of NCBI NO: 17226270 NR Description: beta-mannosidase enzyme [Lycopersicon esculentum]
  misc_feature (12)..(512): Homolog of NCBI NO: 9294062 NR Description: beta-glucosidase [Arabidopsis thaliana]
  misc_feature (12)..(512): Homolog of NCBI NO: 22331147 NR Description: glycosyl hydrolase family 1; protein id:
  misc_feature (1)..(512): Homolog of NCBI NO: 15229584 NR Description: glycosyl hydrolase family 1

SEQ ID NO: 32403 - protein, 407 aa, Arabidopsis thaliana; identical to SEQ ID NO: 28813
  peptide (1)..(407): Ceres Seq. ID no. 12324449
  misc_feature (1)..(407): Pfam Name: Glycosyl hydrolase family 1 Pfam Description: Glycosyl hydrolase family 1
  misc_feature (291)..(407): Homolog of NCBI NO: 12746303 NR Description: beta-glucosidase [Musa acuminata]
  misc_feature (1)..(274): Homolog of NCBI NO: 12746303 NR Description: beta-glucosidase [Musa acuminata]
  misc_feature (1)..(403): Homolog of NCBI NO: 22658440 NR Description: beta-glucosidase [Oryza sativa (japonica
  misc_feature (1)..(403): Homolog of NCBI NO: 18875458 NR Description: beta-glucosidase [Oryza sativa]
  misc_feature (1)..(405): Homolog of NCBI NO: 34899014 NR Description: putative non-cyanogenic beta-glucosidase
  misc_feature (1)..(407): Homolog of NCBI NO: 1362162 NR Description: beta-glucosidase BGQ60 precursor - barley
  misc_feature (1)..(404): Homolog of NCBI NO: 17226270 NR Description: beta-mannosidase enzyme [Lycopersicon esculentum]
  misc_feature (1)..(407): Homolog of NCBI NO: 9294062 NR Description: beta-glucosidase [Arabidopsis thaliana]
  misc_feature (1)..(407): Homolog of NCBI NO: 22331147 NR Description: glycosyl hydrolase family 1; protein id:
  misc_feature (1)..(407): Homolog of NCBI NO: 15229584 NR Description: glycosyl hydrolase family 1

SEQ ID NO: 32404 - DNA, 1589 bp, Arabidopsis thaliana; identical to SEQ ID NO: 28814
  misc_feature (1)..(1589): Ceres Seq. ID no. 13497178
  misc_feature: MA Experiment ID: 108434 Result: Up-regulated in Transcription
  misc_feature: MA Experiment 108434 PARAMETER Experiment Name: At_Root_Tips_cDNA_P Parameter: Tissue Value: Root Tips
  misc_feature: MA Experiment ID: 108463 Result: Down-regulated in Transcription
  misc_feature: MA Experiment 108463 PARAMETER Experiment Name: At_Germinating_Seeds_cDNA_P Parameter: Age (day) Value: 3 vs. 0
  misc_feature: MA Experiment 108463 PARAMETER Experiment Name: At_Germinating_Seeds_cDNA_P Parameter: Tissue Value: Germinating Seeds
  misc_feature: MA Experiment ID: 108576 Result: Down-regulated in Transcription
  misc_feature: MA Experiment 108576 PARAMETER Experiment Name: At_42deg_Heat_cDNA_P Parameter: Temperature (deg C) Value: 42 vs. 22
  misc_feature: MA Experiment 108576 PARAMETER Experiment Name: At_42deg_Heat_cDNA_P Parameter: Timepoint (hr) Value: 1
  misc_feature: MA Experiment 108576 PARAMETER Experiment Name: At_42deg_Heat_cDNA_P Parameter: Tissue Value: Aerial
  misc_feature: MA Experiment ID: 108577 Result: Down-regulated in Transcription
  misc_feature: MA Experiment 108577 PARAMETER Experiment Name: At_42deg_Heat_cDNA_P Parameter: Temperature (deg C) Value: 42 vs. 22
  misc_feature: MA Experiment 108577 PARAMETER Experiment Name: At_42deg_Heat_cDNA_P Parameter: Timepoint (hr) Value: 6
  misc_feature: MA Experiment 108577 PARAMETER Experiment Name: At_42deg_Heat_cDNA_P Parameter: Tissue Value: Aerial
  misc_feature: MA Experiment ID: 108585 Result: Up-regulated in Transcription
  misc_feature: MA Experiment 108585 PARAMETER Experiment Name: At_5mM_NaNP_cDNA_P Parameter: Timepoint (hr) Value: 6
  misc_feature: MA Experiment 108585 PARAMETER Experiment Name: At_5mM_NaNP_cDNA_P Parameter: Tissue Value: Aerial
  misc_feature: MA Experiment 108585 PARAMETER Experiment Name: At_5mM_NaNP_cDNA_P Parameter: Treatment Value: null
  misc_feature: MA Experiment ID: 108668 Result: Down-regulated in Transcription
  misc_feature: MA Experiment 108668 PARAMETER Experiment Name: At_2mM_SA_cDNA_P Parameter: Plant Line Value: WS
  misc_feature: MA Experiment 108668 PARAMETER Experiment Name: At_2mM_SA_cDNA_P Parameter: Timepoint (hr) Value: 6
  misc_feature: MA Experiment 108668 PARAMETER Experiment Name: At_2mM_SA_cDNA_P Parameter: Treatment Value: 2mM SA vs. No Treatment
  misc_feature: MA Experiment ID: 20000069 Result: Down-regulated in Transcription
  misc_feature: MA Experiment 20000069 PARAMETER Experiment Name: At_100uM_ABA_Mutants_cDNA_P Parameter: Plant Line Value: CS23
  misc_feature: MA Experiment 20000069 PARAMETER Experiment Name: At_100uM_ABA_Mutants_cDNA_P Parameter: Timepoint (hr) Value: 6
  misc_feature: MA Experiment 20000069 PARAMETER Experiment Name: At_100uM_ABA_Mutants_cDNA_P Parameter: Tissue Value: Aerial
  misc_feature: MA Experiment 20000069 PARAMETER Experiment Name: At_100uM_ABA_Mutants_cDNA_P Parameter: Treatment Value: 100uM ABA vs. No Treatment
  misc_feature: MA Experiment ID: 20000071 Result: Down-regulated in Transcription
  misc_feature: MA Experiment 20000071 PARAMETER Experiment Name: At_100uM_ABA_Mutants_cDNA_P Parameter: Plant Line Value: CS8104
  misc_feature: MA Experiment 20000071 PARAMETER Experiment Name: At_100uM_ABA_Mutants_cDNA_P Parameter: Timepoint (hr) Value: 6
  misc_feature: MA Experiment 20000071 PARAMETER Experiment Name: At_100uM_ABA_Mutants_cDNA_P Parameter: Tissue Value: Aerial
  misc_feature: MA Experiment 20000071 PARAMETER Experiment Name: At_100uM_ABA_Mutants_cDNA_P Parameter: Treatment Value: 100uM ABA vs. No Treatment
  misc_feature: MA Experiment ID: 20000072 Result: Down-regulated in Transcription
  misc_feature: MA Experiment 20000072 PARAMETER Experiment Name: At_100uM_ABA_Mutants_cDNA_P Parameter: Plant Line Value: CS8105
  misc_feature: MA Experiment 20000072 PARAMETER Experiment Name: At_100uM_ABA_Mutants_cDNA_P Parameter: Timepoint (hr) Value: 6
  misc_feature: MA Experiment 20000072 PARAMETER Experiment Name: At_100uM_ABA_Mutants_cDNA_P Parameter: Tissue Value: Aerial
  misc_feature: MA Experiment 20000072 PARAMETER Experiment Name: At_100uM_ABA_Mutants_cDNA_P Parameter: Treatment Value: 100uM ABA vs. No Treatment
  misc_feature: MA Experiment ID: 20000086 Result: Down-regulated in Transcription
  misc_feature: MA Experiment 20000086 PARAMETER Experiment Name: At_100uM_ABA_Mutants_cDNA_P Parameter: Plant Line Value: CS22
  misc_feature: MA Experiment 20000086 PARAMETER Experiment Name: At_100uM_ABA_Mutants_cDNA_P Parameter: Timepoint (hr) Value: 6
  misc_feature: MA Experiment 20000086 PARAMETER Experiment Name: At_100uM_ABA_Mutants_cDNA_P Parameter: Tissue Value: Aerial
  misc_feature: MA Experiment 20000086 PARAMETER Experiment Name: At_100uM_ABA_Mutants_cDNA_P Parameter: Treatment Value: 100uM ABA vs. No Treatment
  misc_feature: MA Experiment ID: 20000087 Result: Down-regulated in Transcription
  misc_feature: MA Experiment 20000087 PARAMETER Experiment Name: At_100uM_ABA_Mutants_cDNA_P Parameter: Plant Line Value: WS
  misc_feature: MA Experiment 20000087 PARAMETER Experiment Name: At_100uM_ABA_Mutants_cDNA_P Parameter: Timepoint (hr) Value: 6
  misc_feature: MA Experiment 20000087 PARAMETER Experiment Name: At_100uM_ABA_Mutants_cDNA_P Parameter: Tissue Value: Aerial
  misc_feature: MA Experiment 20000087 PARAMETER Experiment Name: At_100uM_ABA_Mutants_cDNA_P Parameter: Treatment Value: 100uM ABA vs. No Treatment
  misc_feature: MA Experiment ID: 20000089 Result: Down-regulated in Transcription
  misc_feature: MA Experiment ID: 20000090 Result: Down-regulated in Transcription
  misc_feature: MA Experiment ID: 20000093 Result: Down-regulated in Transcription
  misc_feature: MA Experiment 20000093 PARAMETER Experiment Name: At_42deg_Heat_cDNA_P Parameter: Temperature (deg C) Value: 42 vs. 22
  misc_feature: MA Experiment 20000093 PARAMETER Experiment Name: At_42deg_Heat_cDNA_P Parameter: Timepoint (hr) Value: 0.5
  misc_feature: MA Experiment 20000093 PARAMETER Experiment Name: At_42deg_Heat_cDNA_P Parameter: Tissue Value: Aerial
  misc_feature: MA Experiment ID: 20000111 Result: Down-regulated in Transcription
  misc_feature: MA Experiment 20000111 PARAMETER Experiment Name: At_42deg_Heat_cDNA_P Parameter: Temperature (deg C) Value: 42 vs. 22
  misc_feature: MA Experiment 20000111 PARAMETER Experiment Name: At_42deg_Heat_cDNA_P Parameter: Timepoint (hr) Value: 6
  misc_feature: MA Experiment 20000111 PARAMETER Experiment Name: At_42deg_Heat_cDNA_P Parameter: Tissue Value: Aerial
  misc_feature: MA Experiment ID: 20000112 Result: Down-regulated in Transcription
  misc_feature: MA Experiment 20000112 PARAMETER Experiment Name: At_42deg_Heat_cDNA_P Parameter: Temperature (deg C) Value: 42 vs. 22
  misc_feature: MA Experiment 20000112 PARAMETER Experiment Name: At_42deg_Heat_cDNA_P Parameter: Timepoint (hr) Value: 2
  misc_feature: MA Experiment 20000112 PARAMETER Experiment Name: At_42deg_Heat_cDNA_P Parameter: Tissue Value: Aerial
  misc_feature: MA Experiment ID: 20000113 Result: Down-regulated in Transcription
  misc_feature: MA Experiment 20000113 PARAMETER Experiment Name: At_42deg_Heat_cDNA_P Parameter: Temperature (deg C) Value: 42 vs. 22
  misc_feature: MA Experiment 20000113 PARAMETER Experiment Name: At_42deg_Heat_cDNA_P Parameter: Timepoint (hr) Value: 8
  misc_feature: MA Experiment 20000113 PARAMETER Experiment Name: At_42deg_Heat_cDNA_P Parameter: Tissue Value: Aerial
  misc_feature: MA Experiment ID: 20000117 Result: Down-regulated in Transcription
  misc_feature: MA Experiment 20000117 PARAMETER Experiment Name: At_100uM_ABA_Mutants_cDNA_P Parameter: Plant Line Value: Columbia
  misc_feature: MA Experiment 20000117 PARAMETER Experiment Name: At_100uM_ABA_Mutants_cDNA_P Parameter: Timepoint (hr) Value: 6
  misc_feature: MA Experiment 20000117 PARAMETER Experiment Name: At_100uM_ABA_Mutants_cDNA_P Parameter: Tissue Value: Aerial
  misc_feature: MA Experiment 20000117 PARAMETER Experiment Name: At_100uM_ABA_Mutants_cDNA_P Parameter: Treatment Value: 100uM ABA vs. No Treatment
  misc_feature: MA Experiment ID: 20000144 Result: Down-regulated in Transcription
  misc_feature: MA Experiment 20000144 PARAMETER Experiment Name: At_42deg_Heat_cDNA_P Parameter: Temperature (deg C) Value: 42 vs. 22
  misc_feature: MA Experiment 20000144 PARAMETER Experiment Name: At_42deg_Heat_cDNA_P Parameter: Timepoint (hr) Value: 1
  misc_feature: MA Experiment 20000144 PARAMETER Experiment Name: At_42deg_Heat_cDNA_P Parameter: Tissue Value: Aerial
  misc_feature: MA Experiment ID: 20000171 Result: Down-regulated in Transcription
  misc_feature: MA Experiment 20000171 PARAMETER Experiment Name: At_42deg_Heat_P Parameter: Age (day) Value: 14
  misc_feature: MA Experiment 20000171 PARAMETER Experiment Name: At_42deg_Heat_P Parameter: Organism Value: A. thaliana
  misc_feature: MA Experiment 20000171 PARAMETER Experiment Name: At_42deg_Heat_P Parameter: Plant Line Value: WS
  misc_feature: MA Experiment 20000171 PARAMETER Experiment Name: At_42deg_Heat_P Parameter: Temperature (deg C) Value: 42 vs. 22
  misc_feature: MA Experiment 20000171 PARAMETER Experiment Name: At_42deg_Heat_P Parameter: Timepoint (hr) Value: 1
  misc_feature: MA Experiment 20000171 PARAMETER Experiment Name: At_42deg_Heat_P Parameter: Tissue Value: Aerial
  misc_feature: MA Experiment ID: 20000173 Result: Down-regulated in Transcription
  misc_feature: MA Experiment 20000173 PARAMETER Experiment Name: At_42deg_Heat_P Parameter: Age (day) Value: 14
  misc_feature: MA Experiment 20000173 PARAMETER Experiment Name: At_42deg_Heat_P Parameter: Organism Value: A. thaliana
  misc_feature: MA Experiment 20000173 PARAMETER Experiment Name: At_42deg_Heat_P Parameter: Plant Line Value: WS
  misc_feature: MA Experiment 20000173 PARAMETER Experiment Name: At_42deg_Heat_P Parameter: Temperature (deg C) Value: 42 vs. 22
  misc_feature: MA Experiment 20000173 PARAMETER Experiment Name: At_42deg_Heat_P Parameter: Timepoint (hr) Value: 6
  misc_feature: MA Experiment 20000173 PARAMETER Experiment Name: At_42deg_Heat_P Parameter: Tissue Value: Aerial
  misc_feature: MA Experiment ID: 20000184 Result: Up-regulated in Transcription
  misc_feature: MA Experiment 20000184 PARAMETER Experiment Name: At_Shoots__P Parameter: Age (day) Value: 7
  misc_feature: MA Experiment 20000184 PARAMETER Experiment Name: At_Shoots__P Parameter: Tissue Value: Shoots vs. Whole Plant
  misc_feature: MA Experiment ID: 20000185 Result: Down-regulated in Transcription
  misc_feature: MA Experiment 20000185 PARAMETER Experiment Name: At_Roots__P Parameter: Age (day) Value: 7 vs. 21
  misc_feature: MA Experiment 20000185 PARAMETER Experiment Name: At_Roots__P Parameter: Organism Value: A. thaliana
  misc_feature: MA Experiment 20000185 PARAMETER Experiment Name: At_Roots__P Parameter: Tissue Value: Roots vs. Whole Plant
  misc_feature: MA Experiment ID: 20000234 Result: Up-regulated in Transcription
  misc_feature: MA Experiment 20000234 PARAMETER Experiment Name: At_Siliques_P Parameter: Age (day) Value: 21
  misc_feature: MA Experiment 20000234 PARAMETER Experiment Name: At_Siliques_P Parameter: Organism Value: A. thaliana
  misc_feature: MA Experiment 20000234 PARAMETER Experiment Name: At_Siliques_P Parameter: Plant Line Value: WS
  misc_feature: MA Experiment 20000234 PARAMETER Experiment Name: At_Siliques_P Parameter: Tissue Value: Less Than 5mm Siliques vs. Whole Plant
  misc_feature: MA Experiment ID: 20000235 Result: Up-regulated in Transcription
  misc_feature: MA Experiment 20000235 PARAMETER Experiment Name: At_Siliques_P Parameter: Age (day) Value: 21
  misc_feature: MA Experiment 20000235 PARAMETER Experiment Name: At_Siliques_P Parameter: Organism Value: A. thaliana
  misc_feature: MA Experiment 20000235 PARAMETER Experiment Name: At_Siliques_P Parameter: Plant Line Value: WS
  misc_feature: MA Experiment 20000235 PARAMETER Experiment Name: At_Siliques_P Parameter: Tissue Value: 5-10mm Siliques vs. Whole Plant
  misc_feature: MA Experiment ID: 20000437 Result: Down-regulated in Transcription
  misc_feature: MA Experiment 20000437 PARAMETER Experiment Name: At_Drought_P Parameter: Age (day) Value: 8
  misc_feature: MA Experiment 20000437 PARAMETER Experiment Name: At_Drought_P Parameter: Organism Value: A. thaliana
  misc_feature: MA Experiment 20000437 PARAMETER Experiment Name: At_Drought_P Parameter: Plant Line Value: WS
  misc_feature: MA Experiment 20000437 PARAMETER Experiment Name: At_Drought_P Parameter: Timepoint (hr) Value: 24
  misc_feature: MA Experiment 20000437 PARAMETER Experiment Name: At_Drought_P Parameter: Tissue Value: Whole Plant
  misc_feature: MA Experiment 20000437 PARAMETER Experiment Name: At_Drought_P Parameter: Treatment Value: Drought vs. No Drought
  misc_feature: MA Experiment ID: 20000439 Result: Down-regulated in Transcription
  misc_feature: MA Experiment 20000439 PARAMETER Experiment Name: At_Roots__P Parameter: Age (day) Value: 14 vs. 21
  misc_feature: MA Experiment 20000439 PARAMETER Experiment Name: At_Roots__P Parameter: Organism Value: A. thaliana
  misc_feature: MA Experiment 20000439 PARAMETER Experiment Name: At_Roots__P Parameter: Tissue Value: Roots vs. Whole Plant
  misc_feature: MA Experiment ID: 20001247 Result: Up-regulated in Transcription
  misc_feature: MA Experiment 20001247 PARAMETER Experiment Name: At_Far-red-induction_P Parameter: Age (day) Value: 7
  misc_feature: MA Experiment 20001247 PARAMETER Experiment Name: At_Far-red-induction_P Parameter: Light Value: Far-red vs. White
  misc_feature: MA Experiment 20001247 PARAMETER Experiment Name: At_Far-red-induction_P Parameter: Organism Value: A. thaliana
  misc_feature: MA Experiment 20001247 PARAMETER Experiment Name: At_Far-red-induction_P Parameter: Plant Line Value: Columbia
  misc_feature: MA Experiment 20001247 PARAMETER Experiment Name: At_Far-red-induction_P Parameter: Timepoint (hr) Value: 1
  misc_feature: MA Experiment 20001247 PARAMETER Experiment Name: At_Far-red-induction_P Parameter: Tissue Value: Whole Plant
  misc_feature: MA Experiment ID: 20001905 Result: Down-regulated in Transcription
  misc_feature: MA Experiment 20001905 PARAMETER Experiment Name: At_Drought_Reproduction_P Parameter: Age (day) Value: 40
  misc_feature: MA Experiment 20001905 PARAMETER Experiment Name: At_Drought_Reproduction_P Parameter: Organism Value: A. thaliana
  misc_feature: MA Experiment 20001905 PARAMETER Experiment Name: At_Drought_Reproduction_P Parameter: Plant Line Value: WS
  misc_feature: MA Experiment 20001905 PARAMETER Experiment Name: At_Drought_Reproduction_P Parameter: Timepoint (day) Value: 10
  misc_feature: MA Experiment 20001905 PARAMETER Experiment Name: At_Drought_Reproduction_P Parameter: Tissue Value: Rosettes
  misc_feature: MA Experiment 20001905 PARAMETER Experiment Name: At_Drought_Reproduction_P Parameter: Treatment Value: Drought vs. No Drought
  misc_feature: MA Experiment ID: 20001911 Result: Down-regulated in Transcription
  misc_feature: MA Experiment 20001911 PARAMETER Experiment Name: At_Drought_Reproduction_P Parameter: Age (day) Value: 40
  misc_feature: MA Experiment 20001911 PARAMETER Experiment Name: At_Drought_Reproduction_P Parameter: Organism Value: A. thaliana
  misc_feature: MA Experiment 20001911 PARAMETER Experiment Name: At_Drought_Reproduction_P Parameter: Plant Line Value: WS
  misc_feature: MA Experiment 20001911 PARAMETER Experiment Name: At_Drought_Reproduction_P Parameter: Timepoint (day) Value: 10
  misc_feature: MA Experiment 20001911 PARAMETER Experiment Name: At_Drought_Reproduction_P Parameter: Tissue Value: Flowers
  misc_feature: MA Experiment 20001911 PARAMETER Experiment Name: At_Drought_Reproduction_P Parameter: Treatment Value: Drought vs. No Drought

SEQ ID NO: 32405 - protein, 434 aa, Arabidopsis thaliana; identical to SEQ ID NO: 28815
  peptide (1)..(434): Ceres Seq. ID no. 13497179
  misc_feature (36)..(357): Pfam Name: Glycosyl hydrolases family 17 Pfam Description: Glycosyl hydrolases family 17
  misc_feature (12)..(366): Homolog of NCBI NO: 34908492 NR Description: putative beta-1,3-glucanase
  misc_feature (35)..(375): Homolog of NCBI NO: 38346337 NR Description: OSJNBa0073L04.8 [Oryza sativa (japonica
  misc_feature (10)..(358): Homolog of NCBI NO: 25316425 NR Description: probable beta-1,3-glucanase [imported] -
  misc_feature (10)..(358): Homolog of NCBI NO: 18401444 NR Description: glycosyl hydrolase family 17 [Arabidopsis
  misc_feature (34)..(394): Homolog of NCBI NO: 6006371 NR Description: Similar to hypothetical protein - potato (S31196)
  misc_feature (36)..(408): Homolog of NCBI NO: 37531294 NR Description: putative beta-1,3-glucanase
  misc_feature (20)..(386): Homolog of NCBI NO: 419789 NR Description: hypothetical protein - potato
  misc_feature (10)..(426): Homolog of NCBI NO: 30692765 NR Description: glycosyl hydrolase family 17 [Arabidopsis
  misc_feature (10)..(430): Homolog of NCBI NO: 25316443 NR Description: CDS protein F9L11.6 [imported] - Arabidopsis
  misc_feature (10)..(434): Homolog of NCBI NO: 15238298 NR Description: glycosyl hydrolase family 17 [Arabidopsis

SEQ ID NO: 32406 - protein, 425 aa, Arabidopsis thaliana; identical to SEQ ID NO: 28816
  peptide (1)..(425): Ceres Seq. ID no. 13497180
  misc_feature (27)..(348): Pfam Name: Glycosyl hydrolases family 17 Pfam Description: Glycosyl hydrolases family 17
  misc_feature (3)..(357): Homolog of NCBI NO: 34908492 NR Description: putative beta-1,3-glucanase
  misc_feature (26)..(366): Homolog of NCBI NO: 38346337 NR Description: OSJNBa0073L04.8 [Oryza sativa (japonica
  misc_feature (1)..(349): Homolog of NCBI NO: 25316425 NR Description: probable beta-1,3-glucanase [imported] -
  misc_feature (1)..(349): Homolog of NCBI NO: 18401444 NR Description: glycosyl hydrolase family 17 [Arabidopsis
  misc_feature (25)..(385): Homolog of NCBI NO: 6006371 NR Description: Similar to hypothetical protein - potato (S31196)
  misc_feature (27)..(399): Homolog of NCBI NO: 37531294 NR Description: putative beta-1,3-glucanase
  misc_feature (11)..(377): Homolog of NCBI NO: 419789 NR Description: hypothetical protein - potato
  misc_feature (1)..(417): Homolog of NCBI NO: 30692765 NR Description: glycosyl hydrolase family 17 [Arabidopsis
  misc_feature (1)..(421): Homolog of NCBI NO: 25316443 NR Description: CDS protein F9L11.6 [imported] - Arabidopsis
  misc_feature (1)..(425): Homolog of NCBI NO: 15238298 NR Description: glycosyl hydrolase family 17 [Arabidopsis

SEQ ID NO: 32407 - protein, 338 aa, Arabidopsis thaliana; identical to SEQ ID NO: 28817
  peptide (1)..(338): Ceres Seq. ID no. 13497181
  misc_feature (1)..(261): Pfam Name: Glycosyl hydrolases family 17 Pfam Description: Glycosyl hydrolases family 17
  misc_feature (1)..(270): Homolog of NCBI NO: 34908492 NR Description: putative beta-1,3-glucanase
  misc_feature (1)..(279): Homolog of NCBI NO: 38346337 NR Description: OSJNBa0073L04.8 [Oryza sativa (japonica
  misc_feature (1)..(262): Homolog of NCBI NO: 25316425 NR Description: probable beta-1,3-glucanase [imported] -
  misc_feature (1)..(262): Homolog of NCBI NO: 18401444 NR Description: glycosyl hydrolase family 17 [Arabidopsis
  misc_feature (1)..(298): Homolog of NCBI NO: 6006371 NR Description: Similar to hypothetical protein - potato (S31196)
  misc_feature (1)..(312): Homolog of NCBI NO: 37531294 NR Description: putative beta-1,3-glucanase
  misc_feature (1)..(290): Homolog of NCBI NO: 419789 NR Description: hypothetical protein - potato
  misc_feature (1)..(330): Homolog of NCBI NO: 30692765 NR Description: glycosyl hydrolase family 17 [Arabidopsis
  misc_feature (1)..(334): Homolog of NCBI NO: 25316443 NR Description: CDS protein F9L11.6 [imported] - Arabidopsis
  misc_feature (1)..(338): Homolog of NCBI NO: 15238298 NR Description: glycosyl hydrolase family 17 [Arabidopsis

SEQ ID NO: 32408 - DNA, 1132 bp, Arabidopsis thaliana; identical to SEQ ID NO: 28818
  misc_feature (1)..(1132): Ceres Seq. ID no. 12371695
  misc_feature: MA Experiment ID: 108434 Result: Down-regulated in Transcription
  misc_feature: MA Experiment 108434 PARAMETER Experiment Name: At_Root_Tips_cDNA_P Parameter: Tissue Value: Root Tips
  misc_feature: MA Experiment ID: 108462 Result: Up-regulated in Transcription
  misc_feature: MA Experiment 108462 PARAMETER Experiment Name: At_Germinating_Seeds_cDNA_P Parameter: Age (day) Value: 2 vs. 0
  misc_feature: MA Experiment 108462 PARAMETER Experiment Name: At_Germinating_Seeds_cDNA_P Parameter: Tissue Value: Germinating Seeds
  misc_feature: MA Experiment ID: 108463 Result: Up-regulated in Transcription
  misc_feature: MA Experiment 108463 PARAMETER Experiment Name: At_Germinating_Seeds_cDNA_P Parameter: Age (day) Value: 3 vs. 0
  misc_feature: MA Experiment 108463 PARAMETER Experiment Name: At_Germinating_Seeds_cDNA_P Parameter: Tissue Value: Germinating Seeds
  misc_feature: MA Experiment ID: 108464 Result: Up-regulated in Transcription
  misc_feature: MA Experiment 108464 PARAMETER Experiment Name: At_Germinating_Seeds_cDNA_P Parameter: Age (day) Value: 4 vs. 0
  misc_feature: MA Experiment 108464 PARAMETER Experiment Name: At_Germinating_Seeds_cDNA_P Parameter: Tissue Value: Germinating Seeds
  misc_feature: MA Experiment ID: 108569 Result: Up-regulated in Transcription
  misc_feature: MA Experiment 108569 PARAMETER Experiment Name: At_0.001%_MeJA__cDNA_P Parameter: Timepoint (hr) Value: 6
  misc_feature: MA Experiment 108569 PARAMETER Experiment Name: At_0.001%_MeJA__cDNA_P Parameter: Tissue Value: Aerial
  misc_feature: MA Experiment 108569 PARAMETER Experiment Name: At_0.001%_MeJA__cDNA_P Parameter: Treatment Value: 0.001% MeJA vs. No Treatment
  misc_feature: MA Experiment ID: 108572 Result: Up-regulated in Transcription
  misc_feature: MA Experiment 108572 PARAMETER Experiment Name: At_Drought_cDNA_P Parameter: Timepoint (hr) Value: 1
  misc_feature: MA Experiment 108572 PARAMETER Experiment Name: At_Drought_cDNA_P Parameter: Tissue Value: Aerial
  misc_feature: MA Experiment 108572 PARAMETER Experiment Name: At_Drought_cDNA_P Parameter: Treatment Value: Drought vs. No Drought
  misc_feature: MA Experiment ID: 108573 Result: Up-regulated in Transcription
  misc_feature: MA Experiment 108573 PARAMETER Experiment Name: At_Drought_cDNA_P Parameter: Timepoint (hr) Value: 6
  misc_feature: MA Experiment 108573 PARAMETER Experiment Name: At_Drought_cDNA_P Parameter: Tissue Value: Aerial
  misc_feature: MA Experiment 108573 PARAMETER Experiment Name: At_Drought_cDNA_P Parameter: Treatment Value: Drought vs. No Drought
  misc_feature: MA Experiment ID: 108574 Result: Up-regulated in Transcription
  misc_feature: MA Experiment 108574 PARAMETER Experiment Name: At_Wounding__cDNA_P Parameter: Timepoint (hr) Value: 1
  misc_feature: MA Experiment 108574 PARAMETER Experiment Name: At_Wounding__cDNA_P Parameter: Tissue Value: Aerial
  misc_feature: MA Experiment 108574 PARAMETER Experiment Name: At_Wounding__cDNA_P Parameter: Treatment Value: Wounding vs. No Wounding
  misc_feature: MA Experiment ID: 108576 Result: Up-regulated in Transcription
  misc_feature: MA Experiment 108576 PARAMETER Experiment Name: At_42deg_Heat_cDNA_P Parameter: Temperature (deg C) Value: 42 vs. 22
  misc_feature: MA Experiment 108576 PARAMETER Experiment Name: At_42deg_Heat_cDNA_P Parameter: Timepoint (hr) Value: 1
  misc_feature: MA Experiment 108576 PARAMETER Experiment Name: At_42deg_Heat_cDNA_P Parameter: Tissue Value: Aerial
  misc_feature: MA Experiment ID: 108577 Result: Up-regulated in Transcription
  misc_feature: MA Experiment 108577 PARAMETER Experiment Name: At_42deg_Heat_cDNA_P Parameter: Temperature (deg C) Value: 42 vs. 22
  misc_feature: MA Experiment 108577 PARAMETER Experiment Name: At_42deg_Heat_cDNA_P Parameter: Timepoint (hr) Value: 6
  misc_feature: MA Experiment 108577 PARAMETER Experiment Name: At_42deg_Heat_cDNA_P Parameter: Tissue Value: Aerial
  misc_feature: MA Experiment ID: 108579 Result: Down-regulated in Transcription
  misc_feature: MA Experiment 108579 PARAMETER Experiment Name: At_4deg_Cold_cDNA_P Parameter: Temperature (deg C) Value: 4 vs. 22
  misc_feature: MA Experiment 108579 PARAMETER Experiment Name: At_4deg_Cold_cDNA_P Parameter: Timepoint (hr) Value: 6
  misc_feature: MA Experiment 108579 PARAMETER Experiment Name: At_4deg_Cold_cDNA_P Parameter: Tissue Value: Aerial
  misc_feature: MA Experiment ID: 108585 Result: Up-regulated in Transcription
  misc_feature: MA Experiment 108585 PARAMETER Experiment Name: At_5mM_NaNP_cDNA_P Parameter: Timepoint (hr) Value: 6
  misc_feature: MA Experiment 108585 PARAMETER Experiment Name: At_5mM_NaNP_cDNA_P Parameter: Tissue Value: Aerial
  misc_feature: MA Experiment 108585 PARAMETER Experiment Name: At_5mM_NaNP_cDNA_P Parameter: Treatment Value: null
  misc_feature: MA Experiment ID: 108594 Result: Down-regulated in Transcription
  misc_feature: MA Experiment 108594 PARAMETER Experiment Name: At_Ler-rhl_Root_cDNA_P Parameter: Plant Line Value: null
  misc_feature: MA Experiment ID: 20000086 Result: Down-regulated in Transcription
  misc_feature: MA Experiment 20000086 PARAMETER Experiment Name: At_100uM_ABA_Mutants_cDNA_P Parameter: Plant Line Value: CS22
  misc_feature: MA Experiment 20000086 PARAMETER Experiment Name: At_100uM_ABA_Mutants_cDNA_P Parameter: Timepoint (hr) Value: 6
  misc_feature: MA Experiment 20000086 PARAMETER Experiment Name: At_100uM_ABA_Mutants_cDNA_P Parameter: Tissue Value: Aerial
  misc_feature: MA Experiment 20000086 PARAMETER Experiment Name: At_100uM_ABA_Mutants_cDNA_P Parameter: Treatment Value: 100uM ABA vs. No Treatment
  misc_feature: MA Experiment ID: 20000087 Result: Down-regulated in Transcription
  misc_feature: MA Experiment 20000087 PARAMETER Experiment Name: At_100uM_ABA_Mutants_cDNA_P Parameter: Plant Line Value: WS
  misc_feature: MA Experiment 20000087 PARAMETER Experiment Name: At_100uM_ABA_Mutants_cDNA_P Parameter: Timepoint (hr) Value: 6
  misc_feature: MA Experiment 20000087 PARAMETER Experiment Name: At_100uM_ABA_Mutants_cDNA_P Parameter: Tissue Value: Aerial
  misc_feature: MA Experiment 20000087 PARAMETER Experiment Name: At_100uM_ABA_Mutants_cDNA_P Parameter: Treatment Value: 100uM ABA vs. No Treatment
  misc_feature: MA Experiment ID: 20000089 Result: Down-regulated in Transcription
  misc_feature: MA Experiment ID: 20000090 Result: Down-regulated in Transcription
  misc_feature: MA Experiment ID: 20000093 Result: Up-regulated in Transcription
  misc_feature: MA Experiment 20000093 PARAMETER Experiment Name: At_42deg_Heat_cDNA_P Parameter: Temperature (deg C) Value: 42 vs. 22
  misc_feature: MA Experiment 20000093 PARAMETER Experiment Name: At_42deg_Heat_cDNA_P Parameter: Timepoint (hr) Value: 0.5
  misc_feature: MA Experiment 20000093 PARAMETER Experiment Name: At_42deg_Heat_cDNA_P Parameter: Tissue Value: Aerial
  misc_feature: MA Experiment ID: 20000111 Result: Up-regulated in Transcription
  misc_feature: MA Experiment 20000111 PARAMETER Experiment Name: At_42deg_Heat_cDNA_P Parameter: Temperature (deg C) Value: 42 vs. 22
  misc_feature: MA Experiment 20000111 PARAMETER Experiment Name: At_42deg_Heat_cDNA_P Parameter: Timepoint (hr) Value: 6
  misc_feature: MA Experiment 20000111 PARAMETER Experiment Name: At_42deg_Heat_cDNA_P Parameter: Tissue Value: Aerial
  misc_feature: MA Experiment ID: 20000113 Result: Up-regulated in Transcription
  misc_feature: MA Experiment 20000113 PARAMETER Experiment Name: At_42deg_Heat_cDNA_P Parameter: Temperature (deg C) Value: 42 vs. 22
  misc_feature: MA Experiment 20000113 PARAMETER Experiment Name: At_42deg_Heat_cDNA_P Parameter: Timepoint (hr) Value: 8
  misc_feature: MA Experiment 20000113 PARAMETER Experiment Name: At_42deg_Heat_cDNA_P Parameter: Tissue Value: Aerial
  misc_feature: MA Experiment ID: 20000166 Result: Up-regulated in Transcription
  misc_feature: MA Experiment 20000166 PARAMETER Experiment Name: At_100uM_ABA_P Parameter: Age (day) Value: 14
  misc_feature: MA Experiment 20000166 PARAMETER Experiment Name: At_100uM_ABA_P Parameter: Organism Value: A. thaliana
  misc_feature: MA Experiment 20000166 PARAMETER Experiment Name: At_100uM_ABA_P Parameter: Plant Line Value: WS
  misc_feature: MA Experiment 20000166 PARAMETER Experiment Name: At_100uM_ABA_P Parameter: Timepoint (hr) Value: 1
  misc_feature: MA Experiment 20000166 PARAMETER Experiment Name: At_100uM_ABA_P Parameter: Tissue Value: Aerial
  misc_feature: MA Experiment 20000166 PARAMETER Experiment Name: At_100uM_ABA_P Parameter: Treatment Value: 100uM ABA vs. No Treatment
  misc_feature: MA Experiment ID: 20000171 Result: Up-regulated in Transcription
  misc_feature: MA Experiment 20000171 PARAMETER Experiment Name: At_42deg_Heat_P Parameter: Age (day) Value: 14
  misc_feature: MA Experiment 20000171 PARAMETER Experiment Name: At_42deg_Heat_P Parameter: Organism Value: A. thaliana
  misc_feature: MA Experiment 20000171 PARAMETER Experiment Name: At_42deg_Heat_P Parameter: Plant Line Value: WS
  misc_feature: MA Experiment 20000171 PARAMETER Experiment Name: At_42deg_Heat_P Parameter: Temperature (deg C) Value: 42 vs. 22
  misc_feature: MA Experiment 20000171 PARAMETER Experiment Name: At_42deg_Heat_P Parameter: Timepoint (hr) Value: 1
  misc_feature: MA Experiment 20000171 PARAMETER Experiment Name: At_42deg_Heat_P Parameter: Tissue Value: Aerial
  misc_feature: MA Experiment ID: 20000173 Result: Up-regulated in Transcription
  misc_feature: MA Experiment 20000173 PARAMETER Experiment Name: At_42deg_Heat_P Parameter: Age (day) Value: 14
  misc_feature: MA Experiment 20000173 PARAMETER Experiment Name: At_42deg_Heat_P Parameter: Organism Value: A. thaliana
  misc_feature: MA Experiment 20000173 PARAMETER Experiment Name: At_42deg_Heat_P Parameter: Plant Line Value: WS
  misc_feature: MA Experiment 20000173 PARAMETER Experiment Name: At_42deg_Heat_P Parameter: Temperature (deg C) Value: 42 vs. 22
  misc_feature: MA Experiment 20000173 PARAMETER Experiment Name: At_42deg_Heat_P Parameter: Timepoint (hr) Value: 6
  misc_feature: MA Experiment 20000173 PARAMETER Experiment Name: At_42deg_Heat_P Parameter: Tissue Value: Aerial
  misc_feature: MA Experiment ID: 20000182 Result: Up-regulated in Transcription
  misc_feature: MA Experiment 20000182 PARAMETER Experiment Name: At_2mM_SA_P Parameter: Age (day) Value: 14
  misc_feature: MA Experiment 20000182 PARAMETER Experiment Name: At_2mM_SA_P Parameter: Organism Value: A. thaliana
  misc_feature: MA Experiment 20000182 PARAMETER Experiment Name: At_2mM_SA_P Parameter: Plant Line Value: WS
  misc_feature: MA Experiment 20000182 PARAMETER Experiment Name: At_2mM_SA_P Parameter: Timepoint (hr) Value: 6
  misc_feature: MA Experiment 20000182 PARAMETER Experiment Name: At_2mM_SA_P Parameter: Tissue Value: Aerial
  misc_feature: MA Experiment 20000182 PARAMETER Experiment Name: At_2mM_SA_P Parameter: Treatment Value: 2mM SA vs. No Treatment
  misc_feature: MA Experiment ID: 20000184 Result: Up-regulated in Transcription
  misc_feature: MA Experiment 20000184 PARAMETER Experiment Name: At_Shoots__P Parameter: Age (day) Value: 7
  misc_feature: MA Experiment 20000184 PARAMETER Experiment Name: At_Shoots__P Parameter: Tissue Value: Shoots vs. Whole Plant
  misc_feature: MA Experiment ID: 20000185 Result: Up-regulated in Transcription
  misc_feature: MA Experiment 20000185 PARAMETER Experiment Name: At_Roots__P Parameter: Age (day) Value: 7 vs. 21
  misc_feature: MA Experiment 20000185 PARAMETER Experiment Name: At_Roots__P Parameter: Organism Value: A. thaliana
  misc_feature: MA Experiment 20000185 PARAMETER Experiment Name: At_Roots__P Parameter: Tissue Value: Roots vs. Whole Plant
  misc_feature: MA Experiment ID: 20000269 Result: Down-regulated in Transcription
  misc_feature: MA Experiment 20000269 PARAMETER Experiment Name: At_1mM_KNO3_L-vs-H_Roots_P Parameter: Age (day) Value: 7,10,12
  misc_feature: MA Experiment 20000269 PARAMETER Experiment Name: At_1mM_KNO3_L-vs-H_Roots_P Parameter: Organism Value: A. thaliana
  misc_feature: MA Experiment 20000269 PARAMETER Experiment Name: At_1mM_KNO3_L-vs-H_Roots_P Parameter: Plant Line Value: WS
  misc_feature: MA Experiment 20000269 PARAMETER Experiment Name: At_1mM_KNO3_L-vs-H_Roots_P Parameter: Timepoint (day) Value: 7,10,12
  misc_feature: MA Experiment 20000269 PARAMETER Experiment Name: At_1mM_KNO3_L-vs-H_Roots_P Parameter: Tissue Value: Roots
  misc_feature: MA Experiment 20000269 PARAMETER Experiment Name: At_1mM_KNO3_L-vs-H_Roots_P Parameter: Treatment Value: 1mM KNO3 vs. 50mM KNO3
  misc_feature: MA Experiment ID: 20000437 Result: Down-regulated in Transcription
  misc_feature: MA Experiment 20000437 PARAMETER Experiment Name: At_Drought_P Parameter: Age (day) Value: 8
  misc_feature: MA Experiment 20000437 PARAMETER Experiment Name: At_Drought_P Parameter: Organism Value: A. thaliana
  misc_feature: MA Experiment 20000437 PARAMETER Experiment Name: At_Drought_P Parameter: Plant Line Value: WS
  misc_feature: MA Experiment 20000437 PARAMETER Experiment Name: At_Drought_P Parameter: Timepoint (hr) Value: 24
  misc_feature: MA Experiment 20000437 PARAMETER Experiment Name: At_Drought_P Parameter: Tissue Value: Whole Plant
  misc_feature: MA Experiment 20000437 PARAMETER Experiment Name: At_Drought_P Parameter: Treatment Value: Drought vs. No Drought
  misc_feature: MA Experiment ID: 20000439 Result: Up-regulated in Transcription
  misc_feature: MA Experiment 20000439 PARAMETER Experiment Name: At_Roots__P Parameter: Age (day) Value: 14 vs. 21
  misc_feature: MA Experiment 20000439 PARAMETER Experiment Name: At_Roots__P Parameter: Organism Value: A. thaliana
  misc_feature: MA Experiment 20000439 PARAMETER Experiment Name: At_Roots__P Parameter: Tissue Value: Roots vs. Whole Plant
  misc_feature: MA Experiment ID: 20000451 Result: Down-regulated in Transcription
  misc_feature: MA Experiment 20000451 PARAMETER Experiment Name: At_CS6879_Shoots-Roots_P Parameter: Age (day) Value: 14
  misc_feature: MA Experiment 20000451 PARAMETER Experiment Name: At_CS6879_Shoots-Roots_P Parameter: Organism Value: A. thaliana
  misc_feature: MA Experiment 20000451 PARAMETER Experiment Name: At_CS6879_Shoots-Roots_P Parameter: Plant Line Value: CS6879 vs. WS
  misc_feature: MA Experiment 20000451 PARAMETER Experiment Name: At_CS6879_Shoots-Roots_P Parameter: Tissue Value: Roots
  misc_feature: MA Experiment ID: 20000506 Result: Up-regulated in Transcription
  misc_feature: MA Experiment 20000506 PARAMETER Experiment Name: At_Wounding_P Parameter: Organism Value: A. thaliana
  misc_feature: MA Experiment 20000506 PARAMETER Experiment Name: At_Wounding_P Parameter: Plant Line Value: WS
  misc_feature: MA Experiment 20000506 PARAMETER Experiment Name: At_Wounding_P Parameter: Timepoint (hr) Value: 6
  misc_feature: MA Experiment 20000506 PARAMETER Experiment Name: At_Wounding_P Parameter: Tissue Value: Aerial
  misc_feature: MA Experiment 20000506 PARAMETER Experiment Name: At_Wounding_P Parameter: Treatment Value: Wounding vs. No Wounding
  misc_feature: MA Experiment ID: 20001247 Result: Up-regulated in Transcription
  misc_feature: MA Experiment 20001247 PARAMETER Experiment Name: At_Far-red-induction_P Parameter: Age (day) Value: 7
  misc_feature: MA Experiment 20001247 PARAMETER Experiment Name: At_Far-red-induction_P Parameter: Light Value: Far-red vs. White
  misc_feature: MA Experiment 20001247 PARAMETER Experiment Name: At_Far-red-induction_P Parameter: Organism Value: A. thaliana
  misc_feature: MA Experiment 20001247 PARAMETER Experiment Name: At_Far-red-induction_P Parameter: Plant Line Value: Columbia
  misc_feature: MA Experiment 20001247 PARAMETER Experiment Name: At_Far-red-induction_P Parameter: Timepoint (hr) Value: 1
  misc_feature: MA Experiment 20001247 PARAMETER Experiment Name: At_Far-red-induction_P Parameter: Tissue Value: Whole Plant
  misc_feature: MA Experiment ID: 20001248 Result: Down-regulated in Transcription
  misc_feature: MA Experiment 20001248 PARAMETER Experiment Name: At_Far-red-induction_P Parameter: Age (day) Value: 7
  misc_feature: MA Experiment 20001248 PARAMETER Experiment Name: At_Far-red-induction_P Parameter: Light Value: Far-red vs. White
  misc_feature: MA Experiment 20001248 PARAMETER Experiment Name: At_Far-red-induction_P Parameter: Organism Value: A. thaliana
  misc_feature: MA Experiment 20001248 PARAMETER Experiment Name: At_Far-red-induction_P Parameter: Plant Line Value: Columbia
  misc_feature: MA Experiment 20001248 PARAMETER Experiment Name: At_Far-red-induction_P Parameter: Timepoint (hr) Value: 4
  misc_feature: MA Experiment 20001248 PARAMETER Experiment Name: At_Far-red-induction_P Parameter: Tissue Value: Whole Plant
  misc_feature: MA Experiment ID: 20001556 Result: Down-regulated in Transcription
  misc_feature: MA Experiment 20001556 PARAMETER Experiment Name: At_Drought_Soil_Dry_P Parameter: Age (day) Value: 26
  misc_feature: MA Experiment 20001556 PARAMETER Experiment Name: At_Drought_Soil_Dry_P Parameter: Organism Value: A. thaliana
  misc_feature: MA Experiment 20001556 PARAMETER Experiment Name: At_Drought_Soil_Dry_P Parameter: Plant Line Value: WS
  misc_feature: MA Experiment 20001556 PARAMETER Experiment Name: At_Drought_Soil_Dry_P Parameter: Post Timepoint (hr) Value: None
  misc_feature: MA Experiment 20001556 PARAMETER Experiment Name: At_Drought_Soil_Dry_P Parameter: Post-Treatment Value: None
  misc_feature: MA Experiment 20001556 PARAMETER Experiment Name: At_Drought_Soil_Dry_P Parameter: Timepoint (day) Value: 12
  misc_feature: MA Experiment 20001556 PARAMETER Experiment Name: At_Drought_Soil_Dry_P Parameter: Treatment Value: Drought vs. No Drought
  misc_feature: MA Experiment ID: 20001557 Result: Up-regulated in Transcription
  misc_feature: MA Experiment 20001557 PARAMETER Experiment Name: At_Drought_Soil_Dry_P Parameter: Age (day) Value: 27
  misc_feature: MA Experiment 20001557 PARAMETER Experiment Name: At_Drought_Soil_Dry_P Parameter: Organism Value: A. thaliana
  misc_feature: MA Experiment 20001557 PARAMETER Experiment Name: At_Drought_Soil_Dry_P Parameter: Plant Line Value: WS
  misc_feature: MA Experiment 20001557 PARAMETER Experiment Name: At_Drought_Soil_Dry_P Parameter: Post Timepoint (hr) Value: 3
  misc_feature: MA Experiment 20001557 PARAMETER Experiment Name: At_Drought_Soil_Dry_P Parameter: Post-Treatment Value: Re-Water vs. No Drought
  misc_feature: MA Experiment 20001557 PARAMETER Experiment Name: At_Drought_Soil_Dry_P Parameter: Timepoint (day) Value: 13
  misc_feature: MA Experiment 20001557 PARAMETER Experiment Name: At_Drought_Soil_Dry_P Parameter: Treatment Value: Drought vs. No Drought
  misc_feature: MA Experiment ID: 20001558 Result: Up-regulated in Transcription
  misc_feature: MA Experiment 20001558 PARAMETER Experiment Name: At_Drought_Soil_Dry_P Parameter: Age (day) Value: 27
  misc_feature: MA Experiment 20001558 PARAMETER Experiment Name: At_Drought_Soil_Dry_P Parameter: Organism Value: A. thaliana
  misc_feature: MA Experiment 20001558 PARAMETER Experiment Name: At_Drought_Soil_Dry_P Parameter: Plant Line Value: WS
  misc_feature: MA Experiment 20001558 PARAMETER Experiment Name: At_Drought_Soil_Dry_P Parameter: Post Timepoint (hr) Value: 6
  misc_feature: MA Experiment 20001558 PARAMETER Experiment Name: At_Drought_Soil_Dry_P Parameter: Post-Treatment Value: Re-Water vs. No Drought
  misc_feature: MA Experiment 20001558 PARAMETER Experiment Name: At_Drought_Soil_Dry_P Parameter: Timepoint (day) Value: 13
  misc_feature: MA Experiment 20001558 PARAMETER Experiment Name: At_Drought_Soil_Dry_P Parameter: Treatment Value: Drought vs. No Drought
  misc_feature: MA Experiment ID: 20001560 Result: Up-regulated in Transcription
  misc_feature: MA Experiment 20001560 PARAMETER Experiment Name: At_Drought_Soil_Dry_P Parameter: Age (day) Value: 28
  misc_feature: MA Experiment 20001560 PARAMETER Experiment Name: At_Drought_Soil_Dry_P Parameter: Organism Value: A. thaliana
  misc_feature: MA Experiment 20001560 PARAMETER Experiment Name: At_Drought_Soil_Dry_P Parameter: Plant Line Value: WS
  misc_feature: MA Experiment 20001560 PARAMETER Experiment Name: At_Drought_Soil_Dry_P Parameter: Post Timepoint (hr) Value: None
  misc_feature: MA Experiment 20001560 PARAMETER Experiment Name: At_Drought_Soil_Dry_P Parameter: Post-Treatment Value: None
  misc_feature: MA Experiment 20001560 PARAMETER Experiment Name: At_Drought_Soil_Dry_P Parameter: Timepoint (day) Value: 14
  misc_feature: MA Experiment 20001560 PARAMETER Experiment Name: At_Drought_Soil_Dry_P Parameter: Treatment Value: Drought vs. No Drought
  misc_feature: MA Experiment ID: 20001768 Result: Up-regulated in Transcription
  misc_feature: MA Experiment 20001768 PARAMETER Experiment Name: At_Far-red-enriched-adult_P Parameter: Age (day) Value: 28
  misc_feature: MA Experiment 20001768 PARAMETER Experiment Name: At_Far-red-enriched-adult_P Parameter: Light Value: Far-red enriched vs. White
  misc_feature: MA Experiment 20001768 PARAMETER Experiment Name: At_Far-red-enriched-adult_P Parameter: Organism Value: A. thaliana
  misc_feature: MA Experiment 20001768 PARAMETER Experiment Name: At_Far-red-enriched-adult_P Parameter: Plant Line Value: Columbia
  misc_feature: MA Experiment 20001768 PARAMETER Experiment Name: At_Far-red-enriched-adult_P Parameter: Timepoint (hr) Value: 1
  misc_feature: MA Experiment 20001768 PARAMETER Experiment Name: At_Far-red-enriched-adult_P Parameter: Tissue Value: Aerial
  misc_feature: MA Experiment ID: 20001905 Result: Down-regulated in Transcription
  misc_feature: MA Experiment 20001905 PARAMETER Experiment Name: At_Drought_Reproduction_P Parameter: Age (day) Value: 40
  misc_feature: MA Experiment 20001905 PARAMETER Experiment Name: At_Drought_Reproduction_P Parameter: Organism Value: A. thaliana
  misc_feature: MA Experiment 20001905 PARAMETER Experiment Name: At_Drought_Reproduction_P Parameter: Plant Line Value: WS
  misc_feature: MA Experiment 20001905 PARAMETER Experiment Name: At_Drought_Reproduction_P Parameter: Timepoint (day) Value: 10
  misc_feature: MA Experiment 20001905 PARAMETER Experiment Name: At_Drought_Reproduction_P Parameter: Tissue Value: Rosettes
  misc_feature: MA Experiment 20001905 PARAMETER Experiment Name: At_Drought_Reproduction_P Parameter: Treatment Value: Drought vs. No Drought
  misc_feature: MA Experiment ID: 20001911 Result: Down-regulated in Transcription
  misc_feature: MA Experiment 20001911 PARAMETER Experiment Name: At_Drought_Reproduction_P Parameter: Age (day) Value: 40
  misc_feature: MA Experiment 20001911 PARAMETER Experiment Name: At_Drought_Reproduction_P Parameter: Organism Value: A. thaliana
  misc_feature: MA Experiment 20001911 PARAMETER Experiment Name: At_Drought_Reproduction_P Parameter: Plant Line Value: WS
  misc_feature: MA Experiment 20001911 PARAMETER Experiment Name: At_Drought_Reproduction_P Parameter: Timepoint (day) Value: 10
  misc_feature: MA Experiment 20001911 PARAMETER Experiment Name: At_Drought_Reproduction_P Parameter: Tissue Value: Flowers
  misc_feature: MA Experiment 20001911 PARAMETER Experiment Name: At_Drought_Reproduction_P Parameter: Treatment Value: Drought vs. No Drought

SEQ ID NO: 32409 - protein, 285 aa, Arabidopsis thaliana; identical to SEQ ID NO: 28819
  peptide (1)..(285): Ceres Seq. ID no. 12371696
  misc_feature (29)..(264): Pfam Name: Major intrinsic protein Pfam Description: Major intrinsic protein
  misc_feature (1)..(285): Homolog of NCBI NO: 5081421 NR Description: plasma membrane intrinsic protein 1 [Brassica
  misc_feature (1)..(285): Homolog of NCBI NO: 3551133 NR Description: Plasma membrane aquaporin (PAQ2) [Raphanus
  misc_feature (1)..(283): Homolog of NCBI NO: 7209562 NR Description: Plasma membrane aquaporin 2c [Raphanus sativus]
  misc_feature (1)..(283): Homolog of NCBI NO: 5081423 NR Description: plasma membrane intrinsic protein 2 [Brassica
  misc_feature (1)..(283): Homolog of NCBI NO: 7209560 NR Description: Plasma membrane aquaporin 2b [Raphanus sativus]
  misc_feature (1)..(285): Homolog of NCBI NO: 629543 NR Description: plasma membrane intrinsic protein 2b -
  misc_feature (1)..(285): Homolog of NCBI NO: 21554356 NR Description: aquaporin (plasma membrane intrinsic protein 2B)
  misc_feature (1)..(285): Homolog of NCBI NO: 15228095 NR Description: aquaporin (plasma membrane intrinsic protein 2B)
  misc_feature (1)..(285): Homolog of NCBI NO: 21537097 NR Description: aquaporin (plasma membrane intrinsic protein 2C)
  misc_feature (1)..(285): Homolog of NCBI NO: 15228096 NR Description: aquaporin (plasma membrane intrinsic protein 2C)

SEQ ID NO: 32410 - protein, 198 aa, Arabidopsis thaliana; identical to SEQ ID NO: 28820
  peptide (1)..(198): Ceres Seq. ID no. 12371697
  misc_feature (1)..(177): Pfam Name: Major intrinsic protein Pfam Description: Major intrinsic protein
  misc_feature (1)..(198): Homolog of NCBI NO: 5081421 NR Description: plasma membrane intrinsic protein 1 [Brassica
  misc_feature (1)..(198): Homolog of NCBI NO: 3551133 NR Description: Plasma membrane aquaporin (PAQ2) [Raphanus
  misc_feature (1)..(196): Homolog of NCBI NO: 7209562 NR Description: Plasma membrane aquaporin 2c [Raphanus sativus]
  misc_feature (1)..(196): Homolog of NCBI NO: 5081423 NR Description: plasma membrane intrinsic protein 2 [Brassica
  misc_feature (1)..(196): Homolog of NCBI NO: 7209560 NR Description: Plasma membrane aquaporin 2b [Raphanus sativus]
  misc_feature (1)..(198): Homolog of NCBI NO: 629543 NR Description: plasma membrane intrinsic protein 2b -
  misc_feature (1)..(198): Homolog of NCBI NO: 21554356 NR Description: aquaporin (plasma membrane intrinsic protein 2B)
  misc_feature (1)..(198): Homolog of NCBI NO: 15228095 NR Description: aquaporin (plasma membrane intrinsic protein 2B)
  misc_feature (1)..(198): Homolog of NCBI NO: 21537097 NR Description: aquaporin (plasma membrane intrinsic protein 2C)
  misc_feature (1)..(198): Homolog of NCBI NO: 15228096 NR Description: aquaporin (plasma membrane intrinsic protein 2C)

SEQ ID NO: 32411 - protein, 159 aa, Arabidopsis thaliana; identical to SEQ ID NO: 28821
  peptide (1)..(159): Ceres Seq. ID no. 12371698
  misc_feature (1)..(138): Pfam Name: Major intrinsic protein Pfam Description: Major intrinsic protein
  misc_feature (1)..(159): Homolog of NCBI NO: 5081421 NR Description: plasma membrane intrinsic protein 1 [Brassica
  misc_feature (1)..(159): Homolog of NCBI NO: 3551133 NR Description: Plasma membrane aquaporin (PAQ2) [Raphanus
  misc_feature (1)..(157): Homolog of NCBI NO: 7209562 NR Description: Plasma membrane aquaporin 2c [Raphanus sativus]
  misc_feature (1)..(157): Homolog of NCBI NO: 5081423 NR Description: plasma membrane intrinsic protein 2 [Brassica
  misc_feature (1)..(157): Homolog of NCBI NO: 7209560 NR Description: Plasma membrane aquaporin 2b [Raphanus sativus]
  misc_feature (1)..(159): Homolog of NCBI NO: 629543 NR Description: plasma membrane intrinsic protein 2b -
  misc_feature (1)..(159): Homolog of NCBI NO: 21554356 NR Description: aquaporin (plasma membrane intrinsic protein 2B)
  misc_feature (1)..(159): Homolog of NCBI NO: 15228095 NR Description: aquaporin (plasma membrane intrinsic protein 2B)
  misc_feature (1)..(159): Homolog of NCBI NO: 21537097 NR Description: aquaporin (plasma membrane intrinsic protein 2C)
  misc_feature (1)..(159): Homolog of NCBI NO: 15228096 NR Description: aquaporin (plasma membrane intrinsic protein 2C)

SEQ ID NO: 32412 - DNA, 1154 bp, Arabidopsis thaliana; identical to SEQ ID NO: 26919
  misc_feature (1)..(1154): Ceres Seq. ID no. 12385275
  misc_feature: MA Experiment ID: 108435 Result: Up-regulated in Transcription
  misc_feature: MA Experiment 108435 PARAMETER Experiment Name: At_stm_Mutants_cDNA_P Parameter: Plant Line Value: wt Landsburg vs stm
  misc_feature: MA Experiment 108435 PARAMETER Experiment Name: At_stm_Mutants_cDNA_P Parameter: Tissue Value: Shoot Apical Meristem Region
  misc_feature: MA Experiment ID: 108461 Result: Up-regulated in Transcription
  misc_feature: MA Experiment 108461 PARAMETER Experiment Name: At_Germinating_Seeds_cDNA_P Parameter: Age (day) Value: 1 vs. 0
  misc_feature: MA Experiment 108461 PARAMETER Experiment Name: At_Germinating_Seeds_cDNA_P Parameter: Tissue Value: Germinating Seeds
  misc_feature: MA Experiment ID: 108462 Result: Up-regulated in Transcription
  misc_feature: MA Experiment 108462 PARAMETER Experiment Name: At_Germinating_Seeds_cDNA_P Parameter: Age (day) Value: 2 vs. 0
  misc_feature: MA Experiment 108462 PARAMETER Experiment Name: At_Germinating_Seeds_cDNA_P Parameter: Tissue Value: Germinating Seeds
  misc_feature: MA Experiment ID: 108473 Result: Down-regulated in Transcription
  misc_feature: MA Experiment 108473 PARAMETER Experiment Name: At_Drought_Flowers_cDNA_P Parameter: Timepoint (hr) Value: 7 d
  misc_feature: MA Experiment 108473 PARAMETER Experiment Name: At_Drought_Flowers_cDNA_P Parameter: Tissue Value: Flower
  misc_feature: MA Experiment 108473 PARAMETER Experiment Name: At_Drought_Flowers_cDNA_P Parameter: Treatment Value: Drought vs. No Drought
  misc_feature: MA Experiment ID: 20000069 Result: Down-regulated in Transcription
  misc_feature: MA Experiment 20000069 PARAMETER Experiment Name: At_100uM_ABA_Mutants_cDNA_P Parameter: Plant Line Value: CS23
  misc_feature: MA Experiment 20000069 PARAMETER Experiment Name: At_100uM_ABA_Mutants_cDNA_P Parameter: Timepoint (hr) Value: 6
  misc_feature: MA Experiment 20000069 PARAMETER Experiment Name: At_100uM_ABA_Mutants_cDNA_P Parameter: Tissue Value: Aerial
  misc_feature: MA Experiment 20000069 PARAMETER Experiment Name: At_100uM_ABA_Mutants_cDNA_P Parameter: Treatment Value: 100uM ABA vs. No Treatment
  misc_feature: MA Experiment ID: 20000111 Result: Down-regulated in Transcription
  misc_feature: MA Experiment 20000111 PARAMETER Experiment Name: At_42deg_Heat_cDNA_P Parameter: Temperature (deg C) Value: 42 vs. 22
  misc_feature: MA Experiment 20000111 PARAMETER Experiment Name: At_42deg_Heat_cDNA_P Parameter: Timepoint (hr) Value: 6
  misc_feature: MA Experiment 20000111 PARAMETER Experiment Name: At_42deg_Heat_cDNA_P Parameter: Tissue Value: Aerial
  misc_feature: MA Experiment ID: 20000144 Result: Down-regulated in Transcription
  misc_feature: MA Experiment 20000144 PARAMETER Experiment Name: At_42deg_Heat_cDNA_P Parameter: Temperature (deg C) Value: 42 vs. 22
  misc_feature: MA Experiment 20000144 PARAMETER Experiment Name: At_42deg_Heat_cDNA_P Parameter: Timepoint (hr) Value: 1
  misc_feature: MA Experiment 20000144 PARAMETER Experiment Name: At_42deg_Heat_cDNA_P Parameter: Tissue Value: Aerial
  misc_feature: MA Experiment ID: 20000180 Result: Up-regulated in Transcription
  misc_feature: MA Experiment 20000180 PARAMETER Experiment Name: At_Germinating_Seeds_P Parameter: Age (hr) Value: 24 vs. 0
  misc_feature: MA Experiment 20000180 PARAMETER Experiment Name: At_Germinating_Seeds_P Parameter: Tissue Value: Germinating Seeds
  misc_feature: MA Experiment ID: 20000185 Result: Down-regulated in Transcription
  misc_feature: MA Experiment 20000185 PARAMETER Experiment Name: At_Roots__P Parameter: Age (day) Value: 7 vs. 21
  misc_feature: MA Experiment 20000185 PARAMETER Experiment Name: At_Roots__P Parameter: Organism Value: A. thaliana
  misc_feature: MA Experiment 20000185 PARAMETER Experiment Name: At_Roots__P Parameter: Tissue Value: Roots vs. Whole Plant
  misc_feature: MA Experiment ID: 20000224 Result: Up-regulated in Transcription
  misc_feature: MA Experiment ID: 20000234 Result: Up-regulated in Transcription
  misc_feature: MA Experiment 20000234 PARAMETER Experiment Name: At_Siliques_P Parameter: Age (day) Value: 21
  misc_feature: MA Experiment 20000234 PARAMETER Experiment Name: At_Siliques_P Parameter: Organism Value: A. thaliana
  misc_feature: MA Experiment 20000234 PARAMETER Experiment Name: At_Siliques_P Parameter: Plant Line Value: WS
  misc_feature: MA Experiment 20000234 PARAMETER Experiment Name: At_Siliques_P Parameter: Tissue Value: Less Than 5mm Siliques vs. Whole Plant
  misc_feature: MA Experiment ID: 20000265 Result: Up-regulated in Transcription
  misc_feature: MA Experiment 20000265 PARAMETER Experiment Name: At_Open_Flower_P Parameter: Age (day) Value: 21
  misc_feature: MA Experiment 20000265 PARAMETER Experiment Name: At_Open_Flower_P Parameter: Plant Line Value: WS
  misc_feature: MA Experiment 20000265 PARAMETER Experiment Name: At_Open_Flower_P Parameter: Tissue Value: Closed Flower vs. Whole Plant
  misc_feature: MA Experiment ID: 20000286 Result: Up-regulated in Transcription
  misc_feature: MA Experiment 20000286 PARAMETER Experiment Name: At_Open_Flower_P Parameter: Age (day) Value: 21
  misc_feature: MA Experiment 20000286 PARAMETER Experiment Name: At_Open_Flower_P Parameter: Plant Line Value: WS
  misc_feature: MA Experiment 20000286 PARAMETER Experiment Name: At_Open_Flower_P Parameter: Tissue Value: Half Open vs. Whole Plant
  misc_feature: MA Experiment ID: 20000437 Result: Down-regulated in Transcription
  misc_feature: MA Experiment 20000437 PARAMETER Experiment Name: At_Drought_P Parameter: Age (day) Value: 8
  misc_feature: MA Experiment 20000437 PARAMETER Experiment Name: At_Drought_P Parameter: Organism Value: A. thaliana
  misc_feature: MA Experiment 20000437 PARAMETER Experiment Name: At_Drought_P Parameter: Plant Line Value: WS
  misc_feature: MA Experiment 20000437 PARAMETER Experiment Name: At_Drought_P Parameter: Timepoint (hr) Value: 24
  misc_feature: MA Experiment 20000437 PARAMETER Experiment Name: At_Drought_P Parameter: Tissue Value: Whole Plant
  misc_feature: MA Experiment 20000437 PARAMETER Experiment Name: At_Drought_P Parameter: Treatment Value: Drought vs. No Drought
  misc_feature: MA Experiment ID: 20000439 Result: Down-regulated in Transcription
  misc_feature: MA Experiment 20000439 PARAMETER Experiment Name: At_Roots__P Parameter: Age (day) Value: 14 vs. 21
  misc_feature: MA Experiment 20000439 PARAMETER Experiment Name: At_Roots__P Parameter: Organism Value: A. thaliana
  misc_feature: MA Experiment 20000439 PARAMETER Experiment Name: At_Roots__P Parameter: Tissue Value: Roots vs. Whole Plant
  misc_feature: MA Experiment ID: 20000495 Result: Up-regulated in Transcription
  misc_feature: MA Experiment 20000495 PARAMETER Experiment Name: At_Guard_Cells_P Parameter: Harvest Date Value: 8/2/2002
  misc_feature: MA Experiment 20000495 PARAMETER Experiment Name: At_Guard_Cells_P Parameter: Organism Value: A. thaliana
  misc_feature: MA Experiment 20000495 PARAMETER Experiment Name: At_Guard_Cells_P Parameter: Tissue Value: Guard Cells vs. Leaves
  misc_feature: MA Experiment ID: 20001248 Result: Down-regulated in Transcription
  misc_feature: MA Experiment 20001248 PARAMETER Experiment Name: At_Far-red-induction_P Parameter: Age (day) Value: 7
  misc_feature: MA Experiment 20001248 PARAMETER Experiment Name: At_Far-red-induction_P Parameter: Light Value: Far-red vs. White
  misc_feature: MA Experiment 20001248 PARAMETER Experiment Name: At_Far-red-induction_P Parameter: Organism Value: A. thaliana
  misc_feature: MA Experiment 20001248 PARAMETER Experiment Name: At_Far-red-induction_P Parameter: Plant Line Value: Columbia
  misc_feature: MA Experiment 20001248 PARAMETER Experiment Name: At_Far-red-induction_P Parameter: Timepoint (hr) Value: 4
  misc_feature: MA Experiment 20001248 PARAMETER Experiment Name: At_Far-red-induction_P Parameter: Tissue Value: Whole Plant
  misc_feature: MA Experiment ID: 20001555 Result: Down-regulated in Transcription
  misc_feature: MA Experiment 20001555 PARAMETER Experiment Name: At_Drought_Soil_Dry_P Parameter: Age (day) Value: 24
  misc_feature: MA Experiment 20001555 PARAMETER Experiment Name: At_Drought_Soil_Dry_P Parameter: Organism Value: A. thaliana
  misc_feature: MA Experiment 20001555 PARAMETER Experiment Name: At_Drought_Soil_Dry_P Parameter: Plant Line Value: WS
  misc_feature: MA Experiment 20001555 PARAMETER Experiment Name: At_Drought_Soil_Dry_P Parameter: Post Timepoint (hr) Value: None
  misc_feature: MA Experiment 20001555 PARAMETER Experiment Name: At_Drought_Soil_Dry_P Parameter: Post-Treatment Value: None
  misc_feature: MA Experiment 20001555 PARAMETER Experiment Name: At_Drought_Soil_Dry_P Parameter: Timepoint (day) Value: 10
  misc_feature: MA Experiment 20001555 PARAMETER Experiment Name: At_Drought_Soil_Dry_P Parameter: Treatment Value: Drought vs. No Drought

SEQ ID NO: 32413 - protein, 350 aa, Arabidopsis thaliana; identical to SEQ ID NO: 26920
  peptide (1)..(350): Ceres Seq. ID no. 12385276
  misc_feature (73)..(338): Pfam Name: alpha/beta hydrolase fold Pfam Description: alpha/beta hydrolase fold
  misc_feature (73)..(338): Pfam Name: alpha/beta hydrolase fold Pfam Description: alpha/beta hydrolase fold
  misc_feature (73)..(338): Pfam Name: alpha/beta hydrolase fold Pfam Description: alpha/beta hydrolase fold
  misc_feature (20)..(350): Homolog of NCBI NO: 15230018 NR Description: putative epoxide hydrolase
  misc_feature (20)..(350): Homolog of NCBI NO: 15230018 NR Description: putative epoxide hydrolase
  misc_feature (20)..(350): Homolog of NCBI NO: 15230018 NR Description: putative epoxide hydrolase

SEQ ID NO: 32414 - protein, 331 aa, Arabidopsis thaliana; identical to SEQ ID NO: 21476
  peptide (1)..(331): Ceres Seq. ID no. 12385277
  misc_feature (54)..(319): Pfam Name: alpha/beta hydrolase fold Pfam Description: alpha/beta hydrolase fold
  misc_feature (54)..(319): Pfam Name: alpha/beta hydrolase fold Pfam Description: alpha/beta hydrolase fold
  misc_feature (54)..(319): Pfam Name: alpha/beta hydrolase fold Pfam Description: alpha/beta hydrolase fold
  misc_feature (1)..(331): Homolog of NCBI NO: 15230018 NR Description: putative epoxide hydrolase
  misc_feature (1)..(331): Homolog of NCBI NO: 15230018 NR Description: putative epoxide hydrolase
  misc_feature (1)..(331): Homolog of NCBI NO: 15230018 NR Description: putative epoxide hydrolase

SEQ ID NO: 32415 - protein, 324 aa, Arabidopsis thaliana; identical to SEQ ID NO: 21477
  peptide (1)..(324): Ceres Seq. ID no. 12385278
  misc_feature (47)..(312): Pfam Name: alpha/beta hydrolase fold Pfam Description: alpha/beta hydrolase fold
  misc_feature (47)..(312): Pfam Name: alpha/beta hydrolase fold Pfam Description: alpha/beta hydrolase fold
  misc_feature (47)..(312): Pfam Name: alpha/beta hydrolase fold Pfam Description: alpha/beta hydrolase fold
  misc_feature (1)..(324): Homolog of NCBI NO: 15230018 NR Description: putative epoxide hydrolase
  misc_feature (1)..(324): Homolog of NCBI NO: 15230018 NR Description: putative epoxide hydrolase
  misc_feature (1)..(324): Homolog of NCBI NO: 15230018 NR Description: putative epoxide hydrolase

SEQ ID NO: 32416 - DNA, 1013 bp, Arabidopsis thaliana; identical to SEQ ID NO: 26249
  misc_feature (1)..(1013): Ceres Seq. ID no. 12580328
  misc_feature: MA Experiment ID: 108434 Result: Up-regulated in Transcription
  misc_feature: MA Experiment 108434 PARAMETER Experiment Name: At_Root_Tips_cDNA_P Parameter: Tissue Value: Root Tips
  misc_feature: MA Experiment ID: 108461 Result: Up-regulated in Transcription
  misc_feature: MA Experiment 108461 PARAMETER Experiment Name: At_Germinating_Seeds_cDNA_P Parameter: Age (day) Value: 1 vs. 0
  misc_feature: MA Experiment 108461 PARAMETER Experiment Name: At_Germinating_Seeds_cDNA_P Parameter: Tissue Value: Germinating Seeds
  misc_feature: MA Experiment ID: 108462 Result: Up-regulated in Transcription
  misc_feature: MA Experiment 108462 PARAMETER Experiment Name: At_Germinating_Seeds_cDNA_P Parameter: Age (day) Value: 2 vs. 0
  misc_feature: MA Experiment 108462 PARAMETER Experiment Name: At_Germinating_Seeds_cDNA_P Parameter: Tissue Value: Germinating Seeds
  misc_feature: MA Experiment ID: 20000113 Result: Down-regulated in Transcription
  misc_feature: MA Experiment 20000113 PARAMETER Experiment Name: At_42deg_Heat_cDNA_P Parameter: Temperature (deg C) Value: 42 vs. 22
  misc_feature: MA Experiment 20000113 PARAMETER Experiment Name: At_42deg_Heat_cDNA_P Parameter: Timepoint (hr) Value: 8
  misc_feature: MA Experiment 20000113 PARAMETER Experiment Name: At_42deg_Heat_cDNA_P Parameter: Tissue Value: Aerial
  misc_feature: MA Experiment ID: 20000179 Result: Up-regulated in Transcription
  misc_feature: MA Experiment 20000179 PARAMETER Experiment Name: At_Germinating_Seeds_P Parameter: Age (hr) Value: 6 vs. 0
  misc_feature: MA Experiment 20000179 PARAMETER Experiment Name: At_Germinating_Seeds_P Parameter: Tissue Value: Germinating Seeds

SEQ ID NO: 32417 - protein, 182 aa, Arabidopsis thaliana; identical to SEQ ID NO: 26250
  peptide (1)..(182): Ceres Seq. ID no. 12580329
  misc_feature (4)..(177): Pfam Name: ADP-ribosylation factor family Pfam Description: ADP-ribosylation factor family
  misc_feature (4)..(177): Pfam Name: ADP-ribosylation factor family Pfam Description: ADP-ribosylation factor family
  misc_feature (4)..(177): Pfam Name: ADP-ribosylation factor family Pfam Description: ADP-ribosylation factor family
  misc_feature (1)..(179): Homolog of NCBI NO: 11131023 NR Description: ADP-ribosylation factor 1
  misc_feature (1)..(179): Homolog of NCBI NO: 39653273 NR Description: ADP-ribosylation factor [Medicago sativa]
  misc_feature (1)..(181): Homolog of NCBI NO: 31240205 NR Description: ENSANGP00000015770 [Anopheles gambiae]
  misc_feature (1)..(179): Homolog of NCBI NO: 29124979 NR Description: ADP-ribosylation factor 1 [Populus tremuloides]
  misc_feature (1)..(179): Homolog of NCBI NO: 4502227 NR Description: ADP-ribosylation factor-like 1 [Homo sapiens]
  misc_feature (1)..(179): Homolog of NCBI NO: 11131023 NR Description: ADP-ribosylation factor 1
  misc_feature (1)..(181): Homolog of NCBI NO: 31240205 NR Description: ENSANGP00000015770 [Anopheles gambiae]
  misc_feature (1)..(179): Homolog of NCBI NO: 4502227 NR Description: ADP-ribosylation factor-like 1 [Homo sapiens]
  misc_feature (1)..(179): Homolog of NCBI NO: 29124979 NR Description: ADP-ribosylation factor 1 [Populus tremuloides]
  misc_feature (1)..(181): Homolog of NCBI NO: 31240205 NR Description: ENSANGP00000015770 [Anopheles gambiae]
  misc_feature (1)..(179): Homolog of NCBI NO: 39653273 NR Description: ADP-ribosylation factor [Medicago sativa]
  misc_feature (1)..(179): Homolog of NCBI NO: 11131023 NR Description: ADP-ribosylation factor 1
  misc_feature (1)..(182): Homolog of NCBI NO: 30682545 NR Description: ADP-ribosylation factor 3 (ARF3) [Arabidopsis
  misc_feature (1)..(182): Homolog of NCBI NO: 3182922 NR Description: ADP-ribosylation factor 1
  misc_feature (1)..(181): Homolog of NCBI NO: 40253742 NR Description: putative ADP-ribosylation factor 3
  misc_feature (1)..(179): Homolog of NCBI NO: 13385340 NR Description: ADP-ribosylation-like 1 [Mus musculus]
  misc_feature (1)..(179): Homolog of NCBI NO: 11693150 NR Description: ADP-ribosylation factor-like 1 [Rattus
  misc_feature (1)..(182): Homolog of NCBI NO: 30682545 NR Description: ADP-ribosylation factor 3 (ARF3) [Arabidopsis
  misc_feature (1)..(182): Homolog of NCBI NO: 3182922 NR Description: ADP-ribosylation factor 1
  misc_feature (1)..(181): Homolog of NCBI NO: 40253742 NR Description: putative ADP-ribosylation factor 3
  misc_feature (1)..(179): Homolog of NCBI NO: 13385340 NR Description: ADP-ribosylation-like 1 [Mus musculus]
  misc_feature (1)..(179): Homolog of NCBI NO: 11693150 NR Description: ADP-ribosylation factor-like 1 [Rattus
  misc_feature (1)..(179): Homolog of NCBI NO: 4502227 NR Description: ADP-ribosylation factor-like 1 [Homo sapiens]
  misc_feature (1)..(179): Homolog of NCBI NO: 29124979 NR Description: ADP-ribosylation factor 1 [Populus tremuloides]
  misc_feature (1)..(179): Homolog of NCBI NO: 39653273 NR Description: ADP-ribosylation factor [Medicago sativa]
  misc_feature (1)..(179): Homolog of NCBI NO: 11693150 NR Description: ADP-ribosylation factor-like 1 [Rattus
  misc_feature (1)..(179): Homolog of NCBI NO: 13385340 NR Description: ADP-ribosylation-like 1 [Mus musculus]
  misc_feature (1)..(181): Homolog of NCBI NO: 40253742 NR Description: putative ADP-ribosylation factor 3
  misc_feature (1)..(182): Homolog of NCBI NO: 3182922 NR Description: ADP-ribosylation factor 1
  misc_feature (1)..(182): Homolog of NCBI NO: 30682545 NR Description: ADP-ribosylation factor 3 (ARF3) [Arabidopsis

SEQ ID NO: 32418 - protein, 175 aa, Arabidopsis thaliana; identical to SEQ ID NO: 26251
  peptide (1)..(175): Ceres Seq. ID no. 12580330
  misc_feature (1)..(170): Pfam Name: ADP-ribosylation factor family Pfam Description: ADP-ribosylation factor family
  misc_feature (1)..(170): Pfam Name: ADP-ribosylation factor family Pfam Description: ADP-ribosylation factor family
  misc_feature (1)..(170): Pfam Name: ADP-ribosylation factor family Pfam Description: ADP-ribosylation factor family
  misc_feature (1)..(172): Homolog of NCBI NO: 11131023 NR Description: ADP-ribosylation factor 1
  misc_feature (1)..(172): Homolog of NCBI NO: 39653273 NR Description: ADP-ribosylation factor [Medicago sativa]
  misc_feature (1)..(174): Homolog of NCBI NO: 31240205 NR Description: ENSANGP00000015770 [Anopheles gambiae]
  misc_feature (1)..(172): Homolog of NCBI NO: 29124979 NR Description: ADP-ribosylation factor 1 [Populus tremuloides]
  misc_feature (1)..(172): Homolog of NCBI NO: 4502227 NR Description: ADP-ribosylation factor-like 1 [Homo sapiens]
  misc_feature (1)..(172): Homolog of NCBI NO: 11131023 NR Description: ADP-ribosylation factor 1
  misc_feature (1)..(174): Homolog of NCBI NO: 31240205 NR Description: ENSANGP00000015770 [Anopheles gambiae]
  misc_feature (1)..(172): Homolog of NCBI NO: 4502227 NR Description: ADP-ribosylation factor-like 1 [Homo sapiens]
  misc_feature (1)..(172): Homolog of NCBI NO: 29124979 NR Description: ADP-ribosylation factor 1 [Populus tremuloides]
  misc_feature (1)..(174): Homolog of NCBI NO: 31240205 NR Description: ENSANGP00000015770 [Anopheles gambiae]
  misc_feature (1)..(172): Homolog of NCBI NO: 39653273 NR Description: ADP-ribosylation factor [Medicago sativa]
  misc_feature (1)..(172): Homolog of NCBI NO: 11131023 NR Description: ADP-ribosylation factor 1
  misc_feature (1)..(175): Homolog of NCBI NO: 30682545 NR Description: ADP-ribosylation factor 3 (ARF3) [Arabidopsis
  misc_feature (1)..(175): Homolog of NCBI NO: 3182922 NR Description: ADP-ribosylation factor 1
  misc_feature (1)..(174): Homolog of NCBI NO: 40253742 NR Description: putative ADP-ribosylation factor 3
  misc_feature (1)..(172): Homolog of NCBI NO: 13385340 NR Description: ADP-ribosylation-like 1 [Mus musculus]
  misc_feature (1)..(172): Homolog of NCBI NO: 11693150 NR Description: ADP-ribosylation factor-like 1 [Rattus
  misc_feature (1)..(175): Homolog of NCBI NO: 30682545 NR Description: ADP-ribosylation factor 3 (ARF3) [Arabidopsis
  misc_feature (1)..(175): Homolog of NCBI NO: 3182922 NR Description: ADP-ribosylation factor 1
  misc_feature (1)..(174): Homolog of NCBI NO: 40253742 NR Description: putative ADP-ribosylation factor 3
  misc_feature (1)..(172): Homolog of NCBI NO: 13385340 NR Description: ADP-ribosylation-like 1 [Mus musculus]
  misc_feature (1)..(172): Homolog of NCBI NO: 11693150 NR Description: ADP-ribosylation factor-like 1 [Rattus
  misc_feature (1)..(172): Homolog of NCBI NO: 4502227 NR Description: ADP-ribosylation factor-like 1 [Homo sapiens]
  misc_feature (1)..(172): Homolog of NCBI NO: 29124979 NR Description: ADP-ribosylation factor 1 [Populus tremuloides]
  misc_feature (1)..(172): Homolog of NCBI NO: 39653273 NR Description: ADP-ribosylation factor [Medicago sativa]
  misc_feature (1)..(172): Homolog of NCBI NO: 11693150 NR Description: ADP-ribosylation factor-like 1 [Rattus
  misc_feature (1)..(172): Homolog of NCBI NO: 13385340 NR Description: ADP-ribosylation-like 1 [Mus musculus]
  misc_feature (1)..(174): Homolog of NCBI NO: 40253742 NR Description: putative ADP-ribosylation factor 3
  misc_feature (1)..(175): Homolog of NCBI NO: 3182922 NR Description: ADP-ribosylation factor 1
  misc_feature (1)..(175): Homolog of NCBI NO: 30682545 NR Description: ADP-ribosylation factor 3 (ARF3) [Arabidopsis

SEQ ID NO: 32419 - protein, 144 aa, Arabidopsis thaliana; identical to SEQ ID NO: 26252
  peptide (1)..(144): Ceres Seq. ID no. 12580331
  misc_feature (1)..(139): Pfam Name: ADP-ribosylation factor family Pfam Description: ADP-ribosylation factor family
  misc_feature (1)..(139): Pfam Name: ADP-ribosylation factor family Pfam Description: ADP-ribosylation factor family
  misc_feature (1)..(139): Pfam Name: ADP-ribosylation factor family Pfam Description: ADP-ribosylation factor family
  misc_feature (1)..(141): Homolog of NCBI NO: 11131023 NR Description: ADP-ribosylation factor 1
  misc_feature (1)..(141): Homolog of NCBI NO: 39653273 NR Description: ADP-ribosylation factor [Medicago sativa]
  misc_feature (1)..(143): Homolog of NCBI NO: 31240205 NR Description: ENSANGP00000015770 [Anopheles gambiae]
  misc_feature (1)..(141): Homolog of NCBI NO: 29124979 NR Description: ADP-ribosylation factor 1 [Populus tremuloides]
  misc_feature (1)..(141): Homolog of NCBI NO: 4502227 NR Description: ADP-ribosylation factor-like 1 [Homo sapiens]
  misc_feature (1)..(141): Homolog of NCBI NO: 11131023 NR Description: ADP-ribosylation factor 1
  misc_feature (1)..(143): Homolog of NCBI NO: 31240205 NR Description: ENSANGP00000015770 [Anopheles gambiae]
  misc_feature (1)..(141): Homolog of NCBI NO: 4502227 NR Description: ADP-ribosylation factor-like 1 [Homo sapiens]
  misc_feature (1)..(141): Homolog of NCBI NO: 29124979 NR Description: ADP-ribosylation factor 1 [Populus tremuloides]
  misc_feature (1)..(143): Homolog of NCBI NO: 31240205 NR Description: ENSANGP00000015770 [Anopheles gambiae]
  misc_feature (1)..(141): Homolog of NCBI NO: 39653273 NR Description: ADP-ribosylation factor [Medicago sativa]
  misc_feature (1)..(141): Homolog of NCBI NO: 11131023 NR Description: ADP-ribosylation factor 1
  misc_feature (1)..(144): Homolog of NCBI NO: 30682545 NR Description: ADP-ribosylation factor 3 (ARF3) [Arabidopsis
  misc_feature (1)..(144): Homolog of NCBI NO: 3182922 NR Description: ADP-ribosylation factor 1
  misc_feature (1)..(143): Homolog of NCBI NO: 40253742 NR Description: putative ADP-ribosylation factor 3
  misc_feature (1)..(141): Homolog of NCBI NO: 13385340 NR Description: ADP-ribosylation-like 1 [Mus musculus]
  misc_feature (1)..(141): Homolog of NCBI NO: 11693150 NR Description: ADP-ribosylation factor-like 1 [Rattus
  misc_feature (1)..(144): Homolog of NCBI NO: 30682545 NR Description: ADP-ribosylation factor 3 (ARF3) [Arabidopsis
  misc_feature (1)..(144): Homolog of NCBI NO: 3182922 NR Description: ADP-ribosylation factor 1
  misc_feature (1)..(143): Homolog of NCBI NO: 40253742 NR Description: putative ADP-ribosylation factor 3
  misc_feature (1)..(141): Homolog of NCBI NO: 13385340 NR Description: ADP-ribosylation-like 1 [Mus musculus]
  misc_feature (1)..(141): Homolog of NCBI NO: 11693150 NR Description: ADP-ribosylation factor-like 1 [Rattus
  misc_feature (1)..(141): Homolog of NCBI NO: 4502227 NR Description: ADP-ribosylation factor-like 1 [Homo sapiens]
  misc_feature (1)..(141): Homolog of NCBI NO: 29124979 NR Description: ADP-ribosylation factor 1 [Populus tremuloides]
  misc_feature (1)..(141): Homolog of NCBI NO: 39653273 NR Description: ADP-ribosylation factor [Medicago sativa]
  misc_feature (1)..(141): Homolog of NCBI NO: 11693150 NR Description: ADP-ribosylation factor-like 1 [Rattus
  misc_feature (1)..(141): Homolog of NCBI NO: 13385340 NR Description: ADP-ribosylation-like 1 [Mus musculus]
  misc_feature (1)..(143): Homolog of NCBI NO: 40253742 NR Description: putative ADP-ribosylation factor 3
  misc_feature (1)..(144): Homolog of NCBI NO: 3182922 NR Description: ADP-ribosylation factor 1
  misc_feature (1)..(144): Homolog of NCBI NO: 30682545 NR Description: ADP-ribosylation factor 3 (ARF3) [Arabidopsis

SEQ ID NO: 32420 - DNA, 1148 bp, Arabidopsis thaliana; identical to SEQ ID NO: 28830
  misc_feature (1)..(1148): Ceres Seq. ID no. 12334441
  misc_feature: MA Experiment ID: 108434 Result: Down-regulated in Transcription
  misc_feature: MA Experiment 108434 PARAMETER Experiment Name: At_Root_Tips_cDNA_P Parameter: Tissue Value: Root Tips
  misc_feature: MA Experiment ID: 108463 Result: Up-regulated in Transcription
  misc_feature: MA Experiment 108463 PARAMETER Experiment Name: At_Germinating_Seeds_cDNA_P Parameter: Age (day) Value: 3 vs. 0
  misc_feature: MA Experiment 108463 PARAMETER Experiment Name: At_Germinating_Seeds_cDNA_P Parameter: Tissue Value: Germinating Seeds
  misc_feature: MA Experiment ID: 108585 Result: Up-regulated in Transcription
  misc_feature: MA Experiment 108585 PARAMETER Experiment Name: At_5mM_NaNP_cDNA_P Parameter: Timepoint (hr) Value: 6
  misc_feature: MA Experiment 108585 PARAMETER Experiment Name: At_5mM_NaNP_cDNA_P Parameter: Tissue Value: Aerial
  misc_feature: MA Experiment 108585 PARAMETER Experiment Name: At_5mM_NaNP_cDNA_P Parameter: Treatment Value: null
  misc_feature: MA Experiment ID: 108594 Result: Down-regulated in Transcription
  misc_feature: MA Experiment 108594 PARAMETER Experiment Name: At_Ler-rhl_Root_cDNA_P Parameter: Plant Line Value: null
  misc_feature: MA Experiment ID: 20000069 Result: Up-regulated in Transcription
  misc_feature: MA Experiment 20000069 PARAMETER Experiment Name: At_100uM_ABA_Mutants_cDNA_P Parameter: Plant Line Value: CS23
  misc_feature: MA Experiment 20000069 PARAMETER Experiment Name: At_100uM_ABA_Mutants_cDNA_P Parameter: Timepoint (hr) Value: 6
  misc_feature: MA Experiment 20000069 PARAMETER Experiment Name: At_100uM_ABA_Mutants_cDNA_P Parameter: Tissue Value: Aerial
  misc_feature: MA Experiment 20000069 PARAMETER Experiment Name: At_100uM_ABA_Mutants_cDNA_P Parameter: Treatment Value: 100uM ABA vs. No Treatment
  misc_feature: MA Experiment ID: 20000180 Result: Down-regulated in Transcription
  misc_feature: MA Experiment 20000180 PARAMETER Experiment Name: At_Germinating_Seeds_P Parameter: Age (hr) Value: 24 vs. 0
  misc_feature: MA Experiment 20000180 PARAMETER Experiment Name: At_Germinating_Seeds_P Parameter: Tissue Value: Germinating Seeds
  misc_feature: MA Experiment ID: 20000184 Result: Down-regulated in Transcription
  misc_feature: MA Experiment 20000184 PARAMETER Experiment Name: At_Shoots__P Parameter: Age (day) Value: 7
  misc_feature: MA Experiment 20000184 PARAMETER Experiment Name: At_Shoots__P Parameter: Tissue Value: Shoots vs. Whole Plant
  misc_feature: MA Experiment ID: 20000234 Result: Down-regulated in Transcription
  misc_feature: MA Experiment 20000234 PARAMETER Experiment Name: At_Siliques_P Parameter: Age (day) Value: 21
  misc_feature: MA Experiment 20000234 PARAMETER Experiment Name: At_Siliques_P Parameter: Organism Value: A. thaliana
  misc_feature: MA Experiment 20000234 PARAMETER Experiment Name: At_Siliques_P Parameter: Plant Line Value: WS
  misc_feature: MA Experiment 20000234 PARAMETER Experiment Name: At_Siliques_P Parameter: Tissue Value: Less Than 5mm Siliques vs. Whole Plant
  misc_feature: MA Experiment ID: 20000264 Result: Down-regulated in Transcription
  misc_feature: MA Experiment 20000264 PARAMETER Experiment Name: At_Open_Flower_P Parameter: Age (day) Value: 21
  misc_feature: MA Experiment 20000264 PARAMETER Experiment Name: At_Open_Flower_P Parameter: Plant Line Value: WS
  misc_feature: MA Experiment 20000264 PARAMETER Experiment Name: At_Open_Flower_P Parameter: Tissue Value: Open Flower vs. Whole Plant
  misc_feature: MA Experiment ID: 20000265 Result: Down-regulated in Transcription
  misc_feature: MA Experiment 20000265 PARAMETER Experiment Name: At_Open_Flower_P Parameter: Age (day) Value: 21
  misc_feature: MA Experiment 20000265 PARAMETER Experiment Name: At_Open_Flower_P Parameter: Plant Line Value: WS
  misc_feature: MA Experiment 20000265 PARAMETER Experiment Name: At_Open_Flower_P Parameter: Tissue Value: Closed Flower vs. Whole Plant
  misc_feature: MA Experiment ID: 20001248 Result: Up-regulated in Transcription
  misc_feature: MA Experiment 20001248 PARAMETER Experiment Name: At_Far-red-induction_P Parameter: Age (day) Value: 7
  misc_feature: MA Experiment 20001248 PARAMETER Experiment Name: At_Far-red-induction_P Parameter: Light Value: Far-red vs. White
  misc_feature: MA Experiment 20001248 PARAMETER Experiment Name: At_Far-red-induction_P Parameter: Organism Value: A. thaliana
  misc_feature: MA Experiment 20001248 PARAMETER Experiment Name: At_Far-red-induction_P Parameter: Plant Line Value: Columbia
  misc_feature: MA Experiment 20001248 PARAMETER Experiment Name: At_Far-red-induction_P Parameter: Timepoint (hr) Value: 4
  misc_feature: MA Experiment 20001248 PARAMETER Experiment Name: At_Far-red-induction_P Parameter: Tissue Value: Whole Plant
  misc_feature: MA Experiment ID: 20001904 Result: Down-regulated in Transcription
  misc_feature: MA Experiment 20001904 PARAMETER Experiment Name: At_Drought_Reproduction_P Parameter: Age (day) Value: 37
  misc_feature: MA Experiment 20001904 PARAMETER Experiment Name: At_Drought_Reproduction_P Parameter: Organism Value: A. thaliana
  misc_feature: MA Experiment 20001904 PARAMETER Experiment Name: At_Drought_Reproduction_P Parameter: Plant Line Value: WS
  misc_feature: MA Experiment 20001904 PARAMETER Experiment Name: At_Drought_Reproduction_P Parameter: Timepoint (day) Value: 7
  misc_feature: MA Experiment 20001904 PARAMETER Experiment Name: At_Drought_Reproduction_P Parameter: Tissue Value: Rosettes
  misc_feature: MA Experiment 20001904 PARAMETER Experiment Name: At_Drought_Reproduction_P Parameter: Treatment Value: Drought vs. No Drought
  misc_feature: MA Experiment ID: 20001905 Result: Down-regulated in Transcription
  misc_feature: MA Experiment 20001905 PARAMETER Experiment Name: At_Drought_Reproduction_P Parameter: Age (day) Value: 40
  misc_feature: MA Experiment 20001905 PARAMETER Experiment Name: At_Drought_Reproduction_P Parameter: Organism Value: A. thaliana
  misc_feature: MA Experiment 20001905 PARAMETER Experiment Name: At_Drought_Reproduction_P Parameter: Plant Line Value: WS
  misc_feature: MA Experiment 20001905 PARAMETER Experiment Name: At_Drought_Reproduction_P Parameter: Timepoint (day) Value: 10
  misc_feature: MA Experiment 20001905 PARAMETER Experiment Name: At_Drought_Reproduction_P Parameter: Tissue Value: Rosettes
  misc_feature: MA Experiment 20001905 PARAMETER Experiment Name: At_Drought_Reproduction_P Parameter: Treatment Value: Drought vs. No Drought

SEQ ID NO: 32421 - protein, 227 aa, Arabidopsis thaliana; identical to SEQ ID NO: 28831
  peptide (1)..(227): Ceres Seq. ID no. 12334442
  misc_feature (31)..(165): Pfam Name: Protein of unknown function, DUF597 Pfam Description: Protein of unknown function, DUF597
  misc_feature (27)..(167): Homolog of NCBI NO: 21537073 NR Description: unknown [Arabidopsis thaliana]
  misc_feature (27)..(167): Homolog of NCBI NO: 25337907 NR Description: hypothetical protein F9H16.1 - Arabidopsis
  misc_feature (27)..(167): Homolog of NCBI NO: 18394936 NR Description: expressed protein
  misc_feature (1)..(227): Homolog of NCBI NO: 37537092 NR Description: unknown protein [Oryza sativa (japonica
  misc_feature (17)..(227): Homolog of NCBI NO: 38346725 NR Description: OSJNBa0086O06.23 [Oryza sativa (japonica
  misc_feature (1)..(225): Homolog of NCBI NO: 15237491 NR Description: putative protein
  misc_feature (25)..(227): Homolog of NCBI NO: 21554139 NR Description: unknown [Arabidopsis thaliana]
  misc_feature (25)..(227): Homolog of NCBI NO: 18398555 NR Description: expressed protein
  misc_feature (1)..(227): Homolog of NCBI NO: 6714272 NR Description: F6N18.8 [Arabidopsis thaliana]
  misc_feature (1)..(165): Homolog of NCBI NO: 15236696 NR Description: putative protein; protein id: At4g17900.1

SEQ ID NO: 32422 - protein, 207 aa, Arabidopsis thaliana; identical to SEQ ID NO: 28832
  peptide (1)..(207): Ceres Seq. ID no. 12334443
  misc_feature (11)..(145): Pfam Name: Protein of unknown function, DUF597 Pfam Description: Protein of unknown function, DUF597
  misc_feature (7)..(147): Homolog of NCBI NO: 21537073 NR Description: unknown [Arabidopsis thaliana]
  misc_feature (7)..(147): Homolog of NCBI NO: 25337907 NR Description: hypothetical protein F9H16.1 - Arabidopsis
  misc_feature (7)..(147): Homolog of NCBI NO: 18394936 NR Description: expressed protein
  misc_feature (1)..(207): Homolog of NCBI NO: 37537092 NR Description: unknown protein [Oryza sativa (japonica
  misc_feature (1)..(207): Homolog of NCBI NO: 38346725 NR Description: OSJNBa0086O06.23 [Oryza sativa (japonica
  misc_feature (1)..(205): Homolog of NCBI NO: 15237491 NR Description: putative protein
  misc_feature (5)..(207): Homolog of NCBI NO: 21554139 NR Description: unknown [Arabidopsis thaliana]
  misc_feature (5)..(207): Homolog of NCBI NO: 18398555 NR Description: expressed protein
  misc_feature (1)..(207): Homolog of NCBI NO: 6714272 NR Description: F6N18.8 [Arabidopsis thaliana]
  misc_feature (1)..(145): Homolog of NCBI NO: 15236696 NR Description: putative protein; protein id: At4g17900.1

SEQ ID NO: 32423 - protein, 166 aa, Arabidopsis thaliana; identical to SEQ ID NO: 28833
  peptide (1)..(166): Ceres Seq. ID no. 12334444
  misc_feature (1)..(104): Pfam Name: Protein of unknown function, DUF597 Pfam Description: Protein of unknown function, DUF597
  misc_feature (1)..(106): Homolog of NCBI NO: 21537073 NR Description: unknown [Arabidopsis thaliana]
  misc_feature (1)..(106): Homolog of NCBI NO: 25337907 NR Description: hypothetical protein F9H16.1 - Arabidopsis
  misc_feature (1)..(106): Homolog of NCBI NO: 18394936 NR Description: expressed protein
  misc_feature (1)..(166): Homolog of NCBI NO: 37537092 NR Description: unknown protein [Oryza sativa (japonica
  misc_feature (1)..(166): Homolog of NCBI NO: 38346725 NR Description: OSJNBa0086O06.23 [Oryza sativa (japonica
  misc_feature (1)..(164): Homolog of NCBI NO: 15237491 NR Description: putative protein
  misc_feature (1)..(166): Homolog of NCBI NO: 21554139 NR Description: unknown [Arabidopsis thaliana]
  misc_feature (1)..(166): Homolog of NCBI NO: 18398555 NR Description: expressed protein
  misc_feature (1)..(166): Homolog of NCBI NO: 6714272 NR Description: F6N18.8 [Arabidopsis thaliana]
  misc_feature (1)..(104): Homolog of NCBI NO: 15236696 NR Description: putative protein; protein id: At4g17900.1

SEQ ID NO: 32424 - DNA, 1854 bp, Arabidopsis thaliana; identical to SEQ ID NO: 28834
  misc_feature (1)..(1854): Ceres Seq. ID no. 13499750
  misc_feature: MA Experiment ID: 20000184 Result: Down-regulated in Transcription
  misc_feature: MA Experiment 20000184 PARAMETER Experiment Name: At_Shoots__P Parameter: Age (day) Value: 7
  misc_feature: MA Experiment 20000184 PARAMETER Experiment Name: At_Shoots__P Parameter: Tissue Value: Shoots vs. Whole Plant
  misc_feature: MA Experiment ID: 20001451 Result: Up-regulated in Transcription
  misc_feature: MA Experiment 20001451 PARAMETER Experiment Name: At_Far-red-induction_P Parameter: Age (day) Value: 7
  misc_feature: MA Experiment 20001451 PARAMETER Experiment Name: At_Far-red-induction_P Parameter: Light Value: Far-red vs. White
  misc_feature: MA Experiment 20001451 PARAMETER Experiment Name: At_Far-red-induction_P Parameter: Organism Value: A. thaliana
  misc_feature: MA Experiment 20001451 PARAMETER Experiment Name: At_Far-red-induction_P Parameter: Plant Line Value: Columbia
  misc_feature: MA Experiment 20001451 PARAMETER Experiment Name: At_Far-red-induction_P Parameter: Timepoint (hr) Value: 24
  misc_feature: MA Experiment 20001451 PARAMETER Experiment Name: At_Far-red-induction_P Parameter: Tissue Value: Whole Plant

SEQ ID NO: 32425 - protein, 531 aa, Arabidopsis thaliana; identical to SEQ ID NO: 28835
  peptide (1)..(531): Ceres Seq. ID no. 13499751
  misc_feature (311)..(392): Pfam Name: UBX domain Pfam Description: UBX domain
  misc_feature (7)..(203): Homolog of NCBI NO: 12847220 NR Description: unnamed protein product [Mus musculus]
  misc_feature (7)..(203): Homolog of NCBI NO: 12859540 NR Description: unnamed protein product [Mus musculus]
  misc_feature (7)..(518): Homolog of NCBI NO: 23956178 NR Description: RIKEN cDNA 1300013G12 [Mus musculus]
  misc_feature (7)..(518): Homolog of NCBI NO: 26344511 NR Description: unnamed protein product [Mus musculus]
  misc_feature (7)..(518): Homolog of NCBI NO: 1663704 NR Description: KIAA0242 protein [Homo sapiens]
  misc_feature (7)..(518): Homolog of NCBI NO: 24307965 NR Description: UBX domain containing 2
  misc_feature (9)..(518): Homolog of NCBI NO: 40555755 NR Description: Unknown (protein for MGC:73362) [Danio rerio]
  misc_feature (1)..(452): Homolog of NCBI NO: 25408846 NR Description: hypothetical protein At2g43210 [imported] -
  misc_feature (1)..(531): Homolog of NCBI NO: 20147205 NR Description: MFL8.1/MFL8.1 [Arabidopsis thaliana]
  misc_feature (1)..(531): Homolog of NCBI NO: 30689298 NR Description: expressed protein [Arabidopsis thaliana]

SEQ ID NO: 32426 - DNA, 1377 bp, Arabidopsis thaliana; identical to SEQ ID NO: 28836
  misc_feature (1)..(1377): Ceres Seq. ID no. 13487616
  misc_feature: MA Experiment ID: 108434 Result: Down-regulated in Transcription
  misc_feature: MA Experiment 108434 PARAMETER Experiment Name: At_Root_Tips_cDNA_P Parameter: Tissue Value: Root Tips
  misc_feature: MA Experiment ID: 108462 Result: Up-regulated in Transcription
  misc_feature: MA Experiment 108462 PARAMETER Experiment Name: At_Germinating_Seeds_cDNA_P Parameter: Age (day) Value: 2 vs. 0
  misc_feature: MA Experiment 108462 PARAMETER Experiment Name: At_Germinating_Seeds_cDNA_P Parameter: Tissue Value: Germinating Seeds
  misc_feature: MA Experiment ID: 108463 Result: Up-regulated in Transcription
  misc_feature: MA Experiment 108463 PARAMETER Experiment Name: At_Germinating_Seeds_cDNA_P Parameter: Age (day) Value: 3 vs. 0
  misc_feature: MA Experiment 108463 PARAMETER Experiment Name: At_Germinating_Seeds_cDNA_P Parameter: Tissue Value: Germinating Seeds
  misc_feature: MA Experiment ID: 108488 Result: Down-regulated in Transcription
  misc_feature: MA Experiment ID: 108594 Result: Down-regulated in Transcription
  misc_feature: MA Experiment 108594 PARAMETER Experiment Name: At_Ler-rhl_Root_cDNA_P Parameter: Plant Line Value: null
  misc_feature: MA Experiment ID: 108595 Result: Down-regulated in Transcription
  misc_feature: MA Experiment 108595 PARAMETER Experiment Name: At_Ler-pi_Ovule_cDNA_P Parameter: Plant Line Value: null
  misc_feature: MA Experiment ID: 20000071 Result: Up-regulated in Transcription
  misc_feature: MA Experiment 20000071 PARAMETER Experiment Name: At_100uM_ABA_Mutants_cDNA_P Parameter: Plant Line Value: CS8104
  misc_feature: MA Experiment 20000071 PARAMETER Experiment Name: At_100uM_ABA_Mutants_cDNA_P Parameter: Timepoint (hr) Value: 6
  misc_feature: MA Experiment 20000071 PARAMETER Experiment Name: At_100uM_ABA_Mutants_cDNA_P Parameter: Tissue Value: Aerial
  misc_feature: MA Experiment 20000071 PARAMETER Experiment Name: At_100uM_ABA_Mutants_cDNA_P Parameter: Treatment Value: 100uM ABA vs. No Treatment
  misc_feature: MA Experiment ID: 20000306 Result: Up-regulated in Transcription
  misc_feature: MA Experiment 20000306 PARAMETER Experiment Name: At_Germinating_Seeds_Sub_P Parameter: Age (hr) Value: 6 vs. 0
  misc_feature: MA Experiment 20000306 PARAMETER Experiment Name: At_Germinating_Seeds_Sub_P Parameter: Organism Value: A. thaliana
  misc_feature: MA Experiment 20000306 PARAMETER Experiment Name: At_Germinating_Seeds_Sub_P Parameter: Plant Line Value: WS
  misc_feature: MA Experiment 20000306 PARAMETER Experiment Name: At_Germinating_Seeds_Sub_P Parameter: Tissue Value: Germinating Seeds
  misc_feature: MA Experiment ID: 20000307 Result: Up-regulated in Transcription
  misc_feature: MA Experiment 20000307 PARAMETER Experiment Name: At_Germinating_Seeds_Sub_P Parameter: Age (hr) Value: 24 vs. 0
  misc_feature: MA Experiment 20000307 PARAMETER Experiment Name: At_Germinating_Seeds_Sub_P Parameter: Organism Value: A. thaliana
  misc_feature: MA Experiment 20000307 PARAMETER Experiment Name: At_Germinating_Seeds_Sub_P Parameter: Plant Line Value: WS
  misc_feature: MA Experiment 20000307 PARAMETER Experiment Name: At_Germinating_Seeds_Sub_P Parameter: Tissue Value: Germinating Seeds
  misc_feature: MA Experiment ID: 20000328 Result: Down-regulated in Transcription
  misc_feature: MA Experiment 20000328 PARAMETER Experiment Name: At_42deg_Heat_Sub_P Parameter: Age (day) Value: 14
  misc_feature: MA Experiment 20000328 PARAMETER Experiment Name: At_42deg_Heat_Sub_P Parameter: Organism Value: A. thaliana
  misc_feature: MA Experiment 20000328 PARAMETER Experiment Name: At_42deg_Heat_Sub_P Parameter: Plant Line Value: WS
  misc_feature: MA Experiment 20000328 PARAMETER Experiment Name: At_42deg_Heat_Sub_P Parameter: Temperature (deg C) Value: 42 vs. 22
  misc_feature: MA Experiment 20000328 PARAMETER Experiment Name: At_42deg_Heat_Sub_P Parameter: Timepoint (hr) Value: 6
  misc_feature: MA Experiment 20000328 PARAMETER Experiment Name: At_42deg_Heat_Sub_P Parameter: Tissue Value: Aerial
  misc_feature: MA Experiment ID: 20000329 Result: Down-regulated in Transcription
  misc_feature: MA Experiment 20000329 PARAMETER Experiment Name: At_4deg_Cold_Sub_P Parameter: Age (day) Value: 14
  misc_feature: MA Experiment 20000329 PARAMETER Experiment Name: At_4deg_Cold_Sub_P Parameter: Organism Value: A. thaliana
  misc_feature: MA Experiment 20000329 PARAMETER Experiment Name: At_4deg_Cold_Sub_P Parameter: Plant Line Value: WS
  misc_feature: MA Experiment 20000329 PARAMETER Experiment Name: At_4deg_Cold_Sub_P Parameter: Temperature (deg C) Value: 4 vs. 22
  misc_feature: MA Experiment 20000329 PARAMETER Experiment Name: At_4deg_Cold_Sub_P Parameter: Timepoint (hr) Value: 6
  misc_feature: MA Experiment 20000329 PARAMETER Experiment Name: At_4deg_Cold_Sub_P Parameter: Tissue Value: Aerial
  misc_feature: MA Experiment ID: 20000355 Result: Down-regulated in Transcription
  misc_feature: MA Experiment 20000355 PARAMETER Experiment Name: At_Siliques_Sub_P Parameter: Age (day) Value: 21
  misc_feature: MA Experiment 20000355 PARAMETER Experiment Name: At_Siliques_Sub_P Parameter: Organism Value: A. thaliana
  misc_feature: MA Experiment 20000355 PARAMETER Experiment Name: At_Siliques_Sub_P Parameter: Plant Line Value: WS
  misc_feature: MA Experiment 20000355 PARAMETER Experiment Name: At_Siliques_Sub_P Parameter: Tissue Value: Less Than 5mm Siliques vs. Whole Plant
  misc_feature: MA Experiment ID: 20000440 Result: Down-regulated in Transcription
  misc_feature: MA Experiment 20000440 PARAMETER Experiment Name: At_Closed-Flower__Sub_P Parameter: Tissue Value: Closed Flower vs. Whole Plant

SEQ ID NO: 32427 - protein, 303 aa, Arabidopsis thaliana; identical to SEQ ID NO: 28837
  peptide (1)..(303): Ceres Seq. ID no. 13487617
  misc_feature (138)..(216): Pfam Name: BAG domain Pfam Description: BAG domain
  misc_feature (78)..(255): Homolog of NCBI NO: 10334497 NR Description: hypothetical protein [Cicer arietinum]
  misc_feature (7)..(302): Homolog of NCBI NO: 34898024 NR Description: ESTs AU082174(S13676),AU032395(R3986) correspond a region of the predicted gene.~Similar to Arabidopsis thaliana
  misc_feature (7)..(302): Homolog of NCBI NO: 25553557 NR Description: OSJNBa0038F22.4 [Oryza sativa (japonica
  misc_feature (68)..(303): Homolog of NCBI NO: 10176928 NR Description: contains similarity to unknown
  misc_feature (14)..(279): Homolog of NCBI NO: 15242267 NR Description: BAG domain containing protein [Arabidopsis
  misc_feature (13)..(303): Homolog of NCBI NO: 21553443 NR Description: unknown [Arabidopsis thaliana]
  misc_feature (1)..(303): Homolog of NCBI NO: 30697627 NR Description: BAG domain containing protein [Arabidopsis
  misc_feature (1)..(303): Homolog of NCBI NO: 30697630 NR Description: BAG domain containing protein [Arabidopsis
  misc_feature (4)..(303): Homolog of NCBI NO: 21537107 NR Description: unknown [Arabidopsis thaliana]
  misc_feature (1)..(303): Homolog of NCBI NO: 15240726 NR Description: BAG domain containing protein [Arabidopsis

SEQ ID NO: 32428 - protein, 302 aa, Arabidopsis thaliana; identical to SEQ ID NO: 28838
  peptide (1)..(302): Ceres Seq. ID no. 13487618
  misc_feature (137)..(215): Pfam Name: BAG domain Pfam Description: BAG domain
  misc_feature (77)..(254): Homolog of NCBI NO: 10334497 NR Description: hypothetical protein [Cicer arietinum]
  misc_feature (6)..(301): Homolog of NCBI NO: 34898024 NR Description: ESTs AU082174(S13676),AU032395(R3986) correspond a region of the predicted gene.~Similar to Arabidopsis thaliana
  misc_feature (6)..(301): Homolog of NCBI NO: 25553557 NR Description: OSJNBa0038F22.4 [Oryza sativa (japonica
  misc_feature (67)..(302): Homolog of NCBI NO: 10176928 NR Description: contains similarity to unknown
  misc_feature (13)..(278): Homolog of NCBI NO: 15242267 NR Description: BAG domain containing protein [Arabidopsis
  misc_feature (12)..(302): Homolog of NCBI NO: 21553443 NR Description: unknown [Arabidopsis thaliana]
  misc_feature (1)..(302): Homolog of NCBI NO: 30697627 NR Description: BAG domain containing protein [Arabidopsis
  misc_feature (1)..(302): Homolog of NCBI NO: 30697630 NR Description: BAG domain containing protein [Arabidopsis
  misc_feature (3)..(302): Homolog of NCBI NO: 21537107 NR Description: unknown [Arabidopsis thaliana]
  misc_feature (1)..(302): Homolog of NCBI NO: 15240726 NR Description: BAG domain containing protein [Arabidopsis

SEQ ID NO: 32429 - protein, 300 aa, Arabidopsis thaliana; identical to SEQ ID NO: 28839
  peptide (1)..(300): Ceres Seq. ID no. 13487619
  misc_feature (135)..(213): Pfam Name: BAG domain Pfam Description: BAG domain
  misc_feature (75)..(252): Homolog of NCBI NO: 10334497 NR Description: hypothetical protein [Cicer arietinum]
  misc_feature (4)..(299): Homolog of NCBI NO: 34898024 NR Description: ESTs AU082174(S13676),AU032395(R3986) correspond a region of the predicted gene.~Similar to Arabidopsis thaliana
  misc_feature (4)..(299): Homolog of NCBI NO: 25553557 NR Description: OSJNBa0038F22.4 [Oryza sativa (japonica
  misc_feature (65)..(300): Homolog of NCBI NO: 10176928 NR Description: contains similarity to unknown
  misc_feature (11)..(276): Homolog of NCBI NO: 15242267 NR Description: BAG domain containing protein [Arabidopsis
  misc_feature (10)..(300): Homolog of NCBI NO: 21553443 NR Description: unknown [Arabidopsis thaliana]
  misc_feature (1)..(300): Homolog of NCBI NO: 30697627 NR Description: BAG domain containing protein [Arabidopsis
  misc_feature (1)..(300): Homolog of NCBI NO: 30697630 NR Description: BAG domain containing protein [Arabidopsis
  misc_feature (1)..(300): Homolog of NCBI NO: 21537107 NR Description: unknown [Arabidopsis thaliana]
  misc_feature (1)..(300): Homolog of NCBI NO: 15240726 NR Description: BAG domain containing protein [Arabidopsis

SEQ ID NO: 32430 - DNA, 1159 bp, Arabidopsis thaliana; identical to SEQ ID NO: 28840
  misc_feature (1)..(1159): Ceres Seq. ID no. 12335058
  misc_feature: MA Experiment ID: 108461 Result: Up-regulated in Transcription
  misc_feature: MA Experiment 108461 PARAMETER Experiment Name: At_Germinating_Seeds_cDNA_P Parameter: Age (day) Value: 1 vs. 0
  misc_feature: MA Experiment 108461 PARAMETER Experiment Name: At_Germinating_Seeds_cDNA_P Parameter: Tissue Value: Germinating Seeds
  misc_feature: MA Experiment ID: 108595 Result: Down-regulated in Transcription
  misc_feature: MA Experiment 108595 PARAMETER Experiment Name: At_Ler-pi_Ovule_cDNA_P Parameter: Plant Line Value: null
  misc_feature: MA Experiment ID: 108668 Result: Down-regulated in Transcription
  misc_feature: MA Experiment 108668 PARAMETER Experiment Name: At_2mM_SA_cDNA_P Parameter: Plant Line Value: WS
  misc_feature: MA Experiment 108668 PARAMETER Experiment Name: At_2mM_SA_cDNA_P Parameter: Timepoint (hr) Value: 6
  misc_feature: MA Experiment 108668 PARAMETER Experiment Name: At_2mM_SA_cDNA_P Parameter: Treatment Value: 2mM SA vs. No Treatment
  misc_feature: MA Experiment ID: 20001556 Result: Up-regulated in Transcription
  misc_feature: MA Experiment 20001556 PARAMETER Experiment Name: At_Drought_Soil_Dry_P Parameter: Age (day) Value: 26
  misc_feature: MA Experiment 20001556 PARAMETER Experiment Name: At_Drought_Soil_Dry_P Parameter: Organism Value: A. thaliana
  misc_feature: MA Experiment 20001556 PARAMETER Experiment Name: At_Drought_Soil_Dry_P Parameter: Plant Line Value: WS
  misc_feature: MA Experiment 20001556 PARAMETER Experiment Name: At_Drought_Soil_Dry_P Parameter: Post Timepoint (hr) Value: None
  misc_feature: MA Experiment 20001556 PARAMETER Experiment Name: At_Drought_Soil_Dry_P Parameter: Post-Treatment Value: None
  misc_feature: MA Experiment 20001556 PARAMETER Experiment Name: At_Drought_Soil_Dry_P Parameter: Timepoint (day) Value: 12
  misc_feature: MA Experiment 20001556 PARAMETER Experiment Name: At_Drought_Soil_Dry_P Parameter: Treatment Value: Drought vs. No Drought
  misc_feature: MA Experiment ID: 20001904 Result: Up-regulated in Transcription
  misc_feature: MA Experiment 20001904 PARAMETER Experiment Name: At_Drought_Reproduction_P Parameter: Age (day) Value: 37
  misc_feature: MA Experiment 20001904 PARAMETER Experiment Name: At_Drought_Reproduction_P Parameter: Organism Value: A. thaliana
  misc_feature: MA Experiment 20001904 PARAMETER Experiment Name: At_Drought_Reproduction_P Parameter: Plant Line Value: WS
  misc_feature: MA Experiment 20001904 PARAMETER Experiment Name: At_Drought_Reproduction_P Parameter: Timepoint (day) Value: 7
  misc_feature: MA Experiment 20001904 PARAMETER Experiment Name: At_Drought_Reproduction_P Parameter: Tissue Value: Rosettes
  misc_feature: MA Experiment 20001904 PARAMETER Experiment Name: At_Drought_Reproduction_P Parameter: Treatment Value: Drought vs. No Drought

SEQ ID NO: 32431 - protein, 227 aa, Arabidopsis thaliana; identical to SEQ ID NO: 28841
  peptide (1)..(227): Ceres Seq. ID no. 12335059
  misc_feature (92)..(182): Homolog of NCBI NO: 37520451 NR Description: hypothetical protein [Gloeobacter violaceus]
  misc_feature (90)..(179): Homolog of NCBI NO: 11465670 NR Description: ORF108 [Porphyra purpurea]
  misc_feature (90)..(179): Homolog of NCBI NO: 33861662 NR Description: conserved hypothetical protein
  misc_feature (92)..(189): Homolog of NCBI NO: 22299042 NR Description: ORF_ID:tll1499~hypothetical protein
  misc_feature (92)..(192): Homolog of NCBI NO: 17227712 NR Description: hypothetical protein [Nostoc sp. PCC 7120]
  misc_feature (92)..(189): Homolog of NCBI NO: 16329384 NR Description: hypothetical protein [Synechocystis sp. PCC 6803]
  misc_feature (92)..(192): Homolog of NCBI NO: 23042740 NR Description: hypothetical protein [Trichodesmium erythraeum
  misc_feature (92)..(192): Homolog of NCBI NO: 23129763 NR Description: hypothetical protein [Nostoc punctiforme]
  misc_feature (90)..(189): Homolog of NCBI NO: 33865445 NR Description: conserved hypothetical protein [Synechococcus sp.
  misc_feature (17)..(227): Homolog of NCBI NO: 15237144 NR Description: similar to unknown protein (sp|P72777); protein

SEQ ID NO: 32432 - protein, 211 aa, Arabidopsis thaliana; identical to SEQ ID NO: 28842
  peptide (1)..(211): Ceres Seq. ID no. 12335060
  misc_feature (76)..(166): Homolog of NCBI NO: 37520451 NR Description: hypothetical protein [Gloeobacter violaceus]
  misc_feature (74)..(163): Homolog of NCBI NO: 11465670 NR Description: ORF108 [Porphyra purpurea]
  misc_feature (74)..(163): Homolog of NCBI NO: 33861662 NR Description: conserved hypothetical protein
  misc_feature (76)..(173): Homolog of NCBI NO: 22299042 NR Description: ORF_ID:tll1499~hypothetical protein
  misc_feature (76)..(176): Homolog of NCBI NO: 17227712 NR Description: hypothetical protein [Nostoc sp. PCC 7120]
  misc_feature (76)..(173): Homolog of NCBI NO: 16329384 NR Description: hypothetical protein [Synechocystis sp. PCC 6803]
  misc_feature (76)..(176): Homolog of NCBI NO: 23042740 NR Description: hypothetical protein [Trichodesmium erythraeum
  misc_feature (76)..(176): Homolog of NCBI NO: 23129763 NR Description: hypothetical protein [Nostoc punctiforme]
  misc_feature (74)..(173): Homolog of NCBI NO: 33865445 NR Description: conserved hypothetical protein [Synechococcus sp.
  misc_feature (1)..(211): Homolog of NCBI NO: 15237144 NR Description: similar to unknown protein (sp|P72777); protein

SEQ ID NO: 32433 - protein, 126 aa, Arabidopsis thaliana; identical to SEQ ID NO: 28843
  peptide (1)..(126): Ceres Seq. ID no. 12335061
  misc_feature (1)..(81): Homolog of NCBI NO: 37520451 NR Description: hypothetical protein [Gloeobacter violaceus]
  misc_feature (1)..(78): Homolog of NCBI NO: 11465670 NR Description: ORF108 [Porphyra purpurea]
  misc_feature (1)..(78): Homolog of NCBI NO: 33861662 NR Description: conserved hypothetical protein
  misc_feature (1)..(88): Homolog of NCBI NO: 22299042 NR Description: ORF_ID:tll1499~hypothetical protein
  misc_feature (1)..(91): Homolog of NCBI NO: 17227712 NR Description: hypothetical protein [Nostoc sp. PCC 7120]
  misc_feature (1)..(88): Homolog of NCBI NO: 16329384 NR Description: hypothetical protein [Synechocystis sp. PCC 6803]
  misc_feature (1)..(91): Homolog of NCBI NO: 23042740 NR Description: hypothetical protein [Trichodesmium erythraeum
  misc_feature (1)..(91): Homolog of NCBI NO: 23129763 NR Description: hypothetical protein [Nostoc punctiforme]
  misc_feature (1)..(88): Homolog of NCBI NO: 33865445 NR Description: conserved hypothetical protein [Synechococcus sp.
  misc_feature (1)..(126): Homolog of NCBI NO: 15237144 NR Description: similar to unknown protein (sp|P72777); protein

SEQ ID NO: 32434 - DNA, 1387 bp, Arabidopsis thaliana; identical to SEQ ID NO: 28844
  misc_feature (1)..(1387): Ceres Seq. ID no. 12439771
  misc_feature: MA Experiment ID: 108434 Result: Down-regulated in Transcription
  misc_feature: MA Experiment 108434 PARAMETER Experiment Name: At_Root_Tips_cDNA_P Parameter: Tissue Value: Root Tips
  misc_feature: MA Experiment ID: 108435 Result: Up-regulated in Transcription
  misc_feature: MA Experiment 108435 PARAMETER Experiment Name: At_stm_Mutants_cDNA_P Parameter: Plant Line Value: wt Landsburg vs stm
  misc_feature: MA Experiment 108435 PARAMETER Experiment Name: At_stm_Mutants_cDNA_P Parameter: Tissue Value: Shoot Apical Meristem Region
  misc_feature: MA Experiment ID: 108464 Result: Down-regulated in Transcription
  misc_feature: MA Experiment 108464 PARAMETER Experiment Name: At_Germinating_Seeds_cDNA_P Parameter: Age (day) Value: 4 vs. 0
  misc_feature: MA Experiment 108464 PARAMETER Experiment Name: At_Germinating_Seeds_cDNA_P Parameter: Tissue Value: Germinating Seeds
  misc_feature: MA Experiment ID: 20000070 Result: Up-regulated in Transcription
  misc_feature: MA Experiment 20000070 PARAMETER Experiment Name: At_100uM_ABA_Mutants_cDNA_P Parameter: Plant Line Value: CS24
  misc_feature: MA Experiment 20000070 PARAMETER Experiment Name: At_100uM_ABA_Mutants_cDNA_P Parameter: Timepoint (hr) Value: 6
  misc_feature: MA Experiment 20000070 PARAMETER Experiment Name: At_100uM_ABA_Mutants_cDNA_P Parameter: Tissue Value: Aerial
  misc_feature: MA Experiment 20000070 PARAMETER Experiment Name: At_100uM_ABA_Mutants_cDNA_P Parameter: Treatment Value: 100uM ABA vs. No Treatment
  misc_feature: MA Experiment ID: 20000179 Result: Up-regulated in Transcription
  misc_feature: MA Experiment 20000179 PARAMETER Experiment Name: At_Germinating_Seeds_P Parameter: Age (hr) Value: 6 vs. 0
  misc_feature: MA Experiment 20000179 PARAMETER Experiment Name: At_Germinating_Seeds_P Parameter: Tissue Value: Germinating Seeds
  misc_feature: MA Experiment ID: 20000264 Result: Up-regulated in Transcription
  misc_feature: MA Experiment 20000264 PARAMETER Experiment Name: At_Open_Flower_P Parameter: Age (day) Value: 21
  misc_feature: MA Experiment 20000264 PARAMETER Experiment Name: At_Open_Flower_P Parameter: Plant Line Value: WS
  misc_feature: MA Experiment 20000264 PARAMETER Experiment Name: At_Open_Flower_P Parameter: Tissue Value: Open Flower vs. Whole Plant
  misc_feature: MA Experiment ID: 20000286 Result: Up-regulated in Transcription
  misc_feature: MA Experiment 20000286 PARAMETER Experiment Name: At_Open_Flower_P Parameter: Age (day) Value: 21
  misc_feature: MA Experiment 20000286 PARAMETER Experiment Name: At_Open_Flower_P Parameter: Plant Line Value: WS
  misc_feature: MA Experiment 20000286 PARAMETER Experiment Name: At_Open_Flower_P Parameter: Tissue Value: Half Open vs. Whole Plant
  misc_feature: MA Experiment ID: 20000794 Result: Up-regulated in Transcription
  misc_feature: MA Experiment 20000794 PARAMETER Experiment Name: At_Petals_P Parameter: Age (day) Value: 23-25 days
  misc_feature: MA Experiment 20000794 PARAMETER Experiment Name: At_Petals_P Parameter: Plant Line Value: WS
  misc_feature: MA Experiment 20000794 PARAMETER Experiment Name: At_Petals_P Parameter: Tissue Value: Petals vs. Whole plant
  misc_feature: MA Experiment ID: 20001904 Result: Up-regulated in Transcription
  misc_feature: MA Experiment 20001904 PARAMETER Experiment Name: At_Drought_Reproduction_P Parameter: Age (day) Value: 37
  misc_feature: MA Experiment 20001904 PARAMETER Experiment Name: At_Drought_Reproduction_P Parameter: Organism Value: A. thaliana
  misc_feature: MA Experiment 20001904 PARAMETER Experiment Name: At_Drought_Reproduction_P Parameter: Plant Line Value: WS
  misc_feature: MA Experiment 20001904 PARAMETER Experiment Name: At_Drought_Reproduction_P Parameter: Timepoint (day) Value: 7
  misc_feature: MA Experiment 20001904 PARAMETER Experiment Name: At_Drought_Reproduction_P Parameter: Tissue Value: Rosettes
  misc_feature: MA Experiment 20001904 PARAMETER Experiment Name: At_Drought_Reproduction_P Parameter: Treatment Value: Drought vs. No Drought
  misc_feature: MA Experiment ID: 20001905 Result: Up-regulated in Transcription
  misc_feature: MA Experiment 20001905 PARAMETER Experiment Name: At_Drought_Reproduction_P Parameter: Age (day) Value: 40
  misc_feature: MA Experiment 20001905 PARAMETER Experiment Name: At_Drought_Reproduction_P Parameter: Organism Value: A. thaliana
  misc_feature: MA Experiment 20001905 PARAMETER Experiment Name: At_Drought_Reproduction_P Parameter: Plant Line Value: WS
  misc_feature: MA Experiment 20001905 PARAMETER Experiment Name: At_Drought_Reproduction_P Parameter: Timepoint (day) Value: 10
  misc_feature: MA Experiment 20001905 PARAMETER Experiment Name: At_Drought_Reproduction_P Parameter: Tissue Value: Rosettes
  misc_feature: MA Experiment 20001905 PARAMETER Experiment Name: At_Drought_Reproduction_P Parameter: Treatment Value: Drought vs. No Drought

SEQ ID NO: 32435 - protein, 334 aa, Arabidopsis thaliana; identical to SEQ ID NO: 28845
  peptide (1)..(334): Ceres Seq. ID no. 12439772
  misc_feature (1)..(239): Pfam Name: Herpes virus major outer envelope glycoprotein (BLLF1) Pfam Description: Herpes virus major outer envelope glycoprotein
  misc_feature (24)..(316): Homolog of NCBI NO: 18403332 NR Description: AT-hook DNA-binding protein (AHP1)
  misc_feature (24)..(316): Homolog of NCBI NO: 2598227 NR Description: AT-hook protein 1 [Arabidopsis thaliana]
  misc_feature (24)..(316): Homolog of NCBI NO: 14326504 NR Description: At2g33620/F4P9.39 [Arabidopsis thaliana]
  misc_feature (1)..(277): Homolog of NCBI NO: 8809639 NR Description: contains similarity to DNA-binding
  misc_feature (148)..(277): Homolog of NCBI NO: 15241763 NR Description: putative protein; protein id: At5g62260.1
  misc_feature (1)..(141): Homolog of NCBI NO: 15241763 NR Description: putative protein; protein id: At5g62260.1
  misc_feature (2)..(317): Homolog of NCBI NO: 15235023 NR Description: putative protein
  misc_feature (33)..(334): Homolog of NCBI NO: 7485570 NR Description: hypothetical protein F16J13.150 - Arabidopsis
  misc_feature (1)..(334): Homolog of NCBI NO: 22328578 NR Description: putative DNA-binding protein
  misc_feature (1)..(334): Homolog of NCBI NO: 15235790 NR Description: putative DNA binding protein

SEQ ID NO: 32436 - protein, 304 aa, Arabidopsis thaliana; identical to SEQ ID NO: 28846
  peptide (1)..(304): Ceres Seq. ID no. 12439773
  misc_feature (1)..(209): Pfam Name: Herpes virus major outer envelope glycoprotein (BLLF1) Pfam Description: Herpes virus major outer envelope glycoprotein
  misc_feature (1)..(286): Homolog of NCBI NO: 18403332 NR Description: AT-hook DNA-binding protein (AHP1)
  misc_feature (1)..(286): Homolog of NCBI NO: 2598227 NR Description: AT-hook protein 1 [Arabidopsis thaliana]
  misc_feature (1)..(286): Homolog of NCBI NO: 14326504 NR Description: At2g33620/F4P9.39 [Arabidopsis thaliana]
  misc_feature (1)..(247): Homolog of NCBI NO: 8809639 NR Description: contains similarity to DNA-binding
  misc_feature (118)..(247): Homolog of NCBI NO: 15241763 NR Description: putative protein; protein id: At5g62260.1
  misc_feature (1)..(111): Homolog of NCBI NO: 15241763 NR Description: putative protein; protein id: At5g62260.1
  misc_feature (1)..(287): Homolog of NCBI NO: 15235023 NR Description: putative protein
  misc_feature (3)..(304): Homolog of NCBI NO: 7485570 NR Description: hypothetical protein F16J13.150 - Arabidopsis
  misc_feature (1)..(304): Homolog of NCBI NO: 22328578 NR Description: putative DNA-binding protein
  misc_feature (1)..(304): Homolog of NCBI NO: 15235790 NR Description: putative DNA binding protein

SEQ ID NO: 32437 - protein, 272 aa, Arabidopsis thaliana; identical to SEQ ID NO: 28847
  peptide (1)..(272): Ceres Seq. ID no. 12439774
  misc_feature (1)..(177): Pfam Name: Herpes virus major outer envelope glycoprotein (BLLF1) Pfam Description: Herpes virus major outer envelope glycoprotein
  misc_feature (1)..(254): Homolog of NCBI NO: 18403332 NR Description: AT-hook DNA-binding protein (AHP1)
  misc_feature (1)..(254): Homolog of NCBI NO: 2598227 NR Description: AT-hook protein 1 [Arabidopsis thaliana]
  misc_feature (1)..(254): Homolog of NCBI NO: 14326504 NR Description: At2g33620/F4P9.39 [Arabidopsis thaliana]
  misc_feature (1)..(215): Homolog of NCBI NO: 8809639 NR Description: contains similarity to DNA-binding
  misc_feature (86)..(215): Homolog of NCBI NO: 15241763 NR Description: putative protein; protein id: At5g62260.1
  misc_feature (1)..(79): Homolog of NCBI NO: 15241763 NR Description: putative protein; protein id: At5g62260.1
  misc_feature (1)..(255): Homolog of NCBI NO: 15235023 NR Description: putative protein
  misc_feature (1)..(272): Homolog of NCBI NO: 7485570 NR Description: hypothetical protein F16J13.150 - Arabidopsis
  misc_feature (1)..(272): Homolog of NCBI NO: 22328578 NR Description: putative DNA-binding protein
  misc_feature (1)..(272): Homolog of NCBI NO: 15235790 NR Description: putative DNA binding protein

SEQ ID NO: 32438 - DNA, 1455 bp, Arabidopsis thaliana; identical to SEQ ID NO: 28848
  misc_feature (1)..(1455): Ceres Seq. ID no. 13490626
  misc_feature: MA Experiment ID: 108488 Result: Down-regulated in Transcription
  misc_feature: MA Experiment ID: 108501 Result: Down-regulated in Transcription
  misc_feature: MA Experiment 108501 PARAMETER Experiment Name: At_ap2_floral_buds_cDNA_P Parameter: Plant Line Value: ap2 (Ler.)
  misc_feature: MA Experiment 108501 PARAMETER Experiment Name: At_ap2_floral_buds_cDNA_P Parameter: Tissue Value: Closed Flower
  misc_feature: MA Experiment ID: 108561 Result: Up-regulated in Transcription
  misc_feature: MA Experiment 108561 PARAMETER Experiment Name: At_100uM_ABA_cDNA_P Parameter: Timepoint (hr) Value: 6
  misc_feature: MA Experiment 108561 PARAMETER Experiment Name: At_100uM_ABA_cDNA_P Parameter: Tissue Value: Aerial
  misc_feature: MA Experiment 108561 PARAMETER Experiment Name: At_100uM_ABA_cDNA_P Parameter: Treatment Value: 100uM ABA vs. No Treatment
  misc_feature: MA Experiment ID: 108573 Result: Up-regulated in Transcription
  misc_feature: MA Experiment 108573 PARAMETER Experiment Name: At_Drought_cDNA_P Parameter: Timepoint (hr) Value: 6
  misc_feature: MA Experiment 108573 PARAMETER Experiment Name: At_Drought_cDNA_P Parameter: Tissue Value: Aerial
  misc_feature: MA Experiment 108573 PARAMETER Experiment Name: At_Drought_cDNA_P Parameter: Treatment Value: Drought vs. No Drought
  misc_feature: MA Experiment ID: 20000185 Result: Down-regulated in Transcription
  misc_feature: MA Experiment 20000185 PARAMETER Experiment Name: At_Roots__P Parameter: Age (day) Value: 7 vs. 21
  misc_feature: MA Experiment 20000185 PARAMETER Experiment Name: At_Roots__P Parameter: Organism Value: A. thaliana
  misc_feature: MA Experiment 20000185 PARAMETER Experiment Name: At_Roots__P Parameter: Tissue Value: Roots vs. Whole Plant
  misc_feature: MA Experiment ID: 20001904 Result: Up-regulated in Transcription
  misc_feature: MA Experiment 20001904 PARAMETER Experiment Name: At_Drought_Reproduction_P Parameter: Age (day) Value: 37
  misc_feature: MA Experiment 20001904 PARAMETER Experiment Name: At_Drought_Reproduction_P Parameter: Organism Value: A. thaliana
  misc_feature: MA Experiment 20001904 PARAMETER Experiment Name: At_Drought_Reproduction_P Parameter: Plant Line Value: WS
  misc_feature: MA Experiment 20001904 PARAMETER Experiment Name: At_Drought_Reproduction_P Parameter: Timepoint (day) Value: 7
  misc_feature: MA Experiment 20001904 PARAMETER Experiment Name: At_Drought_Reproduction_P Parameter: Tissue Value: Rosettes
  misc_feature: MA Experiment 20001904 PARAMETER Experiment Name: At_Drought_Reproduction_P Parameter: Treatment Value: Drought vs. No Drought

SEQ ID NO: 32439 - protein, 293 aa, Arabidopsis thaliana; identical to SEQ ID NO: 28849
  peptide (1)..(293): Ceres Seq. ID no. 13490627
  misc_feature (23)..(293): Homolog of NCBI NO: 34896982 NR Description: unknown protein [Oryza sativa]
  misc_feature (24)..(293): Homolog of NCBI NO: 18415765 NR Description: TOM1 protein [Arabidopsis thaliana]
  misc_feature (24)..(292): Homolog of NCBI NO: 34902220 NR Description: Putative transmembrane protein
  misc_feature (10)..(292): Homolog of NCBI NO: 37536460 NR Description: putative transmembrane protein
  misc_feature (10)..(293): Homolog of NCBI NO: 21537264 NR Description: unknown [Arabidopsis thaliana]
  misc_feature (1)..(293): Homolog of NCBI NO: 18395323 NR Description: TOM3 protein [Arabidopsis thaliana]
  misc_feature (9)..(293): Homolog of NCBI NO: 21537116 NR Description: unknown [Arabidopsis thaliana]
  misc_feature (1)..(293): Homolog of NCBI NO: 27754346 NR Description: unknown protein [Arabidopsis thaliana]
  misc_feature (1)..(293): Homolog of NCBI NO: 18394129 NR Description: THH1 protein [Arabidopsis thaliana]
  misc_feature (1)..(293): Homolog of NCBI NO: 7262697 NR Description: Contains similarity to an unknown protein from

SEQ ID NO: 32440 - protein, 286 aa, Arabidopsis thaliana; identical to SEQ ID NO: 28850
  peptide (1)..(286): Ceres Seq. ID no. 13490628
  misc_feature (16)..(286): Homolog of NCBI NO: 34896982 NR Description: unknown protein [Oryza sativa]
  misc_feature (17)..(286): Homolog of NCBI NO: 18415765 NR Description: TOM1 protein [Arabidopsis thaliana]
  misc_feature (17)..(285): Homolog of NCBI NO: 34902220 NR Description: Putative transmembrane protein
  misc_feature (3)..(285): Homolog of NCBI NO: 37536460 NR Description: putative transmembrane protein
  misc_feature (3)..(286): Homolog of NCBI NO: 21537264 NR Description: unknown [Arabidopsis thaliana]
  misc_feature (1)..(286): Homolog of NCBI NO: 18395323 NR Description: TOM3 protein [Arabidopsis thaliana]
  misc_feature (2)..(286): Homolog of NCBI NO: 21537116 NR Description: unknown [Arabidopsis thaliana]
  misc_feature (1)..(286): Homolog of NCBI NO: 27754346 NR Description: unknown protein [Arabidopsis thaliana]
  misc_feature (1)..(286): Homolog of NCBI NO: 18394129 NR Description: THH1 protein [Arabidopsis thaliana]
  misc_feature (1)..(286): Homolog of NCBI NO: 7262697 NR Description: Contains similarity to an unknown protein from

SEQ ID NO: 32441 - protein, 285 aa, Arabidopsis thaliana; identical to SEQ ID NO: 28851
  peptide (1)..(285): Ceres Seq. ID no. 13490629
  misc_feature (15)..(285): Homolog of NCBI NO: 34896982 NR Description: unknown protein [Oryza sativa]
  misc_feature (16)..(285): Homolog of NCBI NO: 18415765 NR Description: TOM1 protein [Arabidopsis thaliana]
  misc_feature (16)..(284): Homolog of NCBI NO: 34902220 NR Description: Putative transmembrane protein
  misc_feature (2)..(284): Homolog of NCBI NO: 37536460 NR Description: putative transmembrane protein
  misc_feature (2)..(285): Homolog of NCBI NO: 21537264 NR Description: unknown [Arabidopsis thaliana]
  misc_feature (1)..(285): Homolog of NCBI NO: 18395323 NR Description: TOM3 protein [Arabidopsis thaliana]
  misc_feature (1)..(285): Homolog of NCBI NO: 21537116 NR Description: unknown [Arabidopsis thaliana]
  misc_feature (1)..(285): Homolog of NCBI NO: 27754346 NR Description: unknown protein [Arabidopsis thaliana]
  misc_feature (1)..(285): Homolog of NCBI NO: 18394129 NR Description: THH1 protein [Arabidopsis thaliana]
  misc_feature (1)..(285): Homolog of NCBI NO: 7262697 NR Description: Contains similarity to an unknown protein from

SEQ ID NO: 32442 - DNA, 803 bp, Arabidopsis thaliana; identical to SEQ ID NO: 28852
  misc_feature (1)..(803): Ceres Seq. ID no. 13489786
  misc_feature: MA Experiment ID: 108595 Result: Up-regulated in Transcription
  misc_feature: MA Experiment 108595 PARAMETER Experiment Name: At_Ler-pi_Ovule_cDNA_P Parameter: Plant Line Value: null
  misc_feature: MA Experiment ID: 108609 Result: Up-regulated in Transcription
  misc_feature: MA Experiment 108609 PARAMETER Experiment Name: At_100uM_ABA_cDNA_P Parameter: Timepoint (hr) Value: 24
  misc_feature: MA Experiment 108609 PARAMETER Experiment Name: At_100uM_ABA_cDNA_P Parameter: Tissue Value: Aerial
  misc_feature: MA Experiment 108609 PARAMETER Experiment Name: At_100uM_ABA_cDNA_P Parameter: Treatment Value: 100uM ABA vs. No Treatment
  misc_feature: MA Experiment ID: 20000069 Result: Up-regulated in Transcription
  misc_feature: MA Experiment 20000069 PARAMETER Experiment Name: At_100uM_ABA_Mutants_cDNA_P Parameter: Plant Line Value: CS23
  misc_feature: MA Experiment 20000069 PARAMETER Experiment Name: At_100uM_ABA_Mutants_cDNA_P Parameter: Timepoint (hr) Value: 6
  misc_feature: MA Experiment 20000069 PARAMETER Experiment Name: At_100uM_ABA_Mutants_cDNA_P Parameter: Tissue Value: Aerial
  misc_feature: MA Experiment 20000069 PARAMETER Experiment Name: At_100uM_ABA_Mutants_cDNA_P Parameter: Treatment Value: 100uM ABA vs. No Treatment
  misc_feature: MA Experiment ID: 20000184 Result: Down-regulated in Transcription
  misc_feature: MA Experiment 20000184 PARAMETER Experiment Name: At_Shoots__P Parameter: Age (day) Value: 7
  misc_feature: MA Experiment 20000184 PARAMETER Experiment Name: At_Shoots__P Parameter: Tissue Value: Shoots vs. Whole Plant
  misc_feature: MA Experiment ID: 20000185 Result: Down-regulated in Transcription
  misc_feature: MA Experiment 20000185 PARAMETER Experiment Name: At_Roots__P Parameter: Age (day) Value: 7 vs. 21
  misc_feature: MA Experiment 20000185 PARAMETER Experiment Name: At_Roots__P Parameter: Organism Value: A. thaliana
  misc_feature: MA Experiment 20000185 PARAMETER Experiment Name: At_Roots__P Parameter: Tissue Value: Roots vs. Whole Plant
  misc_feature: MA Experiment ID: 20000265 Result: Up-regulated in Transcription
  misc_feature: MA Experiment 20000265 PARAMETER Experiment Name: At_Open_Flower_P Parameter: Age (day) Value: 21
  misc_feature: MA Experiment 20000265 PARAMETER Experiment Name: At_Open_Flower_P Parameter: Plant Line Value: WS
  misc_feature: MA Experiment 20000265 PARAMETER Experiment Name: At_Open_Flower_P Parameter: Tissue Value: Closed Flower vs. Whole Plant
  misc_feature: MA Experiment ID: 20000438 Result: Down-regulated in Transcription
  misc_feature: MA Experiment 20000438 PARAMETER Experiment Name: At_Shoots__P Parameter: Age (day) Value: 14
  misc_feature: MA Experiment 20000438 PARAMETER Experiment Name: At_Shoots__P Parameter: Tissue Value: Shoots vs. Whole Plant
  misc_feature: MA Experiment ID: 20000439 Result: Down-regulated in Transcription
  misc_feature: MA Experiment 20000439 PARAMETER Experiment Name: At_Roots__P Parameter: Age (day) Value: 14 vs. 21
  misc_feature: MA Experiment 20000439 PARAMETER Experiment Name: At_Roots__P Parameter: Organism Value: A. thaliana
  misc_feature: MA Experiment 20000439 PARAMETER Experiment Name: At_Roots__P Parameter: Tissue Value: Roots vs. Whole Plant
  misc_feature: MA Experiment ID: 20000453 Result: Up-regulated in Transcription
  misc_feature: MA Experiment 20000453 PARAMETER Experiment Name: At_100uM_ABA_P Parameter: Age (day) Value: 15
  misc_feature: MA Experiment 20000453 PARAMETER Experiment Name: At_100uM_ABA_P Parameter: Organism Value: A. thaliana
  misc_feature: MA Experiment 20000453 PARAMETER Experiment Name: At_100uM_ABA_P Parameter: Plant Line Value: WS
  misc_feature: MA Experiment 20000453 PARAMETER Experiment Name: At_100uM_ABA_P Parameter: Timepoint (hr) Value: 24
  misc_feature: MA Experiment 20000453 PARAMETER Experiment Name: At_100uM_ABA_P Parameter: Tissue Value: Aerial
  misc_feature: MA Experiment 20000453 PARAMETER Experiment Name: At_100uM_ABA_P Parameter: Treatment Value: 100uM ABA vs. No Treatment
  misc_feature: MA Experiment ID: 20000456 Result: Down-regulated in Transcription
  misc_feature: MA Experiment 20000456 PARAMETER Experiment Name: At_100uM_BA_P Parameter: Age (day) Value: 14
  misc_feature: MA Experiment 20000456 PARAMETER Experiment Name: At_100uM_BA_P Parameter: Organism Value: A. thaliana
  misc_feature: MA Experiment 20000456 PARAMETER Experiment Name: At_100uM_BA_P Parameter: Plant Line Value: WS
  misc_feature: MA Experiment 20000456 PARAMETER Experiment Name: At_100uM_BA_P Parameter: Timepoint (hr) Value: 6
  misc_feature: MA Experiment 20000456 PARAMETER Experiment Name: At_100uM_BA_P Parameter: Tissue Value: Aerial
  misc_feature: MA Experiment 20000456 PARAMETER Experiment Name: At_100uM_BA_P Parameter: Treatment Value: 100uM BA vs. No Treatment
  misc_feature: MA Experiment ID: 20000573 Result: Down-regulated in Transcription
  misc_feature: MA Experiment 20000573 PARAMETER Experiment Name: At_100uM_ABA_Mutants__P Parameter: Organism Value: A. thaliana
  misc_feature: MA Experiment 20000573 PARAMETER Experiment Name: At_100uM_ABA_Mutants__P Parameter: Plant Line Value: CS22 vs. Ler wt
  misc_feature: MA Experiment 20000573 PARAMETER Experiment Name: At_100uM_ABA_Mutants__P Parameter: Timepoint (hr) Value: N/A
  misc_feature: MA Experiment 20000573 PARAMETER Experiment Name: At_100uM_ABA_Mutants__P Parameter: Tissue Value: Whole Plant
  misc_feature: MA Experiment 20000573 PARAMETER Experiment Name: At_100uM_ABA_Mutants__P Parameter: Treatment Value: None
  misc_feature: MA Experiment ID: 20000574 Result: Down-regulated in Transcription
  misc_feature: MA Experiment 20000574 PARAMETER Experiment Name: At_100uM_ABA_Mutants__P Parameter: Organism Value: A. thaliana
  misc_feature: MA Experiment 20000574 PARAMETER Experiment Name: At_100uM_ABA_Mutants__P Parameter: Plant Line Value: CS23 vs. Ler wt
  misc_feature: MA Experiment 20000574 PARAMETER Experiment Name: At_100uM_ABA_Mutants__P Parameter: Timepoint (hr) Value: N/A
  misc_feature: MA Experiment 20000574 PARAMETER Experiment Name: At_100uM_ABA_Mutants__P Parameter: Tissue Value: Whole Plant
  misc_feature: MA Experiment 20000574 PARAMETER Experiment Name: At_100uM_ABA_Mutants__P Parameter: Treatment Value: None
  misc_feature: MA Experiment ID: 20000794 Result: Down-regulated in Transcription
  misc_feature: MA Experiment 20000794 PARAMETER Experiment Name: At_Petals_P Parameter: Age (day) Value: 23-25 days
  misc_feature: MA Experiment 20000794 PARAMETER Experiment Name: At_Petals_P Parameter: Plant Line Value: WS
  misc_feature: MA Experiment 20000794 PARAMETER Experiment Name: At_Petals_P Parameter: Tissue Value: Petals vs. Whole plant
  misc_feature: MA Experiment ID: 20001554 Result: Up-regulated in Transcription
  misc_feature: MA Experiment 20001554 PARAMETER Experiment Name: At_Drought_Soil_Dry_P Parameter: Age (day) Value: 21
  misc_feature: MA Experiment 20001554 PARAMETER Experiment Name: At_Drought_Soil_Dry_P Parameter: Organism Value: A. thaliana
  misc_feature: MA Experiment 20001554 PARAMETER Experiment Name: At_Drought_Soil_Dry_P Parameter: Plant Line Value: WS
  misc_feature: MA Experiment 20001554 PARAMETER Experiment Name: At_Drought_Soil_Dry_P Parameter: Post Timepoint (hr) Value: None
  misc_feature: MA Experiment 20001554 PARAMETER Experiment Name: At_Drought_Soil_Dry_P Parameter: Post-Treatment Value: None
  misc_feature: MA Experiment 20001554 PARAMETER Experiment Name: At_Drought_Soil_Dry_P Parameter: Timepoint (day) Value: 7
  misc_feature: MA Experiment 20001554 PARAMETER Experiment Name: At_Drought_Soil_Dry_P Parameter: Treatment Value: Drought vs. No Drought
  misc_feature: MA Experiment ID: 20001555 Result: Up-regulated in Transcription
  misc_feature: MA Experiment 20001555 PARAMETER Experiment Name: At_Drought_Soil_Dry_P Parameter: Age (day) Value: 24
  misc_feature: MA Experiment 20001555 PARAMETER Experiment Name: At_Drought_Soil_Dry_P Parameter: Organism Value: A. thaliana
  misc_feature: MA Experiment 20001555 PARAMETER Experiment Name: At_Drought_Soil_Dry_P Parameter: Plant Line Value: WS
  misc_feature: MA Experiment 20001555 PARAMETER Experiment Name: At_Drought_Soil_Dry_P Parameter: Post Timepoint (hr) Value: None
  misc_feature: MA Experiment 20001555 PARAMETER Experiment Name: At_Drought_Soil_Dry_P Parameter: Post-Treatment Value: None
  misc_feature: MA Experiment 20001555 PARAMETER Experiment Name: At_Drought_Soil_Dry_P Parameter: Timepoint (day) Value: 10
  misc_feature: MA Experiment 20001555 PARAMETER Experiment Name: At_Drought_Soil_Dry_P Parameter: Treatment Value: Drought vs. No Drought
  misc_feature: MA Experiment ID: 20001557 Result: Down-regulated in Transcription
  misc_feature: MA Experiment 20001557 PARAMETER Experiment Name: At_Drought_Soil_Dry_P Parameter: Age (day) Value: 27
  misc_feature: MA Experiment 20001557 PARAMETER Experiment Name: At_Drought_Soil_Dry_P Parameter: Organism Value: A. thaliana
  misc_feature: MA Experiment 20001557 PARAMETER Experiment Name: At_Drought_Soil_Dry_P Parameter: Plant Line Value: WS
  misc_feature: MA Experiment 20001557 PARAMETER Experiment Name: At_Drought_Soil_Dry_P Parameter: Post Timepoint (hr) Value: 3
  misc_feature: MA Experiment 20001557 PARAMETER Experiment Name: At_Drought_Soil_Dry_P Parameter: Post-Treatment Value: Re-Water vs. No Drought
  misc_feature: MA Experiment 20001557 PARAMETER Experiment Name: At_Drought_Soil_Dry_P Parameter: Timepoint (day) Value: 13
  misc_feature: MA Experiment 20001557 PARAMETER Experiment Name: At_Drought_Soil_Dry_P Parameter: Treatment Value: Drought vs. No Drought
  misc_feature: MA Experiment ID: 20001559 Result: Up-regulated in Transcription
  misc_feature: MA Experiment 20001559 PARAMETER Experiment Name: At_Drought_Soil_Dry_P Parameter: Age (day) Value: 28
  misc_feature: MA Experiment 20001559 PARAMETER Experiment Name: At_Drought_Soil_Dry_P Parameter: Organism Value: A. thaliana
  misc_feature: MA Experiment 20001559 PARAMETER Experiment Name: At_Drought_Soil_Dry_P Parameter: Plant Line Value: WS
  misc_feature: MA Experiment 20001559 PARAMETER Experiment Name: At_Drought_Soil_Dry_P Parameter: Post Timepoint (hr) Value: 29
  misc_feature: MA Experiment 20001559 PARAMETER Experiment Name: At_Drought_Soil_Dry_P Parameter: Post-Treatment Value: Re-Water vs. No Drought
  misc_feature: MA Experiment 20001559 PARAMETER Experiment Name: At_Drought_Soil_Dry_P Parameter: Timepoint (day) Value: 14
  misc_feature: MA Experiment 20001559 PARAMETER Experiment Name: At_Drought_Soil_Dry_P Parameter: Treatment Value: Drought vs. No Drought
  misc_feature: Phenotype: ROSETTE LEAVES Other
  misc_feature: Phenotype: ROSETTE LEAVES Other
  misc_feature: Phenotype: WHOLE PLANT Size-Small
  misc_feature: Phenotype: WHOLE PLANT Size-Small
  misc_feature: Phenotype: INFLORESCENCE Height-Short
  misc_feature: Phenotype: INFLORESCENCE Strength-Weak
  misc_feature: Phenotype: ROSETTE LEAVES Other
  misc_feature: Phenotype: ROSETTE LEAVES Other
  misc_feature: Phenotype: ROSETTE LEAVES Shape-Serrate

SEQ ID NO: 32443 - protein, 174 aa, Arabidopsis thaliana; identical to SEQ ID NO: 28853
  peptide (1)..(174): Ceres Seq. ID no. 13489787
  misc_feature (53)..(131): Pfam Name: SBP domain Pfam Description: SBP domain
  misc_feature (39)..(136): Homolog of NCBI NO: 34394700 NR Description: putative squamosa-promoter binding protein
  misc_feature (6)..(132): Homolog of NCBI NO: 6094239 NR Description: SQUAMOSA-PROMOTER BINDING PROTEIN 1
  misc_feature (1)..(129): Homolog of NCBI NO: 21618221 NR Description: putative squamosa-promoter binding protein
  misc_feature (1)..(129): Homolog of NCBI NO: 25408313 NR Description: probable squamosa-promoter binding protein
  misc_feature (1)..(129): Homolog of NCBI NO: 18403387 NR Description: squamosa-promoter binding protein -related
  misc_feature (1)..(138): Homolog of NCBI NO: 30577628 NR Description: squamosa promoter binding like-protein [Betula
  misc_feature (1)..(129): Homolog of NCBI NO: 25456671 NR Description: squamosa promoter binding protein-like 5
  misc_feature (1)..(174): Homolog of NCBI NO: 15232541 NR Description: squamosa promoter binding protein-related 5
  misc_feature (8)..(174): Homolog of NCBI NO: 25456654 NR Description: squamosa promoter binding protein 4
  misc_feature (1)..(174): Homolog of NCBI NO: 15219210 NR Description: transcription factor -related [Arabidopsis

SEQ ID NO: 32444 - protein, 163 aa, Arabidopsis thaliana; identical to SEQ ID NO: 28854
  peptide (1)..(163): Ceres Seq. ID no. 13489788
  misc_feature (42)..(120): Pfam Name: SBP domain Pfam Description: SBP domain
  misc_feature (28)..(125): Homolog of NCBI NO: 34394700 NR Description: putative squamosa-promoter binding protein
  misc_feature (1)..(121): Homolog of NCBI NO: 6094239 NR Description: SQUAMOSA-PROMOTER BINDING PROTEIN 1
  misc_feature (1)..(118): Homolog of NCBI NO: 21618221 NR Description: putative squamosa-promoter binding protein
  misc_feature (1)..(118): Homolog of NCBI NO: 25408313 NR Description: probable squamosa-promoter binding protein
  misc_feature (1)..(118): Homolog of NCBI NO: 18403387 NR Description: squamosa-promoter binding protein -related
  misc_feature (1)..(127): Homolog of NCBI NO: 30577628 NR Description: squamosa promoter binding like-protein [Betula
  misc_feature (1)..(118): Homolog of NCBI NO: 25456671 NR Description: squamosa promoter binding protein-like 5
  misc_feature (1)..(163): Homolog of NCBI NO: 15232541 NR Description: squamosa promoter binding protein-related 5
  misc_feature (1)..(163): Homolog of NCBI NO: 25456654 NR Description: squamosa promoter binding protein 4
  misc_feature (1)..(163): Homolog of NCBI NO: 15219210 NR Description: transcription factor -related [Arabidopsis

SEQ ID NO: 32445 - protein, 152 aa, Arabidopsis thaliana; identical to SEQ ID NO: 28855
  peptide (1)..(152): Ceres Seq. ID no. 13489789
  misc_feature (31)..(109): Pfam Name: SBP domain Pfam Description: SBP domain
  misc_feature (17)..(114): Homolog of NCBI NO: 34394700 NR Description: putative squamosa-promoter binding protein
  misc_feature (1)..(110): Homolog of NCBI NO: 6094239 NR Description: SQUAMOSA-PROMOTER BINDING PROTEIN 1
  misc_feature (1)..(107): Homolog of NCBI NO: 21618221 NR Description: putative squamosa-promoter binding protein
  misc_feature (1)..(107): Homolog of NCBI NO: 25408313 NR Description: probable squamosa-promoter binding protein
  misc_feature (1)..(107): Homolog of NCBI NO: 18403387 NR Description: squamosa-promoter binding protein -related
  misc_feature (1)..(116): Homolog of NCBI NO: 30577628 NR Description: squamosa promoter binding like-protein [Betula
  misc_feature (1)..(107): Homolog of NCBI NO: 25456671 NR Description: squamosa promoter binding protein-like 5
  misc_feature (1)..(152): Homolog of NCBI NO: 15232541 NR Description: squamosa promoter binding protein-related 5
  misc_feature (1)..(152): Homolog of NCBI NO: 25456654 NR Description: squamosa promoter binding protein 4
  misc_feature (1)..(152): Homolog of NCBI NO: 15219210 NR Description: transcription factor -related [Arabidopsis

SEQ ID NO: 32446 - DNA, 773 bp, Arabidopsis thaliana; identical to SEQ ID NO: 28856
  misc_feature (1)..(773): Ceres Seq. ID no. 13646075
  misc_feature: MA Experiment ID: 20000180 Result: Up-regulated in Transcription
  misc_feature: MA Experiment 20000180 PARAMETER Experiment Name: At_Germinating_Seeds_P Parameter: Age (hr) Value: 24 vs. 0
  misc_feature: MA Experiment 20000180 PARAMETER Experiment Name: At_Germinating_Seeds_P Parameter: Tissue Value: Germinating Seeds
  misc_feature: MA Experiment ID: 20000182 Result: Down-regulated in Transcription
  misc_feature: MA Experiment 20000182 PARAMETER Experiment Name: At_2mM_SA_P Parameter: Age (day) Value: 14
  misc_feature: MA Experiment 20000182 PARAMETER Experiment Name: At_2mM_SA_P Parameter: Organism Value: A. thaliana
  misc_feature: MA Experiment 20000182 PARAMETER Experiment Name: At_2mM_SA_P Parameter: Plant Line Value: WS
  misc_feature: MA Experiment 20000182 PARAMETER Experiment Name: At_2mM_SA_P Parameter: Timepoint (hr) Value: 6
  misc_feature: MA Experiment 20000182 PARAMETER Experiment Name: At_2mM_SA_P Parameter: Tissue Value: Aerial
  misc_feature: MA Experiment 20000182 PARAMETER Experiment Name: At_2mM_SA_P Parameter: Treatment Value: 2mM SA vs. No Treatment
  misc_feature: MA Experiment ID: 20000185 Result: Up-regulated in Transcription
  misc_feature: MA Experiment 20000185 PARAMETER Experiment Name: At_Roots__P Parameter: Age (day) Value: 7 vs. 21
  misc_feature: MA Experiment 20000185 PARAMETER Experiment Name: At_Roots__P Parameter: Organism Value: A. thaliana
  misc_feature: MA Experiment 20000185 PARAMETER Experiment Name: At_Roots__P Parameter: Tissue Value: Roots vs. Whole Plant
  misc_feature: MA Experiment ID: 20000211 Result: Up-regulated in Transcription
  misc_feature: MA Experiment 20000211 PARAMETER Experiment Name: At_0.001percent_MeJA__P Parameter: Age (day) Value: 14
  misc_feature: MA Experiment 20000211 PARAMETER Experiment Name: At_0.001percent_MeJA__P Parameter: Organism Value: A. thaliana
  misc_feature: MA Experiment 20000211 PARAMETER Experiment Name: At_0.001percent_MeJA__P Parameter: Plant Line Value: WS
  misc_feature: MA Experiment 20000211 PARAMETER Experiment Name: At_0.001percent_MeJA__P Parameter: Timepoint (hr) Value: 1
  misc_feature: MA Experiment 20000211 PARAMETER Experiment Name: At_0.001percent_MeJA__P Parameter: Tissue Value: Aerial
  misc_feature: MA Experiment 20000211 PARAMETER Experiment Name: At_0.001percent_MeJA__P Parameter: Treatment Value: 0.001percent MeJA vs. No Treatment
  misc_feature: MA Experiment ID: 20000234 Result: Up-regulated in Transcription
  misc_feature: MA Experiment 20000234 PARAMETER Experiment Name: At_Siliques_P Parameter: Age (day) Value: 21
  misc_feature: MA Experiment 20000234 PARAMETER Experiment Name: At_Siliques_P Parameter: Organism Value: A. thaliana
  misc_feature: MA Experiment 20000234 PARAMETER Experiment Name: At_Siliques_P Parameter: Plant Line Value: WS
  misc_feature: MA Experiment 20000234 PARAMETER Experiment Name: At_Siliques_P Parameter: Tissue Value: Less Than 5mm Siliques vs. Whole Plant
  misc_feature: MA Experiment ID: 20000235 Result: Up-regulated in Transcription
  misc_feature: MA Experiment 20000235 PARAMETER Experiment Name: At_Siliques_P Parameter: Age (day) Value: 21
  misc_feature: MA Experiment 20000235 PARAMETER Experiment Name: At_Siliques_P Parameter: Organism Value: A. thaliana
  misc_feature: MA Experiment 20000235 PARAMETER Experiment Name: At_Siliques_P Parameter: Plant Line Value: WS
  misc_feature: MA Experiment 20000235 PARAMETER Experiment Name: At_Siliques_P Parameter: Tissue Value: 5-10mm Siliques vs. Whole Plant
  misc_feature: MA Experiment ID: 20000264 Result: Up-regulated in Transcription
  misc_feature: MA Experiment 20000264 PARAMETER Experiment Name: At_Open_Flower_P Parameter: Age (day) Value: 21
  misc_feature: MA Experiment 20000264 PARAMETER Experiment Name: At_Open_Flower_P Parameter: Plant Line Value: WS
  misc_feature: MA Experiment 20000264 PARAMETER Experiment Name: At_Open_Flower_P Parameter: Tissue Value: Open Flower vs. Whole Plant
  misc_feature: MA Experiment ID: 20000265 Result: Up-regulated in Transcription
  misc_feature: MA Experiment 20000265 PARAMETER Experiment Name: At_Open_Flower_P Parameter: Age (day) Value: 21
  misc_feature: MA Experiment 20000265 PARAMETER Experiment Name: At_Open_Flower_P Parameter: Plant Line Value: WS
  misc_feature: MA Experiment 20000265 PARAMETER Experiment Name: At_Open_Flower_P Parameter: Tissue Value: Closed Flower vs. Whole Plant
  misc_feature: MA Experiment ID: 20000286 Result: Up-regulated in Transcription
  misc_feature: MA Experiment 20000286 PARAMETER Experiment Name: At_Open_Flower_P Parameter: Age (day) Value: 21
  misc_feature: MA Experiment 20000286 PARAMETER Experiment Name: At_Open_Flower_P Parameter: Plant Line Value: WS
  misc_feature: MA Experiment 20000286 PARAMETER Experiment Name: At_Open_Flower_P Parameter: Tissue Value: Half Open vs. Whole Plant
  misc_feature: MA Experiment ID: 20000437 Result: Down-regulated in Transcription
  misc_feature: MA Experiment 20000437 PARAMETER Experiment Name: At_Drought_P Parameter: Age (day) Value: 8
  misc_feature: MA Experiment 20000437 PARAMETER Experiment Name: At_Drought_P Parameter: Organism Value: A. thaliana
  misc_feature: MA Experiment 20000437 PARAMETER Experiment Name: At_Drought_P Parameter: Plant Line Value: WS
  misc_feature: MA Experiment 20000437 PARAMETER Experiment Name: At_Drought_P Parameter: Timepoint (hr) Value: 24
  misc_feature: MA Experiment 20000437 PARAMETER Experiment Name: At_Drought_P Parameter: Tissue Value: Whole Plant
  misc_feature: MA Experiment 20000437 PARAMETER Experiment Name: At_Drought_P Parameter: Treatment Value: Drought vs. No Drought
  misc_feature: MA Experiment ID: 20000439 Result: Up-regulated in Transcription
  misc_feature: MA Experiment 20000439 PARAMETER Experiment Name: At_Roots__P Parameter: Age (day) Value: 14 vs. 21
  misc_feature: MA Experiment 20000439 PARAMETER Experiment Name: At_Roots__P Parameter: Organism Value: A. thaliana
  misc_feature: MA Experiment 20000439 PARAMETER Experiment Name: At_Roots__P Parameter: Tissue Value: Roots vs. Whole Plant
  misc_feature: MA Experiment ID: 20000573 Result: Down-regulated in Transcription
  misc_feature: MA Experiment 20000573 PARAMETER Experiment Name: At_100uM_ABA_Mutants__P Parameter: Organism Value: A. thaliana
  misc_feature: MA Experiment 20000573 PARAMETER Experiment Name: At_100uM_ABA_Mutants__P Parameter: Plant Line Value: CS22 vs. Ler wt
  misc_feature: MA Experiment 20000573 PARAMETER Experiment Name: At_100uM_ABA_Mutants__P Parameter: Timepoint (hr) Value: N/A
  misc_feature: MA Experiment 20000573 PARAMETER Experiment Name: At_100uM_ABA_Mutants__P Parameter: Tissue Value: Whole Plant
  misc_feature: MA Experiment 20000573 PARAMETER Experiment Name: At_100uM_ABA_Mutants__P Parameter: Treatment Value: None
  misc_feature: MA Experiment ID: 20000574 Result: Down-regulated in Transcription
  misc_feature: MA Experiment 20000574 PARAMETER Experiment Name: At_100uM_ABA_Mutants__P Parameter: Organism Value: A. thaliana
  misc_feature: MA Experiment 20000574 PARAMETER Experiment Name: At_100uM_ABA_Mutants__P Parameter: Plant Line Value: CS23 vs. Ler wt
  misc_feature: MA Experiment 20000574 PARAMETER Experiment Name: At_100uM_ABA_Mutants__P Parameter: Timepoint (hr) Value: N/A
  misc_feature: MA Experiment 20000574 PARAMETER Experiment Name: At_100uM_ABA_Mutants__P Parameter: Tissue Value: Whole Plant
  misc_feature: MA Experiment 20000574 PARAMETER Experiment Name: At_100uM_ABA_Mutants__P Parameter: Treatment Value: None
  misc_feature: MA Experiment ID: 20001248 Result: Down-regulated in Transcription
  misc_feature: MA Experiment 20001248 PARAMETER Experiment Name: At_Far-red-induction_P Parameter: Age (day) Value: 7
  misc_feature: MA Experiment 20001248 PARAMETER Experiment Name: At_Far-red-induction_P Parameter: Light Value: Far-red vs. White
  misc_feature: MA Experiment 20001248 PARAMETER Experiment Name: At_Far-red-induction_P Parameter: Organism Value: A. thaliana
  misc_feature: MA Experiment 20001248 PARAMETER Experiment Name: At_Far-red-induction_P Parameter: Plant Line Value: Columbia
  misc_feature: MA Experiment 20001248 PARAMETER Experiment Name: At_Far-red-induction_P Parameter: Timepoint (hr) Value: 4
  misc_feature: MA Experiment 20001248 PARAMETER Experiment Name: At_Far-red-induction_P Parameter: Tissue Value: Whole Plant
  misc_feature: MA Experiment ID: 20001557 Result: Up-regulated in Transcription
  misc_feature: MA Experiment 20001557 PARAMETER Experiment Name: At_Drought_Soil_Dry_P Parameter: Age (day) Value: 27
  misc_feature: MA Experiment 20001557 PARAMETER Experiment Name: At_Drought_Soil_Dry_P Parameter: Organism Value: A. thaliana
  misc_feature: MA Experiment 20001557 PARAMETER Experiment Name: At_Drought_Soil_Dry_P Parameter: Plant Line Value: WS
  misc_feature: MA Experiment 20001557 PARAMETER Experiment Name: At_Drought_Soil_Dry_P Parameter: Post Timepoint (hr) Value: 3
  misc_feature: MA Experiment 20001557 PARAMETER Experiment Name: At_Drought_Soil_Dry_P Parameter: Post-Treatment Value: Re-Water vs. No Drought
  misc_feature: MA Experiment 20001557 PARAMETER Experiment Name: At_Drought_Soil_Dry_P Parameter: Timepoint (day) Value: 13
  misc_feature: MA Experiment 20001557 PARAMETER Experiment Name: At_Drought_Soil_Dry_P Parameter: Treatment Value: Drought vs. No Drought
  misc_feature: MA Experiment ID: 20001911 Result: Down-regulated in Transcription
  misc_feature: MA Experiment 20001911 PARAMETER Experiment Name: At_Drought_Reproduction_P Parameter: Age (day) Value: 40
  misc_feature: MA Experiment 20001911 PARAMETER Experiment Name: At_Drought_Reproduction_P Parameter: Organism Value: A. thaliana
  misc_feature: MA Experiment 20001911 PARAMETER Experiment Name: At_Drought_Reproduction_P Parameter: Plant Line Value: WS
  misc_feature: MA Experiment 20001911 PARAMETER Experiment Name: At_Drought_Reproduction_P Parameter: Timepoint (day) Value: 10
  misc_feature: MA Experiment 20001911 PARAMETER Experiment Name: At_Drought_Reproduction_P Parameter: Tissue Value: Flowers
  misc_feature: MA Experiment 20001911 PARAMETER Experiment Name: At_Drought_Reproduction_P Parameter: Treatment Value: Drought vs. No Drought

SEQ ID NO: 32447 - protein, 186 aa, Arabidopsis thaliana; identical to SEQ ID NO: 28857
  peptide (1)..(186): Ceres Seq. ID no. 13646076
  misc_feature (17)..(185): Pfam Name: Dirigent-like protein Pfam Description: Dirigent-like protein
  misc_feature (7)..(185): Homolog of NCBI NO: 30681257 NR Description: disease resistance response protein-related/
  misc_feature (1)..(185): Homolog of NCBI NO: 15238980 NR Description: disease resistance response protein-related
  misc_feature (1)..(185): Homolog of NCBI NO: 15218836 NR Description: disease resistance response protein-related/
  misc_feature (68)..(186): Homolog of NCBI NO: 15231315 NR Description: disease resistance response protein-related/
  misc_feature (29)..(186): Homolog of NCBI NO: 15217886 NR Description: disease resistance response protein-related/
  misc_feature (1)..(177): Homolog of NCBI NO: 15231318 NR Description: disease resistance response protein-related/
  misc_feature (1)..(186): Homolog of NCBI NO: 15239779 NR Description: disease resistance response protein-related/
  misc_feature (1)..(186): Homolog of NCBI NO: 22135914 NR Description: unknown protein [Arabidopsis thaliana]
  misc_feature (1)..(186): Homolog of NCBI NO: 15222673 NR Description: disease resistance response protein-related/
  misc_feature (1)..(186): Homolog of NCBI NO: 15231302 NR Description: disease resistance response protein-related/

SEQ ID NO: 32448 - protein, 108 aa, Arabidopsis thaliana; identical to SEQ ID NO: 28858
  peptide (1)..(108): Ceres Seq. ID no. 13646077

SEQ ID NO: 32449 - DNA, 2068 bp, Arabidopsis thaliana; identical to SEQ ID NO: 28859
  misc_feature (1)..(2068): Ceres Seq. ID no. 12397174
  misc_feature: MA Experiment ID: 108576 Result: Up-regulated in Transcription
  misc_feature: MA Experiment 108576 PARAMETER Experiment Name: At_42deg_Heat_cDNA_P Parameter: Temperature (deg C) Value: 42 vs. 22
  misc_feature: MA Experiment 108576 PARAMETER Experiment Name: At_42deg_Heat_cDNA_P Parameter: Timepoint (hr) Value: 1
  misc_feature: MA Experiment 108576 PARAMETER Experiment Name: At_42deg_Heat_cDNA_P Parameter: Tissue Value: Aerial
  misc_feature: MA Experiment ID: 20000093 Result: Up-regulated in Transcription
  misc_feature: MA Experiment 20000093 PARAMETER Experiment Name: At_42deg_Heat_cDNA_P Parameter: Temperature (deg C) Value: 42 vs. 22
  misc_feature: MA Experiment 20000093 PARAMETER Experiment Name: At_42deg_Heat_cDNA_P Parameter: Timepoint (hr) Value: 0.5
  misc_feature: MA Experiment 20000093 PARAMETER Experiment Name: At_42deg_Heat_cDNA_P Parameter: Tissue Value: Aerial
  misc_feature: MA Experiment ID: 20000111 Result: Up-regulated in Transcription
  misc_feature: MA Experiment 20000111 PARAMETER Experiment Name: At_42deg_Heat_cDNA_P Parameter: Temperature (deg C) Value: 42 vs. 22
  misc_feature: MA Experiment 20000111 PARAMETER Experiment Name: At_42deg_Heat_cDNA_P Parameter: Timepoint (hr) Value: 6
  misc_feature: MA Experiment 20000111 PARAMETER Experiment Name: At_42deg_Heat_cDNA_P Parameter: Tissue Value: Aerial
  misc_feature: MA Experiment ID: 20000112 Result: Up-regulated in Transcription
  misc_feature: MA Experiment 20000112 PARAMETER Experiment Name: At_42deg_Heat_cDNA_P Parameter: Temperature (deg C) Value: 42 vs. 22
  misc_feature: MA Experiment 20000112 PARAMETER Experiment Name: At_42deg_Heat_cDNA_P Parameter: Timepoint (hr) Value: 2
  misc_feature: MA Experiment 20000112 PARAMETER Experiment Name: At_42deg_Heat_cDNA_P Parameter: Tissue Value: Aerial
  misc_feature: MA Experiment ID: 20000113 Result: Up-regulated in Transcription
  misc_feature: MA Experiment 20000113 PARAMETER Experiment Name: At_42deg_Heat_cDNA_P Parameter: Temperature (deg C) Value: 42 vs. 22
  misc_feature: MA Experiment 20000113 PARAMETER Experiment Name: At_42deg_Heat_cDNA_P Parameter: Timepoint (hr) Value: 8
  misc_feature: MA Experiment 20000113 PARAMETER Experiment Name: At_42deg_Heat_cDNA_P Parameter: Tissue Value: Aerial
  misc_feature: MA Experiment ID: 20000144 Result: Up-regulated in Transcription
  misc_feature: MA Experiment 20000144 PARAMETER Experiment Name: At_42deg_Heat_cDNA_P Parameter: Temperature (deg C) Value: 42 vs. 22
  misc_feature: MA Experiment 20000144 PARAMETER Experiment Name: At_42deg_Heat_cDNA_P Parameter: Timepoint (hr) Value: 1
  misc_feature: MA Experiment 20000144 PARAMETER Experiment Name: At_42deg_Heat_cDNA_P Parameter: Tissue Value: Aerial
  misc_feature: MA Experiment ID: 20000171 Result: Up-regulated in Transcription
  misc_feature: MA Experiment 20000171 PARAMETER Experiment Name: At_42deg_Heat_P Parameter: Age (day) Value: 14
  misc_feature: MA Experiment 20000171 PARAMETER Experiment Name: At_42deg_Heat_P Parameter: Organism Value: A. thaliana
  misc_feature: MA Experiment 20000171 PARAMETER Experiment Name: At_42deg_Heat_P Parameter: Plant Line Value: WS
  misc_feature: MA Experiment 20000171 PARAMETER Experiment Name: At_42deg_Heat_P Parameter: Temperature (deg C) Value: 42 vs. 22
  misc_feature: MA Experiment 20000171 PARAMETER Experiment Name: At_42deg_Heat_P Parameter: Timepoint (hr) Value: 1
  misc_feature: MA Experiment 20000171 PARAMETER Experiment Name: At_42deg_Heat_P Parameter: Tissue Value: Aerial
  misc_feature: MA Experiment ID: 20000173 Result: Up-regulated in Transcription
  misc_feature: MA Experiment 20000173 PARAMETER Experiment Name: At_42deg_Heat_P Parameter: Age (day) Value: 14
  misc_feature: MA Experiment 20000173 PARAMETER Experiment Name: At_42deg_Heat_P Parameter: Organism Value: A. thaliana
  misc_feature: MA Experiment 20000173 PARAMETER Experiment Name: At_42deg_Heat_P Parameter: Plant Line Value: WS
  misc_feature: MA Experiment 20000173 PARAMETER Experiment Name: At_42deg_Heat_P Parameter: Temperature (deg C) Value: 42 vs. 22
  misc_feature: MA Experiment 20000173 PARAMETER Experiment Name: At_42deg_Heat_P Parameter: Timepoint (hr) Value: 6
  misc_feature: MA Experiment 20000173 PARAMETER Experiment Name: At_42deg_Heat_P Parameter: Tissue Value: Aerial
  misc_feature: MA Experiment ID: 20000234 Result: Up-regulated in Transcription
  misc_feature: MA Experiment 20000234 PARAMETER Experiment Name: At_Siliques_P Parameter: Age (day) Value: 21
  misc_feature: MA Experiment 20000234 PARAMETER Experiment Name: At_Siliques_P Parameter: Organism Value: A. thaliana
  misc_feature: MA Experiment 20000234 PARAMETER Experiment Name: At_Siliques_P Parameter: Plant Line Value: WS
  misc_feature: MA Experiment 20000234 PARAMETER Experiment Name: At_Siliques_P Parameter: Tissue Value: Less Than 5mm Siliques vs. Whole Plant
  misc_feature: MA Experiment ID: 20000235 Result: Up-regulated in Transcription
  misc_feature: MA Experiment 20000235 PARAMETER Experiment Name: At_Siliques_P Parameter: Age (day) Value: 21
  misc_feature: MA Experiment 20000235 PARAMETER Experiment Name: At_Siliques_P Parameter: Organism Value: A. thaliana
  misc_feature: MA Experiment 20000235 PARAMETER Experiment Name: At_Siliques_P Parameter: Plant Line Value: WS
  misc_feature: MA Experiment 20000235 PARAMETER Experiment Name: At_Siliques_P Parameter: Tissue Value: 5-10mm Siliques vs. Whole Plant
  misc_feature: MA Experiment ID: 20000264 Result: Up-regulated in Transcription
  misc_feature: MA Experiment 20000264 PARAMETER Experiment Name: At_Open_Flower_P Parameter: Age (day) Value: 21
  misc_feature: MA Experiment 20000264 PARAMETER Experiment Name: At_Open_Flower_P Parameter: Plant Line Value: WS
  misc_feature: MA Experiment 20000264 PARAMETER Experiment Name: At_Open_Flower_P Parameter: Tissue Value: Open Flower vs. Whole Plant
  misc_feature: MA Experiment ID: 20000265 Result: Up-regulated in Transcription
  misc_feature: MA Experiment 20000265 PARAMETER Experiment Name: At_Open_Flower_P Parameter: Age (day) Value: 21
  misc_feature: MA Experiment 20000265 PARAMETER Experiment Name: At_Open_Flower_P Parameter: Plant Line Value: WS
  misc_feature: MA Experiment 20000265 PARAMETER Experiment Name: At_Open_Flower_P Parameter: Tissue Value: Closed Flower vs. Whole Plant
  misc_feature: MA Experiment ID: 20000286 Result: Up-regulated in Transcription
  misc_feature: MA Experiment 20000286 PARAMETER Experiment Name: At_Open_Flower_P Parameter: Age (day) Value: 21
  misc_feature: MA Experiment 20000286 PARAMETER Experiment Name: At_Open_Flower_P Parameter: Plant Line Value: WS
  misc_feature: MA Experiment 20000286 PARAMETER Experiment Name: At_Open_Flower_P Parameter: Tissue Value: Half Open vs. Whole Plant
  misc_feature: MA Experiment ID: 20000794 Result: Up-regulated in Transcription
  misc_feature: MA Experiment 20000794 PARAMETER Experiment Name: At_Petals_P Parameter: Age (day) Value: 23-25 days
  misc_feature: MA Experiment 20000794 PARAMETER Experiment Name: At_Petals_P Parameter: Plant Line Value: WS
  misc_feature: MA Experiment 20000794 PARAMETER Experiment Name: At_Petals_P Parameter: Tissue Value: Petals vs. Whole plant
  misc_feature: MA Experiment ID: 20001557 Result: Up-regulated in Transcription
  misc_feature: MA Experiment 20001557 PARAMETER Experiment Name: At_Drought_Soil_Dry_P Parameter: Age (day) Value: 27
  misc_feature: MA Experiment 20001557 PARAMETER Experiment Name: At_Drought_Soil_Dry_P Parameter: Organism Value: A. thaliana
  misc_feature: MA Experiment 20001557 PARAMETER Experiment Name: At_Drought_Soil_Dry_P Parameter: Plant Line Value: WS
  misc_feature: MA Experiment 20001557 PARAMETER Experiment Name: At_Drought_Soil_Dry_P Parameter: Post Timepoint (hr) Value: 3
  misc_feature: MA Experiment 20001557 PARAMETER Experiment Name: At_Drought_Soil_Dry_P Parameter: Post-Treatment Value: Re-Water vs. No Drought
  misc_feature: MA Experiment 20001557 PARAMETER Experiment Name: At_Drought_Soil_Dry_P Parameter: Timepoint (day) Value: 13
  misc_feature: MA Experiment 20001557 PARAMETER Experiment Name: At_Drought_Soil_Dry_P Parameter: Treatment Value: Drought vs. No Drought

SEQ ID NO: 32450 - protein, 603 aa, Arabidopsis thaliana; identical to SEQ ID NO: 28860
  peptide (1)..(603): Ceres Seq. ID no. 12397175
  misc_feature (421)..(465): Pfam Name: Myb-like DNA-binding domain Pfam Description: Myb-like DNA-binding domain
  misc_feature (49)..(211): Homolog of NCBI NO: 13646986 NR Description: DNA-binding protein DF1 [Pisum sativum]
  misc_feature (331)..(551): Homolog of NCBI NO: 13646986 NR Description: DNA-binding protein DF1 [Pisum sativum]
  misc_feature (21)..(537): Homolog of NCBI NO: 27476085 NR Description: Hypothetical protein [Oryza sativa (japonica

SEQ ID NO: 32451 - protein, 602 aa, Arabidopsis thaliana; identical to SEQ ID NO: 28861
  peptide (1)..(602): Ceres Seq. ID no. 12397176
  misc_feature (420)..(464): Pfam Name: Myb-like DNA-binding domain Pfam Description: Myb-like DNA-binding domain
  misc_feature (48)..(210): Homolog of NCBI NO: 13646986 NR Description: DNA-binding protein DF1 [Pisum sativum]
  misc_feature (330)..(550): Homolog of NCBI NO: 13646986 NR Description: DNA-binding protein DF1 [Pisum sativum]
  misc_feature (20)..(536): Homolog of NCBI NO: 27476085 NR Description: Hypothetical protein [Oryza sativa (japonica

SEQ ID NO: 32452 - protein, 552 aa, Arabidopsis thaliana; identical to SEQ ID NO: 28862
  peptide (1)..(552): Ceres Seq. ID no. 12397177
  misc_feature (370)..(414): Pfam Name: Myb-like DNA-binding domain Pfam Description: Myb-like DNA-binding domain
  misc_feature (1)..(160): Homolog of NCBI NO: 13646986 NR Description: DNA-binding protein DF1 [Pisum sativum]
  misc_feature (280)..(500): Homolog of NCBI NO: 13646986 NR Description: DNA-binding protein DF1 [Pisum sativum]
  misc_feature (1)..(486): Homolog of NCBI NO: 27476085 NR Description: Hypothetical protein [Oryza sativa (japonica

SEQ ID NO: 32453 - DNA, 845 bp, Arabidopsis thaliana; identical to SEQ ID NO: 28863
  misc_feature (1)..(845): Ceres Seq. ID no. 12332612
  misc_feature: MA Experiment ID: 108434 Result: Up-regulated in Transcription
  misc_feature: MA Experiment 108434 PARAMETER Experiment Name: At_Root_Tips_cDNA_P Parameter: Tissue Value: Root Tips
  misc_feature: MA Experiment ID: 108462 Result: Down-regulated in Transcription
  misc_feature: MA Experiment 108462 PARAMETER Experiment Name: At_Germinating_Seeds_cDNA_P Parameter: Age (day) Value: 2 vs. 0
  misc_feature: MA Experiment 108462 PARAMETER Experiment Name: At_Germinating_Seeds_cDNA_P Parameter: Tissue Value: Germinating Seeds
  misc_feature: MA Experiment ID: 108463 Result: Down-regulated in Transcription
  misc_feature: MA Experiment 108463 PARAMETER Experiment Name: At_Germinating_Seeds_cDNA_P Parameter: Age (day) Value: 3 vs. 0
  misc_feature: MA Experiment 108463 PARAMETER Experiment Name: At_Germinating_Seeds_cDNA_P Parameter: Tissue Value: Germinating Seeds
  misc_feature: MA Experiment ID: 108464 Result: Down-regulated in Transcription
  misc_feature: MA Experiment 108464 PARAMETER Experiment Name: At_Germinating_Seeds_cDNA_P Parameter: Age (day) Value: 4 vs. 0
  misc_feature: MA Experiment 108464 PARAMETER Experiment Name: At_Germinating_Seeds_cDNA_P Parameter: Tissue Value: Germinating Seeds
  misc_feature: MA Experiment ID: 108488 Result: Up-regulated in Transcription
  misc_feature: MA Experiment ID: 108561 Result: Down-regulated in Transcription
  misc_feature: MA Experiment 108561 PARAMETER Experiment Name: At_100uM_ABA_cDNA_P Parameter: Timepoint (hr) Value: 6
  misc_feature: MA Experiment 108561 PARAMETER Experiment Name: At_100uM_ABA_cDNA_P Parameter: Tissue Value: Aerial
  misc_feature: MA Experiment 108561 PARAMETER Experiment Name: At_100uM_ABA_cDNA_P Parameter: Treatment Value: 100uM ABA vs. No Treatment
  misc_feature: MA Experiment ID: 108573 Result: Down-regulated in Transcription
  misc_feature: MA Experiment 108573 PARAMETER Experiment Name: At_Drought_cDNA_P Parameter: Timepoint (hr) Value: 6
  misc_feature: MA Experiment 108573 PARAMETER Experiment Name: At_Drought_cDNA_P Parameter: Tissue Value: Aerial
  misc_feature: MA Experiment 108573 PARAMETER Experiment Name: At_Drought_cDNA_P Parameter: Treatment Value: Drought vs. No Drought
  misc_feature: MA Experiment ID: 20000227 Result: Up-regulated in Transcription
  misc_feature: MA Experiment 20000227 PARAMETER Experiment Name: At_Root-Tips-vs-Tops_P Parameter: Tissue Value: Root Tips vs. Root Tops
  misc_feature: MA Experiment ID: 20000234 Result: Up-regulated in Transcription
  misc_feature: MA Experiment 20000234 PARAMETER Experiment Name: At_Siliques_P Parameter: Age (day) Value: 21
  misc_feature: MA Experiment 20000234 PARAMETER Experiment Name: At_Siliques_P Parameter: Organism Value: A. thaliana
  misc_feature: MA Experiment 20000234 PARAMETER Experiment Name: At_Siliques_P Parameter: Plant Line Value: WS
  misc_feature: MA Experiment 20000234 PARAMETER Experiment Name: At_Siliques_P Parameter: Tissue Value: Less Than 5mm Siliques vs. Whole Plant
  misc_feature: MA Experiment ID: 20000437 Result: Down-regulated in Transcription
  misc_feature: MA Experiment 20000437 PARAMETER Experiment Name: At_Drought_P Parameter: Age (day) Value: 8
  misc_feature: MA Experiment 20000437 PARAMETER Experiment Name: At_Drought_P Parameter: Organism Value: A. thaliana
  misc_feature: MA Experiment 20000437 PARAMETER Experiment Name: At_Drought_P Parameter: Plant Line Value: WS
  misc_feature: MA Experiment 20000437 PARAMETER Experiment Name: At_Drought_P Parameter: Timepoint (hr) Value: 24
  misc_feature: MA Experiment 20000437 PARAMETER Experiment Name: At_Drought_P Parameter: Tissue Value: Whole Plant
  misc_feature: MA Experiment 20000437 PARAMETER Experiment Name: At_Drought_P Parameter: Treatment Value: Drought vs. No Drought
  misc_feature: MA Experiment ID: 20001557 Result: Up-regulated in Transcription
  misc_feature: MA Experiment 20001557 PARAMETER Experiment Name: At_Drought_Soil_Dry_P Parameter: Age (day) Value: 27
  misc_feature: MA Experiment 20001557 PARAMETER Experiment Name: At_Drought_Soil_Dry_P Parameter: Organism Value: A. thaliana
  misc_feature: MA Experiment 20001557 PARAMETER Experiment Name: At_Drought_Soil_Dry_P Parameter: Plant Line Value: WS
  misc_feature: MA Experiment 20001557 PARAMETER Experiment Name: At_Drought_Soil_Dry_P Parameter: Post Timepoint (hr) Value: 3
  misc_feature: MA Experiment 20001557 PARAMETER Experiment Name: At_Drought_Soil_Dry_P Parameter: Post-Treatment Value: Re-Water vs. No Drought
  misc_feature: MA Experiment 20001557 PARAMETER Experiment Name: At_Drought_Soil_Dry_P Parameter: Timepoint (day) Value: 13
  misc_feature: MA Experiment 20001557 PARAMETER Experiment Name: At_Drought_Soil_Dry_P Parameter: Treatment Value: Drought vs. No Drought
  misc_feature: MA Experiment ID: 20001558 Result: Up-regulated in Transcription
  misc_feature: MA Experiment 20001558 PARAMETER Experiment Name: At_Drought_Soil_Dry_P Parameter: Age (day) Value: 27
  misc_feature: MA Experiment 20001558 PARAMETER Experiment Name: At_Drought_Soil_Dry_P Parameter: Organism Value: A. thaliana
  misc_feature: MA Experiment 20001558 PARAMETER Experiment Name: At_Drought_Soil_Dry_P Parameter: Plant Line Value: WS
  misc_feature: MA Experiment 20001558 PARAMETER Experiment Name: At_Drought_Soil_Dry_P Parameter: Post Timepoint (hr) Value: 6
  misc_feature: MA Experiment 20001558 PARAMETER Experiment Name: At_Drought_Soil_Dry_P Parameter: Post-Treatment Value: Re-Water vs. No Drought
  misc_feature: MA Experiment 20001558 PARAMETER Experiment Name: At_Drought_Soil_Dry_P Parameter: Timepoint (day) Value: 13
  misc_feature: MA Experiment 20001558 PARAMETER Experiment Name: At_Drought_Soil_Dry_P Parameter: Treatment Value: Drought vs. No Drought
  misc_feature: MA Experiment ID: 20001560 Result: Up-regulated in Transcription
  misc_feature: MA Experiment 20001560 PARAMETER Experiment Name: At_Drought_Soil_Dry_P Parameter: Age (day) Value: 28
  misc_feature: MA Experiment 20001560 PARAMETER Experiment Name: At_Drought_Soil_Dry_P Parameter: Organism Value: A. thaliana
  misc_feature: MA Experiment 20001560 PARAMETER Experiment Name: At_Drought_Soil_Dry_P Parameter: Plant Line Value: WS
  misc_feature: MA Experiment 20001560 PARAMETER Experiment Name: At_Drought_Soil_Dry_P Parameter: Post Timepoint (hr) Value: None
  misc_feature: MA Experiment 20001560 PARAMETER Experiment Name: At_Drought_Soil_Dry_P Parameter: Post-Treatment Value: None
  misc_feature: MA Experiment 20001560 PARAMETER Experiment Name: At_Drought_Soil_Dry_P Parameter: Timepoint (day) Value: 14
  misc_feature: MA Experiment 20001560 PARAMETER Experiment Name: At_Drought_Soil_Dry_P Parameter: Treatment Value: Drought vs. No Drought
  misc_feature: MA Experiment ID: 20001757 Result: Up-regulated in Transcription
  misc_feature: MA Experiment 20001757 PARAMETER Experiment Name: At_50mM_NH4NO3_L-to-H_P Parameter: Timepoint (hr) Value: 6
  misc_feature: MA Experiment 20001757 PARAMETER Experiment Name: At_50mM_NH4NO3_L-to-H_P Parameter: Tissue Value: Leaf
  misc_feature: MA Experiment 20001757 PARAMETER Experiment Name: At_50mM_NH4NO3_L-to-H_P Parameter: Treatment Value: 50mM NH4NO3 vs 100mM Mannitol

SEQ ID NO: 32454 - protein, 206 aa, Arabidopsis thaliana [sequence omitted]

SEQ ID NO: 32455 - protein, 141 aa, Arabidopsis thaliana; identical to SEQ ID NO: 25776
  peptide (1)..(141): Ceres Seq. ID no. 12332614
  misc_feature (1)..(118): Pfam Name: Ribosomal protein L13e Pfam Description: Ribosomal protein L13e
  misc_feature (1)..(141): Homolog of NCBI NO: 12580867 NR Description: 60S ribosomal protein L13E [Picea abies]
  misc_feature (1)..(141): Homolog of NCBI NO: 18873677 NR Description: putative cold-induced protein
  misc_feature (1)..(141): Homolog of NCBI NO: 34897952 NR Description: ESTs AU077873(S1878),D40121(S1878) correspond to region of the predicted gene.~Similar to Arabidopsis thaliana 60S
  misc_feature (1)..(141): Homolog of NCBI NO: 15237847 NR Description: 60S ribosomal protein L13
  misc_feature (1)..(141): Homolog of NCBI NO: 7441102 NR Description: ribosomal protein L13.A, cytosolic - rape
  misc_feature (1)..(141): Homolog of NCBI NO: 7441103 NR Description: ribosomal protein L13.B, cytosolic - rape
  misc_feature (1)..(141): Homolog of NCBI NO: 730450 NR Description: 60S RIBOSOMAL PROTEIN L13-2 (COLD INDUCED PROTEIN
  misc_feature (1)..(141): Homolog of NCBI NO: 730449 NR Description: 60S RIBOSOMAL PROTEIN L13-1 (COLD INDUCED PROTEIN
  misc_feature (1)..(141): Homolog of NCBI NO: 21537149 NR Description: 60S ribosomal protein L13, BBC1 protein
  misc_feature (1)..(141): Homolog of NCBI NO: 15229064 NR Description: 60S ribosomal protein L13, BBC1 protein

SEQ ID NO: 32456 - DNA, 1480 bp, Arabidopsis thaliana; identical to SEQ ID NO: 28866
  misc_feature (1)..(1480): Ceres Seq. ID no. 12385338
  misc_feature: MA Experiment ID: 108463 Result: Down-regulated in Transcription
  misc_feature: MA Experiment 108463 PARAMETER Experiment Name: At_Germinating_Seeds_cDNA_P Parameter: Age (day) Value: 3 vs. 0
  misc_feature: MA Experiment 108463 PARAMETER Experiment Name: At_Germinating_Seeds_cDNA_P Parameter: Tissue Value: Germinating Seeds
  misc_feature: MA Experiment ID: 108464 Result: Down-regulated in Transcription
  misc_feature: MA Experiment 108464 PARAMETER Experiment Name: At_Germinating_Seeds_cDNA_P Parameter: Age (day) Value: 4 vs. 0
  misc_feature: MA Experiment 108464 PARAMETER Experiment Name: At_Germinating_Seeds_cDNA_P Parameter: Tissue Value: Germinating Seeds
  misc_feature: MA Experiment ID: 108595 Result: Down-regulated in Transcription
  misc_feature: MA Experiment 108595 PARAMETER Experiment Name: At_Ler-pi_Ovule_cDNA_P Parameter: Plant Line Value: null
  misc_feature: MA Experiment ID: 20000088 Result: Up-regulated in Transcription
  misc_feature: MA Experiment 20000088 PARAMETER Experiment Name: At_100uM_ABA_Mutants_cDNA_P Parameter: Plant Line Value: Landsberg
  misc_feature: MA Experiment 20000088 PARAMETER Experiment Name: At_100uM_ABA_Mutants_cDNA_P Parameter: Timepoint (hr) Value: 6
  misc_feature: MA Experiment 20000088 PARAMETER Experiment Name: At_100uM_ABA_Mutants_cDNA_P Parameter: Tissue Value: Aerial
  misc_feature: MA Experiment 20000088 PARAMETER Experiment Name: At_100uM_ABA_Mutants_cDNA_P Parameter: Treatment Value: 100uM ABA vs. No Treatment
  misc_feature: MA Experiment ID: 20000111 Result: Down-regulated in Transcription
  misc_feature: MA Experiment 20000111 PARAMETER Experiment Name: At_42deg_Heat_cDNA_P Parameter: Temperature (deg C) Value: 42 vs. 22
  misc_feature: MA Experiment 20000111 PARAMETER Experiment Name: At_42deg_Heat_cDNA_P Parameter: Timepoint (hr) Value: 6
  misc_feature: MA Experiment 20000111 PARAMETER Experiment Name: At_42deg_Heat_cDNA_P Parameter: Tissue Value: Aerial
  misc_feature: MA Experiment ID: 20000113 Result: Down-regulated in Transcription
  misc_feature: MA Experiment 20000113 PARAMETER Experiment Name: At_42deg_Heat_cDNA_P Parameter: Temperature (deg C) Value: 42 vs. 22
  misc_feature: MA Experiment 20000113 PARAMETER Experiment Name: At_42deg_Heat_cDNA_P Parameter: Timepoint (hr) Value: 8
  misc_feature: MA Experiment 20000113 PARAMETER Experiment Name: At_42deg_Heat_cDNA_P Parameter: Tissue Value: Aerial
  misc_feature: MA Experiment ID: 20000117 Result: Up-regulated in Transcription
  misc_feature: MA Experiment 20000117 PARAMETER Experiment Name: At_100uM_ABA_Mutants_cDNA_P Parameter: Plant Line Value: Columbia
  misc_feature: MA Experiment 20000117 PARAMETER Experiment Name: At_100uM_ABA_Mutants_cDNA_P Parameter: Timepoint (hr) Value: 6
  misc_feature: MA Experiment 20000117 PARAMETER Experiment Name: At_100uM_ABA_Mutants_cDNA_P Parameter: Tissue Value: Aerial
  misc_feature: MA Experiment 20000117 PARAMETER Experiment Name: At_100uM_ABA_Mutants_cDNA_P Parameter: Treatment Value: 100uM ABA vs. No Treatment
  misc_feature: MA Experiment ID: 20000173 Result: Down-regulated in Transcription
  misc_feature: MA Experiment 20000173 PARAMETER Experiment Name: At_42deg_Heat_P Parameter: Age (day) Value: 14
  misc_feature: MA Experiment 20000173 PARAMETER Experiment Name: At_42deg_Heat_P Parameter: Organism Value: A. thaliana
  misc_feature: MA Experiment 20000173 PARAMETER Experiment Name: At_42deg_Heat_P Parameter: Plant Line Value: WS
  misc_feature: MA Experiment 20000173 PARAMETER Experiment Name: At_42deg_Heat_P Parameter: Temperature (deg C) Value: 42 vs. 22
  misc_feature: MA Experiment 20000173 PARAMETER Experiment Name: At_42deg_Heat_P Parameter: Timepoint (hr) Value: 6
  misc_feature: MA Experiment 20000173 PARAMETER Experiment Name: At_42deg_Heat_P Parameter: Tissue Value: Aerial
  misc_feature: MA Experiment ID: 20000439 Result: Up-regulated in Transcription
  misc_feature: MA Experiment 20000439 PARAMETER Experiment Name: At_Roots__P Parameter: Age (day) Value: 14 vs. 21
  misc_feature: MA Experiment 20000439 PARAMETER Experiment Name: At_Roots__P Parameter: Organism Value: A. thaliana
  misc_feature: MA Experiment 20000439 PARAMETER Experiment Name: At_Roots__P Parameter: Tissue Value: Roots vs. Whole Plant

SEQ ID NO: 32457 - protein, 397 aa, Arabidopsis thaliana; identical to SEQ ID NO: 28867
  peptide (1)..(397): Ceres Seq. ID no. 12385339
  misc_feature (69)..(392): Pfam Name: Isocitrate/isopropylmalate dehydrogenase Pfam Description: Isocitrate/isopropylmalate dehydrogenase
  misc_feature (31)..(397): Homolog of NCBI NO: 15237075 NR Description: NAD+ dependent isocitrate dehydrogenase -like
  misc_feature (31)..(397): Homolog of NCBI NO: 3790188 NR Description: NAD-dependent isocitrate dehydrogenase [Nicotiana
  misc_feature (31)..(397): Homolog of NCBI NO: 1766048 NR Description: NAD+ dependent isocitrate dehydrogenase subunit 2
  misc_feature (31)..(397): Homolog of NCBI NO: 15227370 NR Description: putative NAD+ dependent isocitrate dehydrogenase
  misc_feature (31)..(397): Homolog of NCBI NO: 28974504 NR Description: NAD-dependent isocitrate dehydrogenase gamma
  misc_feature (31)..(397): Homolog of NCBI NO: 28974498 NR Description: NAD-dependent isocitrate dehydrogenase beta
  misc_feature (31)..(397): Homolog of NCBI NO: 28974502 NR Description: NAD-dependent isocitrate dehydrogenase beta
  misc_feature (31)..(397): Homolog of NCBI NO: 1766046 NR Description: NAD+ dependent isocitrate dehydrogenase subunit 1
  misc_feature (31)..(397): Homolog of NCBI NO: 21537157 NR Description: NAD+ dependent isocitrate dehydrogenase subunit 1
  misc_feature (31)..(397): Homolog of NCBI NO: 15236932 NR Description: NAD+ dependent isocitrate dehydrogenase subunit 1

SEQ ID NO: 32458 - protein, 367 aa, Arabidopsis thaliana; identical to SEQ ID NO: 28868
  peptide (1)..(367): Ceres Seq. ID no. 12385340
  misc_feature (39)..(362): Pfam Name: Isocitrate/isopropylmalate dehydrogenase Pfam Description: Isocitrate/isopropylmalate dehydrogenase
  misc_feature (1)..(367): Homolog of NCBI NO: 15237075 NR Description: NAD+ dependent isocitrate dehydrogenase -like
  misc_feature (1)..(367): Homolog of NCBI NO: 3790188 NR Description: NAD-dependent isocitrate dehydrogenase [Nicotiana
  misc_feature (1)..(367): Homolog of NCBI NO: 1766048 NR Description: NAD+ dependent isocitrate dehydrogenase subunit 2
  misc_feature (1)..(367): Homolog of NCBI NO: 15227370 NR Description: putative NAD+ dependent isocitrate dehydrogenase
  misc_feature (1)..(367): Homolog of NCBI NO: 28974504 NR Description: NAD-dependent isocitrate dehydrogenase gamma
  misc_feature (1)..(367): Homolog of NCBI NO: 28974498 NR Description: NAD-dependent isocitrate dehydrogenase beta
  misc_feature (1)..(367): Homolog of NCBI NO: 28974502 NR Description: NAD-dependent isocitrate dehydrogenase beta
  misc_feature (1)..(367): Homolog of NCBI NO: 1766046 NR Description: NAD+ dependent isocitrate dehydrogenase subunit 1
  misc_feature (1)..(367): Homolog of NCBI NO: 21537157 NR Description: NAD+ dependent isocitrate dehydrogenase subunit 1
  misc_feature (1)..(367): Homolog of NCBI NO: 15236932 NR Description: NAD+ dependent isocitrate dehydrogenase subunit 1

SEQ ID NO: 32459 - protein, 339 aa, Arabidopsis thaliana; identical to SEQ ID NO: 28869
  peptide (1)..(339): Ceres Seq. ID no. 12385341
  misc_feature (11)..(334): Pfam Name: Isocitrate/isopropylmalate dehydrogenase Pfam Description: Isocitrate/isopropylmalate dehydrogenase
  misc_feature (1)..(339): Homolog of NCBI NO: 15237075 NR Description: NAD+ dependent isocitrate dehydrogenase -like
  misc_feature (1)..(339): Homolog of NCBI NO: 3790188 NR Description: NAD-dependent isocitrate dehydrogenase [Nicotiana
  misc_feature (1)..(339): Homolog of NCBI NO: 1766048 NR Description: NAD+ dependent isocitrate dehydrogenase subunit 2
  misc_feature (1)..(339): Homolog of NCBI NO: 15227370 NR Description: putative NAD+ dependent isocitrate dehydrogenase
  misc_feature (1)..(339): Homolog of NCBI NO: 28974504 NR Description: NAD-dependent isocitrate dehydrogenase gamma
  misc_feature (1)..(339): Homolog of NCBI NO: 28974498 NR Description: NAD-dependent isocitrate dehydrogenase beta
  misc_feature (1)..(339): Homolog of NCBI NO: 28974502 NR Description: NAD-dependent isocitrate dehydrogenase beta
  misc_feature (1)..(339): Homolog of NCBI NO: 1766046 NR Description: NAD+ dependent isocitrate dehydrogenase subunit 1
  misc_feature (1)..(339): Homolog of NCBI NO: 21537157 NR Description: NAD+ dependent isocitrate dehydrogenase subunit 1
  misc_feature (1)..(339): Homolog of NCBI NO: 15236932 NR Description: NAD+ dependent isocitrate dehydrogenase subunit 1

SEQ ID NO: 32460 - DNA, 1454 bp, Arabidopsis thaliana; identical to SEQ ID NO: 28870
  misc_feature (1)..(1454): Ceres Seq. ID no. 12393086
  misc_feature: MA Experiment ID: 108595 Result: Down-regulated in Transcription
  misc_feature: MA Experiment 108595 PARAMETER Experiment Name: At_Ler-pi_Ovule_cDNA_P Parameter: Plant Line Value: null
  misc_feature: MA Experiment ID: 20000180 Result: Down-regulated in Transcription
  misc_feature: MA Experiment 20000180 PARAMETER Experiment Name: At_Germinating_Seeds_P Parameter: Age (hr) Value: 24 vs. 0
  misc_feature: MA Experiment 20000180 PARAMETER Experiment Name: At_Germinating_Seeds_P Parameter: Tissue Value: Germinating Seeds
  misc_feature: MA Experiment ID: 20001557 Result: Up-regulated in Transcription
  misc_feature: MA Experiment 20001557 PARAMETER Experiment Name: At_Drought_Soil_Dry_P Parameter: Age (day) Value: 27
  misc_feature: MA Experiment 20001557 PARAMETER Experiment Name: At_Drought_Soil_Dry_P Parameter: Organism Value: A. thaliana
  misc_feature: MA Experiment 20001557 PARAMETER Experiment Name: At_Drought_Soil_Dry_P Parameter: Plant Line Value: WS
  misc_feature: MA Experiment 20001557 PARAMETER Experiment Name: At_Drought_Soil_Dry_P Parameter: Post Timepoint (hr) Value: 3
  misc_feature: MA Experiment 20001557 PARAMETER Experiment Name: At_Drought_Soil_Dry_P Parameter: Post-Treatment Value: Re-Water vs. No Drought
  misc_feature: MA Experiment 20001557 PARAMETER Experiment Name: At_Drought_Soil_Dry_P Parameter: Timepoint (day) Value: 13
  misc_feature: MA Experiment 20001557 PARAMETER Experiment Name: At_Drought_Soil_Dry_P Parameter: Treatment Value: Drought vs. No Drought

SEQ ID NO: 32461 - protein, 411 aa, Arabidopsis thaliana; identical to SEQ ID NO: 28871
  peptide (1)..(411): Ceres Seq. ID no. 12393087
  misc_feature (128)..(402): Homolog of NCBI NO: 30315255 NR Description: hydrogenosomal carrier protein [Trichomonas
  misc_feature (101)..(404): Homolog of NCBI NO: 34877651 NR Description: similar to CG4241-PA [Rattus norvegicus]
  misc_feature (128)..(402): Homolog of NCBI NO: 6746567 NR Description: hydrogenosomal membrane protein 31 precursor
  misc_feature (131)..(221): Homolog of NCBI NO: 21537282 NR Description: mitochondrial carrier protein, putative
  misc_feature (131)..(221): Homolog of NCBI NO: 15231083 NR Description: mitochondrial carrier protein family
  misc_feature (228)..(408): Homolog of NCBI NO: 21537282 NR Description: mitochondrial carrier protein, putative
  misc_feature (228)..(408): Homolog of NCBI NO: 15231083 NR Description: mitochondrial carrier protein family
  misc_feature (98)..(410): Homolog of NCBI NO: 231654 NR Description: Brittle-1 protein, chloroplast precursor
  misc_feature (58)..(410): Homolog of NCBI NO: 4138581 NR Description: mitochondrial energy transfer protein [Solanum
  misc_feature (20)..(411): Homolog of NCBI NO: 15236783 NR Description: mitochondrial carrier protein family

SEQ ID NO: 32462 - protein, 392 aa, Arabidopsis thaliana; identical to SEQ ID NO: 28872
  peptide (1)..(392): Ceres Seq. ID no. 12393088
  misc_feature (109)..(383): Homolog of NCBI NO: 30315255 NR Description: hydrogenosomal carrier protein [Trichomonas
  misc_feature (82)..(385): Homolog of NCBI NO: 34877651 NR Description: similar to CG4241-PA [Rattus norvegicus]
  misc_feature (109)..(383): Homolog of NCBI NO: 6746567 NR Description: hydrogenosomal membrane protein 31 precursor
  misc_feature (112)..(202): Homolog of NCBI NO: 21537282 NR Description: mitochondrial carrier protein, putative
  misc_feature (112)..(202): Homolog of NCBI NO: 15231083 NR Description: mitochondrial carrier protein family
  misc_feature (209)..(389): Homolog of NCBI NO: 21537282 NR Description: mitochondrial carrier protein, putative
  misc_feature (209)..(389): Homolog of NCBI NO: 15231083 NR Description: mitochondrial carrier protein family
  misc_feature (79)..(391): Homolog of NCBI NO: 231654 NR Description: Brittle-1 protein, chloroplast precursor
  misc_feature (39)..(391): Homolog of NCBI NO: 4138581 NR Description: mitochondrial energy transfer protein [Solanum
  misc_feature (1)..(392): Homolog of NCBI NO: 15236783 NR Description: mitochondrial carrier protein family

SEQ ID NO: 32463 - protein, 316 aa, Arabidopsis thaliana; identical to SEQ ID NO: 28873
  peptide (1)..(316): Ceres Seq. ID no. 12393089
  misc_feature (33)..(307): Homolog of NCBI NO: 30315255 NR Description: hydrogenosomal carrier protein [Trichomonas
  misc_feature (6)..(309): Homolog of NCBI NO: 34877651 NR Description: similar to CG4241-PA [Rattus norvegicus]
  misc_feature (33)..(307): Homolog of NCBI NO: 6746567 NR Description: hydrogenosomal membrane protein 31 precursor
  misc_feature (36)..(126): Homolog of NCBI NO: 21537282 NR Description: mitochondrial carrier protein, putative
  misc_feature (36)..(126): Homolog of NCBI NO: 15231083 NR Description: mitochondrial carrier protein family
  misc_feature (133)..(313): Homolog of NCBI NO: 21537282 NR Description: mitochondrial carrier protein, putative
  misc_feature (133)..(313): Homolog of NCBI NO: 15231083 NR Description: mitochondrial carrier protein family
  misc_feature (3)..(315): Homolog of NCBI NO: 231654 NR Description: Brittle-1 protein, chloroplast precursor
  misc_feature (1)..(315): Homolog of NCBI NO: 4138581 NR Description: mitochondrial energy transfer protein [Solanum
  misc_feature (1)..(316): Homolog of NCBI NO: 15236783 NR Description: mitochondrial carrier protein family

SEQ ID NO: 32464 - DNA, 1411 bp, Arabidopsis thaliana; identical to SEQ ID NO: 28874
  misc_feature (1)..(1411): Ceres Seq. ID no. 12321215
  misc_feature: MA Experiment ID: 20000436 Result: Up-regulated in Transcription
  misc_feature: MA Experiment 20000436 PARAMETER Experiment Name: At_Drought_P Parameter: Age (day) Value: 7
  misc_feature: MA Experiment 20000436 PARAMETER Experiment Name: At_Drought_P Parameter: Organism Value: A. thaliana
  misc_feature: MA Experiment 20000436 PARAMETER Experiment Name: At_Drought_P Parameter: Plant Line Value: WS
  misc_feature: MA Experiment 20000436 PARAMETER Experiment Name: At_Drought_P Parameter: Timepoint (hr) Value: 12
  misc_feature: MA Experiment 20000436 PARAMETER Experiment Name: At_Drought_P Parameter: Tissue Value: Whole Plant
  misc_feature: MA Experiment 20000436 PARAMETER Experiment Name: At_Drought_P Parameter: Treatment Value: Drought vs. No Drought
  misc_feature: MA Experiment ID: 20000439 Result: Down-regulated in Transcription
  misc_feature: MA Experiment 20000439 PARAMETER Experiment Name: At_Roots__P Parameter: Age (day) Value: 14 vs. 21
  misc_feature: MA Experiment 20000439 PARAMETER Experiment Name: At_Roots__P Parameter: Organism Value: A. thaliana
  misc_feature: MA Experiment 20000439 PARAMETER Experiment Name: At_Roots__P Parameter: Tissue Value: Roots vs. Whole Plant
  misc_feature: MA Experiment ID: 20000495 Result: Up-regulated in Transcription
  misc_feature: MA Experiment 20000495 PARAMETER Experiment Name: At_Guard_Cells_P Parameter: Harvest Date Value: 8/2/2002
  misc_feature: MA Experiment 20000495 PARAMETER Experiment Name: At_Guard_Cells_P Parameter: Organism Value: A. thaliana
  misc_feature: MA Experiment 20000495 PARAMETER Experiment Name: At_Guard_Cells_P Parameter: Tissue Value: Guard Cells vs. Leaves
  misc_feature: MA Experiment ID: 20000574 Result: Down-regulated in Transcription
  misc_feature: MA Experiment 20000574 PARAMETER Experiment Name: At_100uM_ABA_Mutants__P Parameter: Organism Value: A. thaliana
  misc_feature: MA Experiment 20000574 PARAMETER Experiment Name: At_100uM_ABA_Mutants__P Parameter: Plant Line Value: CS23 vs. Ler wt
  misc_feature: MA Experiment 20000574 PARAMETER Experiment Name: At_100uM_ABA_Mutants__P Parameter: Timepoint (hr) Value: N/A
  misc_feature: MA Experiment 20000574 PARAMETER Experiment Name: At_100uM_ABA_Mutants__P Parameter: Tissue Value: Whole Plant
  misc_feature: MA Experiment 20000574 PARAMETER Experiment Name: At_100uM_ABA_Mutants__P Parameter: Treatment Value: None
  misc_feature: MA Experiment ID: 20001554 Result: Up-regulated in Transcription
  misc_feature: MA Experiment 20001554 PARAMETER Experiment Name: At_Drought_Soil_Dry_P Parameter: Age (day) Value: 21
  misc_feature: MA Experiment 20001554 PARAMETER Experiment Name: At_Drought_Soil_Dry_P Parameter: Organism Value: A. thaliana
  misc_feature: MA Experiment 20001554 PARAMETER Experiment Name: At_Drought_Soil_Dry_P Parameter: Plant Line Value: WS
  misc_feature: MA Experiment 20001554 PARAMETER Experiment Name: At_Drought_Soil_Dry_P Parameter: Post Timepoint (hr) Value: None
  misc_feature: MA Experiment 20001554 PARAMETER Experiment Name: At_Drought_Soil_Dry_P Parameter: Post-Treatment Value: None
  misc_feature: MA Experiment 20001554 PARAMETER Experiment Name: At_Drought_Soil_Dry_P Parameter: Timepoint (day) Value: 7
  misc_feature: MA Experiment 20001554 PARAMETER Experiment Name: At_Drought_Soil_Dry_P Parameter: Treatment Value: Drought vs. No Drought
  misc_feature: MA Experiment ID: 20001555 Result: Up-regulated in Transcription
  misc_feature: MA Experiment 20001555 PARAMETER Experiment Name: At_Drought_Soil_Dry_P Parameter: Age (day) Value: 24
  misc_feature: MA Experiment 20001555 PARAMETER Experiment Name: At_Drought_Soil_Dry_P Parameter: Organism Value: A. thaliana
  misc_feature: MA Experiment 20001555 PARAMETER Experiment Name: At_Drought_Soil_Dry_P Parameter: Plant Line Value: WS
  misc_feature: MA Experiment 20001555 PARAMETER Experiment Name: At_Drought_Soil_Dry_P Parameter: Post Timepoint (hr) Value: None
  misc_feature: MA Experiment 20001555 PARAMETER Experiment Name: At_Drought_Soil_Dry_P Parameter: Post-Treatment Value: None
  misc_feature: MA Experiment 20001555 PARAMETER Experiment Name: At_Drought_Soil_Dry_P Parameter: Timepoint (day) Value: 10
  misc_feature: MA Experiment 20001555 PARAMETER Experiment Name: At_Drought_Soil_Dry_P Parameter: Treatment Value: Drought vs. No Drought
  misc_feature: MA Experiment ID: 20001556 Result: Up-regulated in Transcription
  misc_feature: MA Experiment 20001556 PARAMETER Experiment Name: At_Drought_Soil_Dry_P Parameter: Age (day) Value: 26
  misc_feature: MA Experiment 20001556 PARAMETER Experiment Name: At_Drought_Soil_Dry_P Parameter: Organism Value: A. thaliana
  misc_feature: MA Experiment 20001556 PARAMETER Experiment Name: At_Drought_Soil_Dry_P Parameter: Plant Line Value: WS
  misc_feature: MA Experiment 20001556 PARAMETER Experiment Name: At_Drought_Soil_Dry_P Parameter: Post Timepoint (hr) Value: None
  misc_feature: MA Experiment 20001556 PARAMETER Experiment Name: At_Drought_Soil_Dry_P Parameter: Post-Treatment Value: None
  misc_feature: MA Experiment 20001556 PARAMETER Experiment Name: At_Drought_Soil_Dry_P Parameter: Timepoint (day) Value: 12
  misc_feature: MA Experiment 20001556 PARAMETER Experiment Name: At_Drought_Soil_Dry_P Parameter: Treatment Value: Drought vs. No Drought

SEQ ID NO: 32465 - protein, 383 aa, Arabidopsis thaliana; identical to SEQ ID NO: 28875
  peptide (1)..(383): Ceres Seq. ID no. 12321216
  misc_feature (89)..(340): Pfam Name: Fatty acid desaturase Pfam Description: Fatty acid desaturase
  misc_feature (1)..(383): Homolog of NCBI NO: 3417601 NR Description: delta-12 fatty acid desaturase [Borago
  misc_feature (1)..(383): Homolog of NCBI NO: 17225582 NR Description: delta-12 fatty acid desaturase [Gossypium
  misc_feature (1)..(382): Homolog of NCBI NO: 27261181 NR Description: delta 12 oleic acid desaturase FAD2 [Vernicia
  misc_feature (1)..(383): Homolog of NCBI NO: 3452129 NR Description: bifunctional oleate 12-hydroxylase:desaturase
  misc_feature (1)..(383): Homolog of NCBI NO: 8705229 NR Description: delta-12 oleate desaturase [Brassica napus]
  misc_feature (1)..(383): Homolog of NCBI NO: 20520624 NR Description: fatty acid desaturase 2 [Brassica rapa]
  misc_feature (1)..(383): Homolog of NCBI NO: 3334184 NR Description: Omega-6 fatty acid desaturase, endoplasmic
  misc_feature (1)..(383): Homolog of NCBI NO: 4378875 NR Description: delta-12 desaturase [Brassica carinata]
  misc_feature (1)..(383): Homolog of NCBI NO: 21536781 NR Description: omega-6 fatty acid desaturase, endoplasmic
  misc_feature (1)..(383): Homolog of NCBI NO: 15229956 NR Description: omega-6 fatty acid desaturase, endoplasmic

SEQ ID NO: 32466 - protein, 377 aa, Arabidopsis thaliana; identical to SEQ ID NO: 28876
  peptide (1)..(377): Ceres Seq. ID no. 12321217
  misc_feature (83)..(334): Pfam Name: Fatty acid desaturase Pfam Description: Fatty acid desaturase
  misc_feature (1)..(377): Homolog of NCBI NO: 3417601 NR Description: delta-12 fatty acid desaturase [Borago
  misc_feature (1)..(377): Homolog of NCBI NO: 17225582 NR Description: delta-12 fatty acid desaturase [Gossypium
  misc_feature (1)..(376): Homolog of NCBI NO: 27261181 NR Description: delta 12 oleic acid desaturase FAD2 [Vernicia
  misc_feature (1)..(377): Homolog of NCBI NO: 3452129 NR Description: bifunctional oleate 12-hydroxylase:desaturase
  misc_feature (1)..(377): Homolog of NCBI NO: 8705229 NR Description: delta-12 oleate desaturase [Brassica napus]
  misc_feature (1)..(377): Homolog of NCBI NO: 20520624 NR Description: fatty acid desaturase 2 [Brassica rapa]
  misc_feature (1)..(377): Homolog of NCBI NO: 3334184 NR Description: Omega-6 fatty acid desaturase, endoplasmic
  misc_feature (1)..(377): Homolog of NCBI NO: 4378875 NR Description: delta-12 desaturase [Brassica carinata]
  misc_feature (1)..(377): Homolog of NCBI NO: 21536781 NR Description: omega-6 fatty acid desaturase, endoplasmic
  misc_feature (1)..(377): Homolog of NCBI NO: 15229956 NR Description: omega-6 fatty acid desaturase, endoplasmic

SEQ ID NO: 32467 - protein, 204 aa, Arabidopsis thaliana; identical to SEQ ID NO: 28877
  peptide (1)..(204): Ceres Seq. ID no. 12321218
  misc_feature (1)..(161): Pfam Name: Fatty acid desaturase Pfam Description: Fatty acid desaturase
  misc_feature (1)..(204): Homolog of NCBI NO: 3417601 NR Description: delta-12 fatty acid desaturase [Borago
  misc_feature (1)..(204): Homolog of NCBI NO: 17225582 NR Description: delta-12 fatty acid desaturase [Gossypium
  misc_feature (1)..(203): Homolog of NCBI NO: 27261181 NR Description: delta 12 oleic acid desaturase FAD2 [Vernicia
  misc_feature (1)..(204): Homolog of NCBI NO: 3452129 NR Description: bifunctional oleate 12-hydroxylase:desaturase
  misc_feature (1)..(204): Homolog of NCBI NO: 8705229 NR Description: delta-12 oleate desaturase [Brassica napus]
  misc_feature (1)..(204): Homolog of NCBI NO: 20520624 NR Description: fatty acid desaturase 2 [Brassica rapa]
  misc_feature (1)..(204): Homolog of NCBI NO: 3334184 NR Description: Omega-6 fatty acid desaturase, endoplasmic
  misc_feature (1)..(204): Homolog of NCBI NO: 4378875 NR Description: delta-12 desaturase [Brassica carinata]
  misc_feature (1)..(204): Homolog of NCBI NO: 21536781 NR Description: omega-6 fatty acid desaturase, endoplasmic
  misc_feature (1)..(204): Homolog of NCBI NO: 15229956 NR Description: omega-6 fatty acid desaturase, endoplasmic

SEQ ID NO: 32468 - DNA, 2073 bp, Arabidopsis thaliana; identical to SEQ ID NO: 28878
  misc_feature (1)..(2073): Ceres Seq. ID no. 13487538
  misc_feature: MA Experiment ID: 108573 Result: Up-regulated in Transcription
  misc_feature: MA Experiment 108573 PARAMETER Experiment Name: At_Drought_cDNA_P Parameter: Timepoint (hr) Value: 6
  misc_feature: MA Experiment 108573 PARAMETER Experiment Name: At_Drought_cDNA_P Parameter: Tissue Value: Aerial
  misc_feature: MA Experiment 108573 PARAMETER Experiment Name: At_Drought_cDNA_P Parameter: Treatment Value: Drought vs. No Drought
  misc_feature: MA Experiment ID: 108668 Result: Up-regulated in Transcription
  misc_feature: MA Experiment 108668 PARAMETER Experiment Name: At_2mM_SA_cDNA_P Parameter: Plant Line Value: WS
  misc_feature: MA Experiment 108668 PARAMETER Experiment Name: At_2mM_SA_cDNA_P Parameter: Timepoint (hr) Value: 6
  misc_feature: MA Experiment 108668 PARAMETER Experiment Name: At_2mM_SA_cDNA_P Parameter: Treatment Value: 2mM SA vs. No Treatment
  misc_feature: MA Experiment ID: 20000182 Result: Up-regulated in Transcription
  misc_feature: MA Experiment 20000182 PARAMETER Experiment Name: At_2mM_SA_P Parameter: Age (day) Value: 14
  misc_feature: MA Experiment 20000182 PARAMETER Experiment Name: At_2mM_SA_P Parameter: Organism Value: A. thaliana
  misc_feature: MA Experiment 20000182 PARAMETER Experiment Name: At_2mM_SA_P Parameter: Plant Line Value: WS
  misc_feature: MA Experiment 20000182 PARAMETER Experiment Name: At_2mM_SA_P Parameter: Timepoint (hr) Value: 6
  misc_feature: MA Experiment 20000182 PARAMETER Experiment Name: At_2mM_SA_P Parameter: Tissue Value: Aerial
  misc_feature: MA Experiment 20000182 PARAMETER Experiment Name: At_2mM_SA_P Parameter: Treatment Value: 2mM SA vs. No Treatment

SEQ ID NO: 32469 - protein, 386 aa, Arabidopsis thaliana; identical to SEQ ID NO: 28879
  peptide (1)..(386): Ceres Seq. ID no. 13487539
  misc_feature (154)..(265): Pfam Name: Arabidopsis protein of unknown function, DUF266 Pfam Description: Arabidopsis protein of unknown function, DUF266
  misc_feature (88)..(386): Homolog of NCBI NO: 15237293 NR Description: hypothetical protein [Arabidopsis thaliana]
  misc_feature (71)..(386): Homolog of NCBI NO: 38344090 NR Description: OSJNBb0056F09.13 [Oryza sativa (japonica
  misc_feature (78)..(386): Homolog of NCBI NO: 15218485 NR Description: expressed protein [Arabidopsis thaliana]
  misc_feature (70)..(386): Homolog of NCBI NO: 15221386 NR Description: hypothetical protein [Arabidopsis thaliana]
  misc_feature (8)..(345): Homolog of NCBI NO: 9280235 NR Description: gb|AAD40142.1~gene_id:MXL8.19~strong similarity
  misc_feature (27)..(384): Homolog of NCBI NO: 15218028 NR Description: hypothetical protein [Arabidopsis thaliana]
  misc_feature (8)..(386): Homolog of NCBI NO: 21554566 NR Description: unknown [Arabidopsis thaliana]
  misc_feature (8)..(386): Homolog of NCBI NO: 18402952 NR Description: expressed protein [Arabidopsis thaliana]
  misc_feature (3)..(384): Homolog of NCBI NO: 15239557 NR Description: hypothetical protein [Arabidopsis thaliana]
  misc_feature (1)..(386): Homolog of NCBI NO: 15239155 NR Description: expressed protein [Arabidopsis thaliana]

SEQ ID NO: 32470 - protein, 297 aa, Arabidopsis thaliana; identical to SEQ ID NO: 28880
  peptide (1)..(297): Ceres Seq. ID no. 13487540
  misc_feature (65)..(176): Pfam Name: Arabidopsis protein of unknown function, DUF266 Pfam Description: Arabidopsis protein of unknown function, DUF266
  misc_feature (1)..(297): Homolog of NCBI NO: 15237293 NR Description: hypothetical protein [Arabidopsis thaliana]
  misc_feature (1)..(297): Homolog of NCBI NO: 38344090 NR Description: OSJNBb0056F09.13 [Oryza sativa (japonica
  misc_feature (1)..(297): Homolog of NCBI NO: 15218485 NR Description: expressed protein [Arabidopsis thaliana]
  misc_feature (1)..(297): Homolog of NCBI NO: 15221386 NR Description: hypothetical protein [Arabidopsis thaliana]
  misc_feature (1)..(256): Homolog of NCBI NO: 9280235 NR Description: gb|AAD40142.1~gene_id:MXL8.19~strong similarity
  misc_feature (1)..(295): Homolog of NCBI NO: 15218028 NR Description: hypothetical protein [Arabidopsis thaliana]
  misc_feature (1)..(297): Homolog of NCBI NO: 21554566 NR Description: unknown [Arabidopsis thaliana]
  misc_feature (1)..(297): Homolog of NCBI NO: 18402952 NR Description: expressed protein [Arabidopsis thaliana]
  misc_feature (1)..(295): Homolog of NCBI NO: 15239557 NR Description: hypothetical protein [Arabidopsis thaliana]
  misc_feature (1)..(297): Homolog of NCBI NO: 15239155 NR Description: expressed protein [Arabidopsis thaliana]

SEQ ID NO: 32471 - protein, 294 aa, Arabidopsis thaliana; identical to SEQ ID NO: 28881
  peptide (1)..(294): Ceres Seq. ID no. 13487541
  misc_feature (62)..(173): Pfam Name: Arabidopsis protein of unknown function, DUF266 Pfam Description: Arabidopsis protein of unknown function, DUF266
  misc_feature (1)..(294): Homolog of NCBI NO: 15237293 NR Description: hypothetical protein [Arabidopsis thaliana]
  misc_feature (1)..(294): Homolog of NCBI NO: 38344090 NR Description: OSJNBb0056F09.13 [Oryza sativa (japonica
  misc_feature (1)..(294): Homolog of NCBI NO: 15218485 NR Description: expressed protein [Arabidopsis thaliana]
  misc_feature (1)..(294): Homolog of NCBI NO: 15221386 NR Description: hypothetical protein [Arabidopsis thaliana]
  misc_feature (1)..(253): Homolog of NCBI NO: 9280235 NR Description: gb|AAD40142.1~gene_id:MXL8.19~strong similarity
  misc_feature (1)..(292): Homolog of NCBI NO: 15218028 NR Description: hypothetical protein [Arabidopsis thaliana]
  misc_feature (1)..(294): Homolog of NCBI NO: 21554566 NR Description: unknown [Arabidopsis thaliana]
  misc_feature (1)..(294): Homolog of NCBI NO: 18402952 NR Description: expressed protein [Arabidopsis thaliana]
  misc_feature (1)..(292): Homolog of NCBI NO: 15239557 NR Description: hypothetical protein [Arabidopsis thaliana]
  misc_feature (1)..(294): Homolog of NCBI NO: 15239155 NR Description: expressed protein [Arabidopsis thaliana]

SEQ ID NO: 32472 - DNA, 1140 bp, Arabidopsis thaliana; identical to SEQ ID NO: 28882
  misc_feature (1)..(1140): Ceres Seq. ID no. 12321188
  misc_feature: MA Experiment ID: 108434 Result: Down-regulated in Transcription
  misc_feature: MA Experiment 108434 PARAMETER Experiment Name: At_Root_Tips_cDNA_P Parameter: Tissue Value: Root Tips
  misc_feature: MA Experiment ID: 108435 Result: Down-regulated in Transcription
  misc_feature: MA Experiment 108435 PARAMETER Experiment Name: At_stm_Mutants_cDNA_P Parameter: Plant Line Value: wt Landsburg vs stm
  misc_feature: MA Experiment 108435 PARAMETER Experiment Name: At_stm_Mutants_cDNA_P Parameter: Tissue Value: Shoot Apical Meristem Region
  misc_feature: MA Experiment ID: 108488 Result: Down-regulated in Transcription
  misc_feature: MA Experiment ID: 108577 Result: Down-regulated in Transcription
  misc_feature: MA Experiment 108577 PARAMETER Experiment Name: At_42deg_Heat_cDNA_P Parameter: Temperature (deg C) Value: 42 vs. 22
  misc_feature: MA Experiment 108577 PARAMETER Experiment Name: At_42deg_Heat_cDNA_P Parameter: Timepoint (hr) Value: 6
  misc_feature: MA Experiment 108577 PARAMETER Experiment Name: At_42deg_Heat_cDNA_P Parameter: Tissue Value: Aerial
  misc_feature: MA Experiment ID: 108579 Result: Down-regulated in Transcription
  misc_feature: MA Experiment 108579 PARAMETER Experiment Name: At_4deg_Cold_cDNA_P Parameter: Temperature (deg C) Value: 4 vs. 22
  misc_feature: MA Experiment 108579 PARAMETER Experiment Name: At_4deg_Cold_cDNA_P Parameter: Timepoint (hr) Value: 6
  misc_feature: MA Experiment 108579 PARAMETER Experiment Name: At_4deg_Cold_cDNA_P Parameter: Tissue Value: Aerial
  misc_feature: MA Experiment ID: 108595 Result: Down-regulated in Transcription
  misc_feature: MA Experiment 108595 PARAMETER Experiment Name: At_Ler-pi_Ovule_cDNA_P Parameter: Plant Line Value: null
  misc_feature: MA Experiment ID: 20000072 Result: Up-regulated in Transcription
  misc_feature: MA Experiment 20000072 PARAMETER Experiment Name: At_100uM_ABA_Mutants_cDNA_P Parameter: Plant Line Value: CS8105
  misc_feature: MA Experiment 20000072 PARAMETER Experiment Name: At_100uM_ABA_Mutants_cDNA_P Parameter: Timepoint (hr) Value: 6
  misc_feature: MA Experiment 20000072 PARAMETER Experiment Name: At_100uM_ABA_Mutants_cDNA_P Parameter: Tissue Value: Aerial
  misc_feature: MA Experiment 20000072 PARAMETER Experiment Name: At_100uM_ABA_Mutants_cDNA_P Parameter: Treatment Value: 100uM ABA vs. No Treatment
  misc_feature: MA Experiment ID: 20000111 Result: Down-regulated in Transcription
  misc_feature: MA Experiment 20000111 PARAMETER Experiment Name: At_42deg_Heat_cDNA_P Parameter: Temperature (deg C) Value: 42 vs. 22
  misc_feature: MA Experiment 20000111 PARAMETER Experiment Name: At_42deg_Heat_cDNA_P Parameter: Timepoint (hr) Value: 6
  misc_feature: MA Experiment 20000111 PARAMETER Experiment Name: At_42deg_Heat_cDNA_P Parameter: Tissue Value: Aerial
  misc_feature: MA Experiment ID: 20000113 Result: Down-regulated in Transcription
  misc_feature: MA Experiment 20000113 PARAMETER Experiment Name: At_42deg_Heat_cDNA_P Parameter: Temperature (deg C) Value: 42 vs. 22
  misc_feature: MA Experiment 20000113 PARAMETER Experiment Name: At_42deg_Heat_cDNA_P Parameter: Timepoint (hr) Value: 8
  misc_feature: MA Experiment 20000113 PARAMETER Experiment Name: At_42deg_Heat_cDNA_P Parameter: Tissue Value: Aerial
  misc_feature: MA Experiment ID: 20000173 Result: Down-regulated in Transcription
  misc_feature: MA Experiment 20000173 PARAMETER Experiment Name: At_42deg_Heat_P Parameter: Age (day) Value: 14
  misc_feature: MA Experiment 20000173 PARAMETER Experiment Name: At_42deg_Heat_P Parameter: Organism Value: A. thaliana
  misc_feature: MA Experiment 20000173 PARAMETER Experiment Name: At_42deg_Heat_P Parameter: Plant Line Value: WS
  misc_feature: MA Experiment 20000173 PARAMETER Experiment Name: At_42deg_Heat_P Parameter: Temperature (deg C) Value: 42 vs. 22
  misc_feature: MA Experiment 20000173 PARAMETER Experiment Name: At_42deg_Heat_P Parameter: Timepoint (hr) Value: 6
  misc_feature: MA Experiment 20000173 PARAMETER Experiment Name: At_42deg_Heat_P Parameter: Tissue Value: Aerial
  misc_feature: MA Experiment ID: 20000179 Result: Up-regulated in Transcription
  misc_feature: MA Experiment 20000179 PARAMETER Experiment Name: At_Germinating_Seeds_P Parameter: Age (hr) Value: 6 vs. 0
  misc_feature: MA Experiment 20000179 PARAMETER Experiment Name: At_Germinating_Seeds_P Parameter: Tissue Value: Germinating Seeds
  misc_feature: MA Experiment ID: 20000184 Result: Down-regulated in Transcription
  misc_feature: MA Experiment 20000184 PARAMETER Experiment Name: At_Shoots__P Parameter: Age (day) Value: 7
  misc_feature: MA Experiment 20000184 PARAMETER Experiment Name: At_Shoots__P Parameter: Tissue Value: Shoots vs. Whole Plant
  misc_feature: MA Experiment ID: 20000185 Result: Down-regulated in Transcription
  misc_feature: MA Experiment 20000185 PARAMETER Experiment Name: At_Roots__P Parameter: Age (day) Value: 7 vs. 21
  misc_feature: MA Experiment 20000185 PARAMETER Experiment Name: At_Roots__P Parameter: Organism Value: A. thaliana
  misc_feature: MA Experiment 20000185 PARAMETER Experiment Name: At_Roots__P Parameter: Tissue Value: Roots vs. Whole Plant
  misc_feature: MA Experiment ID: 20000227 Result: Down-regulated in Transcription
  misc_feature: MA Experiment 20000227 PARAMETER Experiment Name: At_Root-Tips-vs-Tops_P Parameter: Tissue Value: Root Tips vs. Root Tops
  misc_feature: MA Experiment ID: 20000234 Result: Down-regulated in Transcription
  misc_feature: MA Experiment 20000234 PARAMETER Experiment Name: At_Siliques_P Parameter: Age (day) Value: 21
  misc_feature: MA Experiment 20000234 PARAMETER Experiment Name: At_Siliques_P Parameter: Organism Value: A. thaliana
  misc_feature: MA Experiment 20000234 PARAMETER Experiment Name: At_Siliques_P Parameter: Plant Line Value: WS
  misc_feature: MA Experiment 20000234 PARAMETER Experiment Name: At_Siliques_P Parameter: Tissue Value: Less Than 5mm Siliques vs. Whole Plant
  misc_feature: MA Experiment ID: 20000264 Result: Down-regulated in Transcription
  misc_feature: MA Experiment 20000264 PARAMETER Experiment Name: At_Open_Flower_P Parameter: Age (day) Value: 21
  misc_feature: MA Experiment 20000264 PARAMETER Experiment Name: At_Open_Flower_P Parameter: Plant Line Value: WS
  misc_feature: MA Experiment 20000264 PARAMETER Experiment Name: At_Open_Flower_P Parameter: Tissue Value: Open Flower vs. Whole Plant
  misc_feature: MA Experiment ID: 20000439 Result: Down-regulated in Transcription
  misc_feature: MA Experiment 20000439 PARAMETER Experiment Name: At_Roots__P Parameter: Age (day) Value: 14 vs. 21
  misc_feature: MA Experiment 20000439 PARAMETER Experiment Name: At_Roots__P Parameter: Organism Value: A. thaliana
  misc_feature: MA Experiment 20000439 PARAMETER Experiment Name: At_Roots__P Parameter: Tissue Value: Roots vs. Whole Plant
  misc_feature: MA Experiment ID: 20000495 Result: Down-regulated in Transcription
  misc_feature: MA Experiment 20000495 PARAMETER Experiment Name: At_Guard_Cells_P Parameter: Harvest Date Value: 8/2/2002
  misc_feature: MA Experiment 20000495 PARAMETER Experiment Name: At_Guard_Cells_P Parameter: Organism Value: A. thaliana
  misc_feature: MA Experiment 20000495 PARAMETER Experiment Name: At_Guard_Cells_P Parameter: Tissue Value: Guard Cells vs. Leaves

SEQ ID NO: 32473 - protein, 236 aa, Arabidopsis thaliana; identical to SEQ ID NO: 28883
  peptide (1)..(236): Ceres Seq. ID no. 12321189
  misc_feature (12)..(227): Pfam Name: Peroxisomal biogenesis factor 11 (PEX11) Pfam Description: Peroxisomal biogenesis factor 11 (PEX11)
  misc_feature (132)..(236): Homolog of NCBI NO: 14335058 NR Description: At2g45740/F4I18.28 [Arabidopsis thaliana]
  misc_feature (3)..(225): Homolog of NCBI NO: 34898026 NR Description: ESTs AU064537(E31904),AU082147(E31904) correspond a region of the predicted gene.~Similar to Arabidopsis thaliana
  misc_feature (3)..(234): Homolog of NCBI NO: 25553559 NR Description: OSJNBa0038F22.7 [Oryza sativa (japonica
  misc_feature (3)..(234): Homolog of NCBI NO: 8489788 NR Description: unknown [Lycopersicon esculentum]
  misc_feature (3)..(236): Homolog of NCBI NO: 11358250 NR Description: hypothetical protein T27I15_160 - Arabidopsis
  misc_feature (3)..(234): Homolog of NCBI NO: 18378887 NR Description: expressed protein
  misc_feature (3)..(236): Homolog of NCBI NO: 30695340 NR Description: expressed protein [Arabidopsis thaliana]
  misc_feature (1)..(231): Homolog of NCBI NO: 7486466 NR Description: hypothetical protein At2g45740 [imported] -
  misc_feature (1)..(236): Homolog of NCBI NO: 18406877 NR Description: expressed protein

SEQ ID NO: 32474 - protein, 220 aa, Arabidopsis thaliana; identical to SEQ ID NO: 28884
  peptide (1)..(220): Ceres Seq. ID no. 12321190
  misc_feature (1)..(211): Pfam Name: Peroxisomal biogenesis factor 11 (PEX11) Pfam Description: Peroxisomal biogenesis factor 11 (PEX11)
  misc_feature (116)..(220): Homolog of NCBI NO: 14335058 NR Description: At2g45740/F4I18.28 [Arabidopsis thaliana]
  misc_feature (1)..(209): Homolog of NCBI NO: 34898026 NR Description: ESTs AU064537(E31904),AU082147(E31904) correspond a region of the predicted gene.~Similar to Arabidopsis thaliana
  misc_feature (1)..(218): Homolog of NCBI NO: 25553559 NR Description: OSJNBa0038F22.7 [Oryza sativa (japonica
  misc_feature (1)..(218): Homolog of NCBI NO: 8489788 NR Description: unknown [Lycopersicon esculentum]
  misc_feature (1)..(220): Homolog of NCBI NO: 11358250 NR Description: hypothetical protein T27I15_160 - Arabidopsis
  misc_feature (1)..(218): Homolog of NCBI NO: 18378887 NR Description: expressed protein
  misc_feature (1)..(220): Homolog of NCBI NO: 30695340 NR Description: expressed protein [Arabidopsis thaliana]
  misc_feature (1)..(215): Homolog of NCBI NO: 7486466 NR Description: hypothetical protein At2g45740 [imported] -
  misc_feature (1)..(220): Homolog of NCBI NO: 18406877 NR Description: expressed protein

SEQ ID NO: 32475 - DNA, 1136 bp, Arabidopsis thaliana; identical to SEQ ID NO: 28885
  misc_feature (1)..(1136): Ceres Seq. ID no. 12337739
  misc_feature: MA Experiment ID: 108434 Result: Down-regulated in Transcription
  misc_feature: MA Experiment 108434 PARAMETER Experiment Name: At_Root_Tips_cDNA_P Parameter: Tissue Value: Root Tips
  misc_feature: MA Experiment ID: 108461 Result: Down-regulated in Transcription
  misc_feature: MA Experiment 108461 PARAMETER Experiment Name: At_Germinating_Seeds_cDNA_P Parameter: Age (day) Value: 1 vs. 0
  misc_feature: MA Experiment 108461 PARAMETER Experiment Name: At_Germinating_Seeds_cDNA_P Parameter: Tissue Value: Germinating Seeds
  misc_feature: MA Experiment ID: 108488 Result: Down-regulated in Transcription
  misc_feature: MA Experiment ID: 108569 Result: Up-regulated in Transcription
  misc_feature: MA Experiment 108569 PARAMETER Experiment Name: At_0.001%_MeJA__cDNA_P Parameter: Timepoint (hr) Value: 6
  misc_feature: MA Experiment 108569 PARAMETER Experiment Name: At_0.001%_MeJA__cDNA_P Parameter: Tissue Value: Aerial
  misc_feature: MA Experiment 108569 PARAMETER Experiment Name: At_0.001%_MeJA__cDNA_P Parameter: Treatment Value: 0.001% MeJA vs. No Treatment
  misc_feature: MA Experiment ID: 108573 Result: Up-regulated in Transcription
  misc_feature: MA Experiment 108573 PARAMETER Experiment Name: At_Drought_cDNA_P Parameter: Timepoint (hr) Value: 6
  misc_feature: MA Experiment 108573 PARAMETER Experiment Name: At_Drought_cDNA_P Parameter: Tissue Value: Aerial
  misc_feature: MA Experiment 108573 PARAMETER Experiment Name: At_Drought_cDNA_P Parameter: Treatment Value: Drought vs. No Drought
  misc_feature: MA Experiment ID: 108574 Result: Up-regulated in Transcription
  misc_feature: MA Experiment 108574 PARAMETER Experiment Name: At_Wounding__cDNA_P Parameter: Timepoint (hr) Value: 1
  misc_feature: MA Experiment 108574 PARAMETER Experiment Name: At_Wounding__cDNA_P Parameter: Tissue Value: Aerial
  misc_feature: MA Experiment 108574 PARAMETER Experiment Name: At_Wounding__cDNA_P Parameter: Treatment Value: Wounding vs. No Wounding
  misc_feature: MA Experiment ID: 108585 Result: Up-regulated in Transcription
  misc_feature: MA Experiment 108585 PARAMETER Experiment Name: At_5mM_NaNP_cDNA_P Parameter: Timepoint (hr) Value: 6
  misc_feature: MA Experiment 108585 PARAMETER Experiment Name: At_5mM_NaNP_cDNA_P Parameter: Tissue Value: Aerial
  misc_feature: MA Experiment 108585 PARAMETER Experiment Name: At_5mM_NaNP_cDNA_P Parameter: Treatment Value: null
  misc_feature: MA Experiment ID: 108595 Result: Up-regulated in Transcription
  misc_feature: MA Experiment 108595 PARAMETER Experiment Name: At_Ler-pi_Ovule_cDNA_P Parameter: Plant Line Value: null
  misc_feature: MA Experiment ID: 108667 Result: Up-regulated in Transcription
  misc_feature: MA Experiment 108667 PARAMETER Experiment Name: At_2mM_SA_cDNA_P Parameter: Plant Line Value: WS
  misc_feature: MA Experiment 108667 PARAMETER Experiment Name: At_2mM_SA_cDNA_P Parameter: Timepoint (hr) Value: 1
  misc_feature: MA Experiment 108667 PARAMETER Experiment Name: At_2mM_SA_cDNA_P Parameter: Treatment Value: 2mM SA vs. No Treatment
  misc_feature: MA Experiment ID: 20000069 Result: Up-regulated in Transcription
  misc_feature: MA Experiment 20000069 PARAMETER Experiment Name: At_100uM_ABA_Mutants_cDNA_P Parameter: Plant Line Value: CS23
  misc_feature: MA Experiment 20000069 PARAMETER Experiment Name: At_100uM_ABA_Mutants_cDNA_P Parameter: Timepoint (hr) Value: 6
  misc_feature: MA Experiment 20000069 PARAMETER Experiment Name: At_100uM_ABA_Mutants_cDNA_P Parameter: Tissue Value: Aerial
  misc_feature: MA Experiment 20000069 PARAMETER Experiment Name: At_100uM_ABA_Mutants_cDNA_P Parameter: Treatment Value: 100uM ABA vs. No Treatment
  misc_feature: MA Experiment ID: 20000070 Result: Up-regulated in Transcription
  misc_feature: MA Experiment 20000070 PARAMETER Experiment Name: At_100uM_ABA_Mutants_cDNA_P Parameter: Plant Line Value: CS24
  misc_feature: MA Experiment 20000070 PARAMETER Experiment Name: At_100uM_ABA_Mutants_cDNA_P Parameter: Timepoint (hr) Value: 6
  misc_feature: MA Experiment 20000070 PARAMETER Experiment Name: At_100uM_ABA_Mutants_cDNA_P Parameter: Tissue Value: Aerial
  misc_feature: MA Experiment 20000070 PARAMETER Experiment Name: At_100uM_ABA_Mutants_cDNA_P Parameter: Treatment Value: 100uM ABA vs. No Treatment
  misc_feature: MA Experiment ID: 20000071 Result: Up-regulated in Transcription
  misc_feature: MA Experiment 20000071 PARAMETER Experiment Name: At_100uM_ABA_Mutants_cDNA_P Parameter: Plant Line Value: CS8104
  misc_feature: MA Experiment 20000071 PARAMETER Experiment Name: At_100uM_ABA_Mutants_cDNA_P Parameter: Timepoint (hr) Value: 6
  misc_feature: MA Experiment 20000071 PARAMETER Experiment Name: At_100uM_ABA_Mutants_cDNA_P Parameter: Tissue Value: Aerial
  misc_feature: MA Experiment 20000071 PARAMETER Experiment Name: At_100uM_ABA_Mutants_cDNA_P Parameter: Treatment Value: 100uM ABA vs. No Treatment
  misc_feature: MA Experiment ID: 20000072 Result: Up-regulated in Transcription
  misc_feature: MA Experiment 20000072 PARAMETER Experiment Name: At_100uM_ABA_Mutants_cDNA_P Parameter: Plant Line Value: CS8105
  misc_feature: MA Experiment 20000072 PARAMETER Experiment Name: At_100uM_ABA_Mutants_cDNA_P Parameter: Timepoint (hr) Value: 6
  misc_feature: MA Experiment 20000072 PARAMETER Experiment Name: At_100uM_ABA_Mutants_cDNA_P Parameter: Tissue Value: Aerial
  misc_feature: MA Experiment 20000072 PARAMETER Experiment Name: At_100uM_ABA_Mutants_cDNA_P Parameter: Treatment Value: 100uM ABA vs. No Treatment
  misc_feature: MA Experiment ID: 20000087 Result: Up-regulated in Transcription
  misc_feature: MA Experiment 20000087 PARAMETER Experiment Name: At_100uM_ABA_Mutants_cDNA_P Parameter: Plant Line Value: WS
  misc_feature: MA Experiment 20000087 PARAMETER Experiment Name: At_100uM_ABA_Mutants_cDNA_P Parameter: Timepoint (hr) Value: 6
  misc_feature: MA Experiment 20000087 PARAMETER Experiment Name: At_100uM_ABA_Mutants_cDNA_P Parameter: Tissue Value: Aerial
  misc_feature: MA Experiment 20000087 PARAMETER Experiment Name: At_100uM_ABA_Mutants_cDNA_P Parameter: Treatment Value: 100uM ABA vs. No Treatment
  misc_feature: MA Experiment ID: 20000088 Result: Up-regulated in Transcription
  misc_feature: MA Experiment 20000088 PARAMETER Experiment Name: At_100uM_ABA_Mutants_cDNA_P Parameter: Plant Line Value: Landsberg
  misc_feature: MA Experiment 20000088 PARAMETER Experiment Name: At_100uM_ABA_Mutants_cDNA_P Parameter: Timepoint (hr) Value: 6
  misc_feature: MA Experiment 20000088 PARAMETER Experiment Name: At_100uM_ABA_Mutants_cDNA_P Parameter: Tissue Value: Aerial
  misc_feature: MA Experiment 20000088 PARAMETER Experiment Name: At_100uM_ABA_Mutants_cDNA_P Parameter: Treatment Value: 100uM ABA vs. No Treatment
  misc_feature: MA Experiment ID: 20000089 Result: Up-regulated in Transcription
  misc_feature: MA Experiment ID: 20000093 Result: Up-regulated in Transcription
  misc_feature: MA Experiment 20000093 PARAMETER Experiment Name: At_42deg_Heat_cDNA_P Parameter: Temperature (deg C) Value: 42 vs. 22
  misc_feature: MA Experiment 20000093 PARAMETER Experiment Name: At_42deg_Heat_cDNA_P Parameter: Timepoint (hr) Value: 0.5
  misc_feature: MA Experiment 20000093 PARAMETER Experiment Name: At_42deg_Heat_cDNA_P Parameter: Tissue Value: Aerial
  misc_feature: MA Experiment ID: 20000112 Result: Up-regulated in Transcription
  misc_feature: MA Experiment 20000112 PARAMETER Experiment Name: At_42deg_Heat_cDNA_P Parameter: Temperature (deg C) Value: 42 vs. 22
  misc_feature: MA Experiment 20000112 PARAMETER Experiment Name: At_42deg_Heat_cDNA_P Parameter: Timepoint (hr) Value: 2
  misc_feature: MA Experiment 20000112 PARAMETER Experiment Name: At_42deg_Heat_cDNA_P Parameter: Tissue Value: Aerial
  misc_feature: MA Experiment ID: 20000113 Result: Up-regulated in Transcription
  misc_feature: MA Experiment 20000113 PARAMETER Experiment Name: At_42deg_Heat_cDNA_P Parameter: Temperature (deg C) Value: 42 vs. 22
  misc_feature: MA Experiment 20000113 PARAMETER Experiment Name: At_42deg_Heat_cDNA_P Parameter: Timepoint (hr) Value: 8
  misc_feature: MA Experiment 20000113 PARAMETER Experiment Name: At_42deg_Heat_cDNA_P Parameter: Tissue Value: Aerial
  misc_feature: MA Experiment ID: 20000117 Result: Up-regulated in Transcription
  misc_feature: MA Experiment 20000117 PARAMETER Experiment Name: At_100uM_ABA_Mutants_cDNA_P Parameter: Plant Line Value: Columbia
  misc_feature: MA Experiment 20000117 PARAMETER Experiment Name: At_100uM_ABA_Mutants_cDNA_P Parameter: Timepoint (hr) Value: 6
  misc_feature: MA Experiment 20000117 PARAMETER Experiment Name: At_100uM_ABA_Mutants_cDNA_P Parameter: Tissue Value: Aerial
  misc_feature: MA Experiment 20000117 PARAMETER Experiment Name: At_100uM_ABA_Mutants_cDNA_P Parameter: Treatment Value: 100uM ABA vs. No Treatment
  misc_feature: MA Experiment ID: 20000144 Result: Up-regulated in Transcription
  misc_feature: MA Experiment 20000144 PARAMETER Experiment Name: At_42deg_Heat_cDNA_P Parameter: Temperature (deg C) Value: 42 vs. 22
  misc_feature: MA Experiment 20000144 PARAMETER Experiment Name: At_42deg_Heat_cDNA_P Parameter: Timepoint (hr) Value: 1
  misc_feature: MA Experiment 20000144 PARAMETER Experiment Name: At_42deg_Heat_cDNA_P Parameter: Tissue Value: Aerial
  misc_feature: MA Experiment ID: 20000171 Result: Up-regulated in Transcription
  misc_feature: MA Experiment 20000171 PARAMETER Experiment Name: At_42deg_Heat_P Parameter: Age (day) Value: 14
  misc_feature: MA Experiment 20000171 PARAMETER Experiment Name: At_42deg_Heat_P Parameter: Organism Value: A. thaliana
  misc_feature: MA Experiment 20000171 PARAMETER Experiment Name: At_42deg_Heat_P Parameter: Plant Line Value: WS
  misc_feature: MA Experiment 20000171 PARAMETER Experiment Name: At_42deg_Heat_P Parameter: Temperature (deg C) Value: 42 vs. 22
  misc_feature: MA Experiment 20000171 PARAMETER Experiment Name: At_42deg_Heat_P Parameter: Timepoint (hr) Value: 1
  misc_feature: MA Experiment 20000171 PARAMETER Experiment Name: At_42deg_Heat_P Parameter: Tissue Value: Aerial
  misc_feature: MA Experiment ID: 20000173 Result: Up-regulated in Transcription
  misc_feature: MA Experiment 20000173 PARAMETER Experiment Name: At_42deg_Heat_P Parameter: Age (day) Value: 14
  misc_feature: MA Experiment 20000173 PARAMETER Experiment Name: At_42deg_Heat_P Parameter: Organism Value: A. thaliana
  misc_feature: MA Experiment 20000173 PARAMETER Experiment Name: At_42deg_Heat_P Parameter: Plant Line Value: WS
  misc_feature: MA Experiment 20000173 PARAMETER Experiment Name: At_42deg_Heat_P Parameter: Temperature (deg C) Value: 42 vs. 22
  misc_feature: MA Experiment 20000173 PARAMETER Experiment Name: At_42deg_Heat_P Parameter: Timepoint (hr) Value: 6
  misc_feature: MA Experiment 20000173 PARAMETER Experiment Name: At_42deg_Heat_P Parameter: Tissue Value: Aerial
  misc_feature: MA Experiment ID: 20000185 Result: Down-regulated in Transcription
  misc_feature: MA Experiment 20000185 PARAMETER Experiment Name: At_Roots__P Parameter: Age (day) Value: 7 vs. 21
  misc_feature: MA Experiment 20000185 PARAMETER Experiment Name: At_Roots__P Parameter: Organism Value: A. thaliana
  misc_feature: MA Experiment 20000185 PARAMETER Experiment Name: At_Roots__P Parameter: Tissue Value: Roots vs. Whole Plant
  misc_feature: MA Experiment ID: 20000224 Result: Down-regulated in Transcription
  misc_feature: MA Experiment ID: 20000234 Result: Down-regulated in Transcription
  misc_feature: MA Experiment 20000234 PARAMETER Experiment Name: At_Siliques_P Parameter: Age (day) Value: 21
  misc_feature: MA Experiment 20000234 PARAMETER Experiment Name: At_Siliques_P Parameter: Organism Value: A. thaliana
  misc_feature: MA Experiment 20000234 PARAMETER Experiment Name: At_Siliques_P Parameter: Plant Line Value: WS
  misc_feature: MA Experiment 20000234 PARAMETER Experiment Name: At_Siliques_P Parameter: Tissue Value: Less Than 5mm Siliques vs. Whole Plant
  misc_feature: MA Experiment ID: 20000235 Result: Down-regulated in Transcription
  misc_feature: MA Experiment 20000235 PARAMETER Experiment Name: At_Siliques_P Parameter: Age (day) Value: 21
  misc_feature: MA Experiment 20000235 PARAMETER Experiment Name: At_Siliques_P Parameter: Organism Value: A. thaliana
  misc_feature: MA Experiment 20000235 PARAMETER Experiment Name: At_Siliques_P Parameter: Plant Line Value: WS
  misc_feature: MA Experiment 20000235 PARAMETER Experiment Name: At_Siliques_P Parameter: Tissue Value: 5-10mm Siliques vs. Whole Plant
  misc_feature: MA Experiment ID: 20000264 Result: Down-regulated in Transcription
  misc_feature: MA Experiment 20000264 PARAMETER Experiment Name: At_Open_Flower_P Parameter: Age (day) Value: 21
  misc_feature: MA Experiment 20000264 PARAMETER Experiment Name: At_Open_Flower_P Parameter: Plant Line Value: WS
  misc_feature: MA Experiment 20000264 PARAMETER Experiment Name: At_Open_Flower_P Parameter: Tissue Value: Open Flower vs. Whole Plant
  misc_feature: MA Experiment ID: 20000265 Result: Down-regulated in Transcription
  misc_feature: MA Experiment 20000265 PARAMETER Experiment Name: At_Open_Flower_P Parameter: Age (day) Value: 21
  misc_feature: MA Experiment 20000265 PARAMETER Experiment Name: At_Open_Flower_P Parameter: Plant Line Value: WS
  misc_feature: MA Experiment 20000265 PARAMETER Experiment Name: At_Open_Flower_P Parameter: Tissue Value: Closed Flower vs. Whole Plant
  misc_feature: MA Experiment ID: 20000286 Result: Down-regulated in Transcription
  misc_feature: MA Experiment 20000286 PARAMETER Experiment Name: At_Open_Flower_P Parameter: Age (day) Value: 21
  misc_feature: MA Experiment 20000286 PARAMETER Experiment Name: At_Open_Flower_P Parameter: Plant Line Value: WS
  misc_feature: MA Experiment 20000286 PARAMETER Experiment Name: At_Open_Flower_P Parameter: Tissue Value: Half Open vs. Whole Plant
  misc_feature: MA Experiment ID: 20000437 Result: Up-regulated in Transcription
  misc_feature: MA Experiment 20000437 PARAMETER Experiment Name: At_Drought_P Parameter: Age (day) Value: 8
  misc_feature: MA Experiment 20000437 PARAMETER Experiment Name: At_Drought_P Parameter: Organism Value: A. thaliana
  misc_feature: MA Experiment 20000437 PARAMETER Experiment Name: At_Drought_P Parameter: Plant Line Value: WS
  misc_feature: MA Experiment 20000437 PARAMETER Experiment Name: At_Drought_P Parameter: Timepoint (hr) Value: 24
  misc_feature: MA Experiment 20000437 PARAMETER Experiment Name: At_Drought_P Parameter: Tissue Value: Whole Plant
  misc_feature: MA Experiment 20000437 PARAMETER Experiment Name: At_Drought_P Parameter: Treatment Value: Drought vs. No Drought
  misc_feature: MA Experiment ID: 20000439 Result: Down-regulated in Transcription
  misc_feature: MA Experiment 20000439 PARAMETER Experiment Name: At_Roots__P Parameter: Age (day) Value: 14 vs. 21
  misc_feature: MA Experiment 20000439 PARAMETER Experiment Name: At_Roots__P Parameter: Organism Value: A. thaliana
  misc_feature: MA Experiment 20000439 PARAMETER Experiment Name: At_Roots__P Parameter: Tissue Value: Roots vs. Whole Plant
  misc_feature: MA Experiment ID: 20000441 Result: Up-regulated in Transcription
  misc_feature: MA Experiment 20000441 PARAMETER Experiment Name: At_1uM_BR-BRZ__P Parameter: Tissue Value: Shoot Apices
  misc_feature: MA Experiment 20000441 PARAMETER Experiment Name: At_1uM_BR-BRZ__P Parameter: Treatment Value: 1uM BR vs. No Treatment
  misc_feature: MA Experiment ID: 20000443 Result: Up-regulated in Transcription
  misc_feature: MA Experiment 20000443 PARAMETER Experiment Name: At_1uM_BR-BRZ__P Parameter: Tissue Value: Shoot Apices
  misc_feature: MA Experiment 20000443 PARAMETER Experiment Name: At_1uM_BR-BRZ__P Parameter: Treatment Value: 1uM BRZ vs. No Treatment
  misc_feature: MA Experiment ID: 20000445 Result: Up-regulated in Transcription
  misc_feature: MA Experiment 20000445 PARAMETER Experiment Name: At_100uM_NAA__P Parameter: Age (day) Value: 14
  misc_feature: MA Experiment 20000445 PARAMETER Experiment Name: At_100uM_NAA__P Parameter: Organism Value: A. thaliana
  misc_feature: MA Experiment 20000445 PARAMETER Experiment Name: At_100uM_NAA__P Parameter: Plant Line Value: WS
  misc_feature: MA Experiment 20000445 PARAMETER Experiment Name: At_100uM_NAA__P Parameter: Timepoint (hr) Value: 6
  misc_feature: MA Experiment 20000445 PARAMETER Experiment Name: At_100uM_NAA__P Parameter: Tissue Value: Aerial
  misc_feature: MA Experiment 20000445 PARAMETER Experiment Name: At_100uM_NAA__P Parameter: Treatment Value: 100uM NAA vs. No Treatment
  misc_feature: MA Experiment ID: 20000495 Result: Down-regulated in Transcription
  misc_feature: MA Experiment 20000495 PARAMETER Experiment Name: At_Guard_Cells_P Parameter: Harvest Date Value: 8/2/2002
  misc_feature: MA Experiment 20000495 PARAMETER Experiment Name: At_Guard_Cells_P Parameter: Organism Value: A. thaliana
  misc_feature: MA Experiment 20000495 PARAMETER Experiment Name: At_Guard_Cells_P Parameter: Tissue Value: Guard Cells vs. Leaves
  misc_feature: MA Experiment ID: 20000496 Result: Down-regulated in Transcription
  misc_feature: MA Experiment 20000496 PARAMETER Experiment Name: At_Guard_Cells_P Parameter: Harvest Date Value: 7/19/2002
  misc_feature: MA Experiment 20000496 PARAMETER Experiment Name: At_Guard_Cells_P Parameter: Organism Value: Canola
  misc_feature: MA Experiment 20000496 PARAMETER Experiment Name: At_Guard_Cells_P Parameter: Tissue Value: Guard Cells vs. Leaves
  misc_feature: MA Experiment ID: 20000527 Result: Up-regulated in Transcription
  misc_feature: MA Experiment 20000527 PARAMETER Experiment Name: At_10percent_PEG_P Parameter: Age (day) Value: 20
  misc_feature: MA Experiment 20000527 PARAMETER Experiment Name: At_10percent_PEG_P Parameter: Organism Value: A. thaliana
  misc_feature: MA Experiment 20000527 PARAMETER Experiment Name: At_10percent_PEG_P Parameter: Plant Line Value: WS
  misc_feature: MA Experiment 20000527 PARAMETER Experiment Name: At_10percent_PEG_P Parameter: Timepoint (day) Value: 20
  misc_feature: MA Experiment 20000527 PARAMETER Experiment Name: At_10percent_PEG_P Parameter: Tissue Value: Whole Plant
  misc_feature: MA Experiment 20000527 PARAMETER Experiment Name: At_10percent_PEG_P Parameter: Treatment Value: 10percent PEG vs. No Treatment
  misc_feature: MA Experiment ID: 20000574 Result: Down-regulated in Transcription
  misc_feature: MA Experiment 20000574 PARAMETER Experiment Name: At_100uM_ABA_Mutants__P Parameter: Organism Value: A. thaliana
  misc_feature: MA Experiment 20000574 PARAMETER Experiment Name: At_100uM_ABA_Mutants__P Parameter: Plant Line Value: CS23 vs. Ler wt
  misc_feature: MA Experiment 20000574 PARAMETER Experiment Name: At_100uM_ABA_Mutants__P Parameter: Timepoint (hr) Value: N/A
  misc_feature: MA Experiment 20000574 PARAMETER Experiment Name: At_100uM_ABA_Mutants__P Parameter: Tissue Value: Whole Plant
  misc_feature: MA Experiment 20000574 PARAMETER Experiment Name: At_100uM_ABA_Mutants__P Parameter: Treatment Value: None
  misc_feature: MA Experiment ID: 20000794 Result: Down-regulated in Transcription
  misc_feature: MA Experiment 20000794 PARAMETER Experiment Name: At_Petals_P Parameter: Age (day) Value: 23-25 days
  misc_feature: MA Experiment 20000794 PARAMETER Experiment Name: At_Petals_P Parameter: Plant Line Value: WS
  misc_feature: MA Experiment 20000794 PARAMETER Experiment Name: At_Petals_P Parameter: Tissue Value: Petals vs. Whole plant
  misc_feature: MA Experiment ID: 20001247 Result: Up-regulated in Transcription
  misc_feature: MA Experiment 20001247 PARAMETER Experiment Name: At_Far-red-induction_P Parameter: Age (day) Value: 7
  misc_feature: MA Experiment 20001247 PARAMETER Experiment Name: At_Far-red-induction_P Parameter: Light Value: Far-red vs. White
  misc_feature: MA Experiment 20001247 PARAMETER Experiment Name: At_Far-red-induction_P Parameter: Organism Value: A. thaliana
  misc_feature: MA Experiment 20001247 PARAMETER Experiment Name: At_Far-red-induction_P Parameter: Plant Line Value: Columbia
  misc_feature: MA Experiment 20001247 PARAMETER Experiment Name: At_Far-red-induction_P Parameter: Timepoint (hr) Value: 1
  misc_feature: MA Experiment 20001247 PARAMETER Experiment Name: At_Far-red-induction_P Parameter: Tissue Value: Whole Plant
  misc_feature: MA Experiment ID: 20001248 Result: Up-regulated in Transcription
  misc_feature: MA Experiment 20001248 PARAMETER Experiment Name: At_Far-red-induction_P Parameter: Age (day) Value: 7
  misc_feature: MA Experiment 20001248 PARAMETER Experiment Name: At_Far-red-induction_P Parameter: Light Value: Far-red vs. White
  misc_feature: MA Experiment 20001248 PARAMETER Experiment Name: At_Far-red-induction_P Parameter: Organism Value: A. thaliana
  misc_feature: MA Experiment 20001248 PARAMETER Experiment Name: At_Far-red-induction_P Parameter: Plant Line Value: Columbia
  misc_feature: MA Experiment 20001248 PARAMETER Experiment Name: At_Far-red-induction_P Parameter: Timepoint (hr) Value: 4
  misc_feature: MA Experiment 20001248 PARAMETER Experiment Name: At_Far-red-induction_P Parameter: Tissue Value: Whole Plant
  misc_feature: MA Experiment ID: 20001450 Result: Up-regulated in Transcription
  misc_feature: MA Experiment 20001450 PARAMETER Experiment Name: At_Far-red-induction_P Parameter: Age (day) Value: 7
  misc_feature: MA Experiment 20001450 PARAMETER Experiment Name: At_Far-red-induction_P Parameter: Light Value: Far-red vs. White
  misc_feature: MA Experiment 20001450 PARAMETER Experiment Name: At_Far-red-induction_P Parameter: Organism Value: A. thaliana
  misc_feature: MA Experiment 20001450 PARAMETER Experiment Name: At_Far-red-induction_P Parameter: Plant Line Value: Columbia
  misc_feature: MA Experiment 20001450 PARAMETER Experiment Name: At_Far-red-induction_P Parameter: Timepoint (hr) Value: 8
  misc_feature: MA Experiment 20001450 PARAMETER Experiment Name: At_Far-red-induction_P Parameter: Tissue Value: Whole Plant
  misc_feature: MA Experiment ID: 20001556 Result: Down-regulated in Transcription
  misc_feature: MA Experiment 20001556 PARAMETER Experiment Name: At_Drought_Soil_Dry_P Parameter: Age (day) Value: 26
  misc_feature: MA Experiment 20001556 PARAMETER Experiment Name: At_Drought_Soil_Dry_P Parameter: Organism Value: A. thaliana
  misc_feature: MA Experiment 20001556 PARAMETER Experiment Name: At_Drought_Soil_Dry_P Parameter: Plant Line Value: WS
  misc_feature: MA Experiment 20001556 PARAMETER Experiment Name: At_Drought_Soil_Dry_P Parameter: Post Timepoint (hr) Value: None
  misc_feature: MA Experiment 20001556 PARAMETER Experiment Name: At_Drought_Soil_Dry_P Parameter: Post-Treatment Value: None
  misc_feature: MA Experiment 20001556 PARAMETER Experiment Name: At_Drought_Soil_Dry_P Parameter: Timepoint (day) Value: 12
  misc_feature: MA Experiment 20001556 PARAMETER Experiment Name: At_Drought_Soil_Dry_P Parameter: Treatment Value: Drought vs. No Drought
  misc_feature: MA Experiment ID: 20001560 Result: Down-regulated in Transcription
  misc_feature: MA Experiment 20001560 PARAMETER Experiment Name: At_Drought_Soil_Dry_P Parameter: Age (day) Value: 28
  misc_feature: MA Experiment 20001560 PARAMETER Experiment Name: At_Drought_Soil_Dry_P Parameter: Organism Value: A. thaliana
  misc_feature: MA Experiment 20001560 PARAMETER Experiment Name: At_Drought_Soil_Dry_P Parameter: Plant Line Value: WS
  misc_feature: MA Experiment 20001560 PARAMETER Experiment Name: At_Drought_Soil_Dry_P Parameter: Post Timepoint (hr) Value: None
  misc_feature: MA Experiment 20001560 PARAMETER Experiment Name: At_Drought_Soil_Dry_P Parameter: Post-Treatment Value: None
  misc_feature: MA Experiment 20001560 PARAMETER Experiment Name: At_Drought_Soil_Dry_P Parameter: Timepoint (day) Value: 14
  misc_feature: MA Experiment 20001560 PARAMETER Experiment Name: At_Drought_Soil_Dry_P Parameter: Treatment Value: Drought vs. No Drought
  misc_feature: MA Experiment ID: 20001757 Result: Down-regulated in Transcription
  misc_feature: MA Experiment 20001757 PARAMETER Experiment Name: At_50mM_NH4NO3_L-to-H_P Parameter: Timepoint (hr) Value: 6
  misc_feature: MA Experiment 20001757 PARAMETER Experiment Name: At_50mM_NH4NO3_L-to-H_P Parameter: Tissue Value: Leaf
  misc_feature: MA Experiment 20001757 PARAMETER Experiment Name: At_50mM_NH4NO3_L-to-H_P Parameter: Treatment Value: 50mM NH4NO3 vs 100mM Mannitol
  misc_feature: MA Experiment ID: 20001910 Result: Up-regulated in Transcription
  misc_feature: MA Experiment 20001910 PARAMETER Experiment Name: At_Drought_Reproduction_P Parameter: Age (day) Value: 37
  misc_feature: MA Experiment 20001910 PARAMETER Experiment Name: At_Drought_Reproduction_P Parameter: Organism Value: A. thaliana
  misc_feature: MA Experiment 20001910 PARAMETER Experiment Name: At_Drought_Reproduction_P Parameter: Plant Line Value: WS
  misc_feature: MA Experiment 20001910 PARAMETER Experiment Name: At_Drought_Reproduction_P Parameter: Timepoint (day) Value: 7
  misc_feature: MA Experiment 20001910 PARAMETER Experiment Name: At_Drought_Reproduction_P Parameter: Tissue Value: Flowers
  misc_feature: MA Experiment 20001910 PARAMETER Experiment Name: At_Drought_Reproduction_P Parameter: Treatment Value: Drought vs. No Drought

SEQ ID NO: 32476 - protein, 288 aa, Arabidopsis thaliana; identical to SEQ ID NO: 28886
  peptide (1)..(288): Ceres Seq. ID no. 12337740
  misc_feature (26)..(285): Homolog of NCBI NO: 15231297 NR Description: hypothetical protein
  misc_feature (26)..(288): Homolog of NCBI NO: 21537164 NR Description: unknown [Arabidopsis thaliana]
  misc_feature (26)..(288): Homolog of NCBI NO: 18404079 NR Description: expressed protein

SEQ ID NO: 32477 - protein, 263 aa, Arabidopsis thaliana; identical to SEQ ID NO: 28887
  peptide (1)..(263): Ceres Seq. ID no. 12337741
  misc_feature (1)..(260): Homolog of NCBI NO: 15231297 NR Description: hypothetical protein
  misc_feature (1)..(263): Homolog of NCBI NO: 21537164 NR Description: unknown [Arabidopsis thaliana]
  misc_feature (1)..(263): Homolog of NCBI NO: 18404079 NR Description: expressed protein

SEQ ID NO: 32478 - DNA, 4277 bp, Arabidopsis thaliana; identical to SEQ ID NO: 28888
  misc_feature (1)..(4277): Ceres Seq. ID no. 13491805
  misc_feature: MA Experiment ID: 108474 Result: Up-regulated in Transcription
  misc_feature: MA Experiment 108474 PARAMETER Experiment Name: At_Drought_Flowers_cDNA_P Parameter: Timepoint (hr) Value: null
  misc_feature: MA Experiment 108474 PARAMETER Experiment Name: At_Drought_Flowers_cDNA_P Parameter: Treatment Value: Drought vs. No Drought
  misc_feature: MA Experiment ID: 108488 Result: Up-regulated in Transcription

SEQ ID NO: 32479 - protein, 1286 aa, Arabidopsis thaliana; identical to SEQ ID NO: 28889
  peptide (1)..(1286): Ceres Seq. ID no. 13491806
  misc_feature (44)..(324): Pfam Name: ABC transporter transmembrane region Pfam Description: ABC transporter transmembrane region
  misc_feature (44)..(324): Pfam Name: ABC transporter transmembrane region Pfam Description: ABC transporter transmembrane region
  misc_feature (1)..(956): Homolog of NCBI NO: 18496818 NR Description: ABC transporter AbcB3 [Dictyostelium discoideum]
  misc_feature (801)..(1247): Homolog of NCBI NO: 25407562 NR Description: hypothetical protein AT4g18050 [imported] -
  misc_feature (27)..(797): Homolog of NCBI NO: 25407562 NR Description: hypothetical protein AT4g18050 [imported] -
  misc_feature (18)..(645): Homolog of NCBI NO: 15233244 NR Description: multidrug resistance P-glycoprotein, putative
  misc_feature (625)..(1261): Homolog of NCBI NO: 15233244 NR Description: multidrug resistance P-glycoprotein, putative
  misc_feature (1)..(956): Homolog of NCBI NO: 18496818 NR Description: ABC transporter AbcB3 [Dictyostelium discoideum]
  misc_feature (27)..(797): Homolog of NCBI NO: 25407562 NR Description: hypothetical protein AT4g18050 [imported] -
  misc_feature (625)..(1261): Homolog of NCBI NO: 15233244 NR Description: multidrug resistance P-glycoprotein, putative
  misc_feature (1)..(1262): Homolog of NCBI NO: 14715462 NR Description: CjMDR1 [Coptis japonica]
  misc_feature (528)..(1262): Homolog of NCBI NO: 15234323 NR Description: multidrug resistance P-glycoprotein, putative
  misc_feature (21)..(634): Homolog of NCBI NO: 15234323 NR Description: multidrug resistance P-glycoprotein, putative
  misc_feature (1)..(642): Homolog of NCBI NO: 27368853 NR Description: MDR-like ABC transporter [Oryza sativa (japonica
  misc_feature (605)..(1266): Homolog of NCBI NO: 27368853 NR Description: MDR-like ABC transporter [Oryza sativa (japonica
  misc_feature (18)..(645): Homolog of NCBI NO: 15233244 NR Description: multidrug resistance P-glycoprotein, putative
  misc_feature (801)..(1247): Homolog of NCBI NO: 25407562 NR Description: hypothetical protein AT4g18050 [imported] -
  misc_feature (605)..(1266): Homolog of NCBI NO: 27368853 NR Description: MDR-like ABC transporter [Oryza sativa (japonica
  misc_feature (1)..(642): Homolog of NCBI NO: 27368853 NR Description: MDR-like ABC transporter [Oryza sativa (japonica
  misc_feature (21)..(634): Homolog of NCBI NO: 15234323 NR Description: multidrug resistance P-glycoprotein, putative
  misc_feature (528)..(1262): Homolog of NCBI NO: 15234323 NR Description: multidrug resistance P-glycoprotein, putative
  misc_feature (1)..(1262): Homolog of NCBI NO: 14715462 NR Description: CjMDR1 [Coptis japonica]

SEQ ID NO: 32480 - protein, 1243 aa, Arabidopsis thaliana; identical to SEQ ID NO: 28890
  peptide (1)..(1243): Ceres Seq. ID no. 13491807
  misc_feature (1)..(281): Pfam Name: ABC transporter transmembrane region Pfam Description: ABC transporter transmembrane region
  misc_feature (1)..(281): Pfam Name: ABC transporter transmembrane region Pfam Description: ABC transporter transmembrane region
  misc_feature (1)..(913): Homolog of NCBI NO: 18496818 NR Description: ABC transporter AbcB3 [Dictyostelium discoideum]
  misc_feature (758)..(1204): Homolog of NCBI NO: 25407562 NR Description: hypothetical protein AT4g18050 [imported] -
  misc_feature (1)..(754): Homolog of NCBI NO: 25407562 NR Description: hypothetical protein AT4g18050 [imported] -
  misc_feature (1)..(602): Homolog of NCBI NO: 15233244 NR Description: multidrug resistance P-glycoprotein, putative
  misc_feature (582)..(1218): Homolog of NCBI NO: 15233244 NR Description: multidrug resistance P-glycoprotein, putative
  misc_feature (1)..(913): Homolog of NCBI NO: 18496818 NR Description: ABC transporter AbcB3 [Dictyostelium discoideum]
  misc_feature (1)..(754): Homolog of NCBI NO: 25407562 NR Description: hypothetical protein AT4g18050 [imported] -
  misc_feature (582)..(1218): Homolog of NCBI NO: 15233244 NR Description: multidrug resistance P-glycoprotein, putative
  misc_feature (1)..(1219): Homolog of NCBI NO: 14715462 NR Description: CjMDR1 [Coptis japonica]
  misc_feature (485)..(1219): Homolog of NCBI NO: 15234323 NR Description: multidrug resistance P-glycoprotein, putative
  misc_feature (1)..(591): Homolog of NCBI NO: 15234323 NR Description: multidrug resistance P-glycoprotein, putative
  misc_feature (1)..(599): Homolog of NCBI NO: 27368853 NR Description: MDR-like ABC transporter [Oryza sativa (japonica
  misc_feature (562)..(1223): Homolog of NCBI NO: 27368853 NR Description: MDR-like ABC transporter [Oryza sativa (japonica
  misc_feature (1)..(602): Homolog of NCBI NO: 15233244 NR Description: multidrug resistance P-glycoprotein, putative
  misc_feature (758)..(1204): Homolog of NCBI NO: 25407562 NR Description: hypothetical protein AT4g18050 [imported] -
  misc_feature (562)..(1223): Homolog of NCBI NO: 27368853 NR Description: MDR-like ABC transporter [Oryza sativa (japonica
  misc_feature (1)..(599): Homolog of NCBI NO: 27368853 NR Description: MDR-like ABC transporter [Oryza sativa (japonica
  misc_feature (1)..(591): Homolog of NCBI NO: 15234323 NR Description: multidrug resistance P-glycoprotein, putative
  misc_feature (485)..(1219): Homolog of NCBI NO: 15234323 NR Description: multidrug resistance P-glycoprotein, putative
  misc_feature (1)..(1219): Homolog of NCBI NO: 14715462 NR Description: CjMDR1 [Coptis japonica]

SEQ ID NO: 32481 - protein, 1205 aa, Arabidopsis thaliana; identical to SEQ ID NO: 28891
  peptide (1)..(1205): Ceres Seq. ID no. 13491808
  misc_feature (1)..(243): Pfam Name: ABC transporter transmembrane region Pfam Description: ABC transporter transmembrane region
  misc_feature (1)..(243): Pfam Name: ABC transporter transmembrane region Pfam Description: ABC transporter transmembrane region
  misc_feature (1)..(875): Homolog of NCBI NO: 18496818 NR Description: ABC transporter AbcB3 [Dictyostelium discoideum]
  misc_feature (720)..(1166): Homolog of NCBI NO: 25407562 NR Description: hypothetical protein AT4g18050 [imported] -
  misc_feature (1)..(716): Homolog of NCBI NO: 25407562 NR Description: hypothetical protein AT4g18050 [imported] -
  misc_feature (1)..(564): Homolog of NCBI NO: 15233244 NR Description: multidrug resistance P-glycoprotein, putative
  misc_feature (544)..(1180): Homolog of NCBI NO: 15233244 NR Description: multidrug resistance P-glycoprotein, putative
  misc_feature (1)..(875): Homolog of NCBI NO: 18496818 NR Description: ABC transporter AbcB3 [Dictyostelium discoideum]
  misc_feature (1)..(716): Homolog of NCBI NO: 25407562 NR Description: hypothetical protein AT4g18050 [imported] -
  misc_feature (544)..(1180): Homolog of NCBI NO: 15233244 NR Description: multidrug resistance P-glycoprotein, putative
  misc_feature (1)..(1181): Homolog of NCBI NO: 14715462 NR Description: CjMDR1 [Coptis japonica]
  misc_feature (447)..(1181): Homolog of NCBI NO: 15234323 NR Description: multidrug resistance P-glycoprotein, putative
  misc_feature (1)..(553): Homolog of NCBI NO: 15234323 NR Description: multidrug resistance P-glycoprotein, putative
  misc_feature (1)..(561): Homolog of NCBI NO: 27368853 NR Description: MDR-like ABC transporter [Oryza sativa (japonica
  misc_feature (524)..(1185): Homolog of NCBI NO: 27368853 NR Description: MDR-like ABC transporter [Oryza sativa (japonica
  misc_feature (1)..(564): Homolog of NCBI NO: 15233244 NR Description: multidrug resistance P-glycoprotein, putative
  misc_feature (720)..(1166): Homolog of NCBI NO: 25407562 NR Description: hypothetical protein AT4g18050 [imported] -
  misc_feature (524)..(1185): Homolog of NCBI NO: 27368853 NR Description: MDR-like ABC transporter [Oryza sativa (japonica
  misc_feature (1)..(561): Homolog of NCBI NO: 27368853 NR Description: MDR-like ABC transporter [Oryza sativa (japonica
  misc_feature (1)..(553): Homolog of NCBI NO: 15234323 NR Description: multidrug resistance P-glycoprotein, putative
  misc_feature (447)..(1181): Homolog of NCBI NO: 15234323 NR Description: multidrug resistance P-glycoprotein, putative
  misc_feature (1)..(1181): Homolog of NCBI NO: 14715462 NR Description: CjMDR1 [Coptis japonica]

SEQ ID NO: 32482 - DNA, 1657 bp, Arabidopsis thaliana; identical to SEQ ID NO: 28892
  misc_feature (1)..(1657): Ceres Seq. ID no. 12339523
  misc_feature: MA Experiment ID: 108434 Result: Up-regulated in Transcription
  misc_feature: MA Experiment 108434 PARAMETER Experiment Name: At_Root_Tips_cDNA_P Parameter: Tissue Value: Root Tips
  misc_feature: MA Experiment ID: 108462 Result: Down-regulated in Transcription
  misc_feature: MA Experiment 108462 PARAMETER Experiment Name: At_Germinating_Seeds_cDNA_P Parameter: Age (day) Value: 2 vs. 0
  misc_feature: MA Experiment 108462 PARAMETER Experiment Name: At_Germinating_Seeds_cDNA_P Parameter: Tissue Value: Germinating Seeds
  misc_feature: MA Experiment ID: 108463 Result: Down-regulated in Transcription
  misc_feature: MA Experiment 108463 PARAMETER Experiment Name: At_Germinating_Seeds_cDNA_P Parameter: Age (day) Value: 3 vs. 0
  misc_feature: MA Experiment 108463 PARAMETER Experiment Name: At_Germinating_Seeds_cDNA_P Parameter: Tissue Value: Germinating Seeds
  misc_feature: MA Experiment ID: 108464 Result: Down-regulated in Transcription
  misc_feature: MA Experiment 108464 PARAMETER Experiment Name: At_Germinating_Seeds_cDNA_P Parameter: Age (day) Value: 4 vs. 0
  misc_feature: MA Experiment 108464 PARAMETER Experiment Name: At_Germinating_Seeds_cDNA_P Parameter: Tissue Value: Germinating Seeds
  misc_feature: MA Experiment ID: 20000224 Result: Up-regulated in Transcription
  misc_feature: MA Experiment ID: 20000227 Result: Up-regulated in Transcription
  misc_feature: MA Experiment 20000227 PARAMETER Experiment Name: At_Root-Tips-vs-Tops_P Parameter: Tissue Value: Root Tips vs. Root Tops
  misc_feature: MA Experiment ID: 20000451 Result: Down-regulated in Transcription
  misc_feature: MA Experiment 20000451 PARAMETER Experiment Name: At_CS6879_Shoots-Roots_P Parameter: Age (day) Value: 14
  misc_feature: MA Experiment 20000451 PARAMETER Experiment Name: At_CS6879_Shoots-Roots_P Parameter: Organism Value: A. thaliana
  misc_feature: MA Experiment 20000451 PARAMETER Experiment Name: At_CS6879_Shoots-Roots_P Parameter: Plant Line Value: CS6879 vs. WS
  misc_feature: MA Experiment 20000451 PARAMETER Experiment Name: At_CS6879_Shoots-Roots_P Parameter: Tissue Value: Roots
  misc_feature: MA Experiment ID: 20000452 Result: Down-regulated in Transcription
  misc_feature: MA Experiment 20000452 PARAMETER Experiment Name: At_CS6879_Shoots-Roots_P Parameter: Age (day) Value: 14
  misc_feature: MA Experiment 20000452 PARAMETER Experiment Name: At_CS6879_Shoots-Roots_P Parameter: Organism Value: A. thaliana
  misc_feature: MA Experiment 20000452 PARAMETER Experiment Name: At_CS6879_Shoots-Roots_P Parameter: Plant Line Value: CS6879 vs. WS
  misc_feature: MA Experiment 20000452 PARAMETER Experiment Name: At_CS6879_Shoots-Roots_P Parameter: Tissue Value: Shoots
  misc_feature: MA Experiment ID: 20000573 Result: Down-regulated in Transcription
  misc_feature: MA Experiment 20000573 PARAMETER Experiment Name: At_100uM_ABA_Mutants__P Parameter: Organism Value: A. thaliana
  misc_feature: MA Experiment 20000573 PARAMETER Experiment Name: At_100uM_ABA_Mutants__P Parameter: Plant Line Value: CS22 vs. Ler wt
  misc_feature: MA Experiment 20000573 PARAMETER Experiment Name: At_100uM_ABA_Mutants__P Parameter: Timepoint (hr) Value: N/A
  misc_feature: MA Experiment 20000573 PARAMETER Experiment Name: At_100uM_ABA_Mutants__P Parameter: Tissue Value: Whole Plant
  misc_feature: MA Experiment 20000573 PARAMETER Experiment Name: At_100uM_ABA_Mutants__P Parameter: Treatment Value: None
  misc_feature: MA Experiment ID: 20000574 Result: Down-regulated in Transcription
  misc_feature: MA Experiment 20000574 PARAMETER Experiment Name: At_100uM_ABA_Mutants__P Parameter: Organism Value: A. thaliana
  misc_feature: MA Experiment 20000574 PARAMETER Experiment Name: At_100uM_ABA_Mutants__P Parameter: Plant Line Value: CS23 vs. Ler wt
  misc_feature: MA Experiment 20000574 PARAMETER Experiment Name: At_100uM_ABA_Mutants__P Parameter: Timepoint (hr) Value: N/A
  misc_feature: MA Experiment 20000574 PARAMETER Experiment Name: At_100uM_ABA_Mutants__P Parameter: Tissue Value: Whole Plant
  misc_feature: MA Experiment 20000574 PARAMETER Experiment Name: At_100uM_ABA_Mutants__P Parameter: Treatment Value: None
  misc_feature: MA Experiment ID: 20001557 Result: Up-regulated in Transcription
  misc_feature: MA Experiment 20001557 PARAMETER Experiment Name: At_Drought_Soil_Dry_P Parameter: Age (day) Value: 27
  misc_feature: MA Experiment 20001557 PARAMETER Experiment Name: At_Drought_Soil_Dry_P Parameter: Organism Value: A. thaliana
  misc_feature: MA Experiment 20001557 PARAMETER Experiment Name: At_Drought_Soil_Dry_P Parameter: Plant Line Value: WS
  misc_feature: MA Experiment 20001557 PARAMETER Experiment Name: At_Drought_Soil_Dry_P Parameter: Post Timepoint (hr) Value: 3
  misc_feature: MA Experiment 20001557 PARAMETER Experiment Name: At_Drought_Soil_Dry_P Parameter: Post-Treatment Value: Re-Water vs. No Drought
  misc_feature: MA Experiment 20001557 PARAMETER Experiment Name: At_Drought_Soil_Dry_P Parameter: Timepoint (day) Value: 13
  misc_feature: MA Experiment 20001557 PARAMETER Experiment Name: At_Drought_Soil_Dry_P Parameter: Treatment Value: Drought vs. No Drought
  misc_feature: MA Experiment ID: 20001558 Result: Up-regulated in Transcription
  misc_feature: MA Experiment 20001558 PARAMETER Experiment Name: At_Drought_Soil_Dry_P Parameter: Age (day) Value: 27
  misc_feature: MA Experiment 20001558 PARAMETER Experiment Name: At_Drought_Soil_Dry_P Parameter: Organism Value: A. thaliana
  misc_feature: MA Experiment 20001558 PARAMETER Experiment Name: At_Drought_Soil_Dry_P Parameter: Plant Line Value: WS
  misc_feature: MA Experiment 20001558 PARAMETER Experiment Name: At_Drought_Soil_Dry_P Parameter: Post Timepoint (hr) Value: 6
  misc_feature: MA Experiment 20001558 PARAMETER Experiment Name: At_Drought_Soil_Dry_P Parameter: Post-Treatment Value: Re-Water vs. No Drought
  misc_feature: MA Experiment 20001558 PARAMETER Experiment Name: At_Drought_Soil_Dry_P Parameter: Timepoint (day) Value: 13
  misc_feature: MA Experiment 20001558 PARAMETER Experiment Name: At_Drought_Soil_Dry_P Parameter: Treatment Value: Drought vs. No Drought

SEQ ID NO: 32483 - protein, 318 aa, Arabidopsis thaliana; identical to SEQ ID NO: 28893
  peptide (1)..(318): Ceres Seq. ID no. 12339524
  misc_feature (95)..(315): Pfam Name: Caldesmon Pfam Description: Caldesmon
  misc_feature (25)..(308): Homolog of NCBI NO: 23001116 NR Description: hypothetical protein [Magnetococcus sp. MC-1]
  misc_feature (25)..(301): Homolog of NCBI NO: 8096269 NR Description: KED [Nicotiana tabacum]
  misc_feature (107)..(318): Homolog of NCBI NO: 7522210 NR Description: hypothetical protein pAFD103 - apple tree
  misc_feature (1)..(130): Homolog of NCBI NO: 34906156 NR Description: P0509B06.15 [Oryza sativa (japonica
  misc_feature (108)..(318): Homolog of NCBI NO: 34906156 NR Description: P0509B06.15 [Oryza sativa (japonica
  misc_feature (1)..(318): Homolog of NCBI NO: 33620414 NR Description: M355 [Lilium longiflorum]
  misc_feature (1)..(318): Homolog of NCBI NO: 15233865 NR Description: putative protein; protein id: At4g32610.1
  misc_feature (1)..(318): Homolog of NCBI NO: 17529066 NR Description: unknown protein [Arabidopsis thaliana]
  misc_feature (1)..(318): Homolog of NCBI NO: 21537167 NR Description: unknown [Arabidopsis thaliana]
  misc_feature (1)..(318): Homolog of NCBI NO: 18400901 NR Description: expressed protein

SEQ ID NO: 32484 - DNA, 883 bp, Arabidopsis thaliana; identical to SEQ ID NO: 28894
  misc_feature (1)..(883): Ceres Seq. ID no. 13490436
  misc_feature: MA Experiment ID: 20000171 Result: Down-regulated in Transcription
  misc_feature: MA Experiment 20000171 PARAMETER Experiment Name: At_42deg_Heat_P Parameter: Age (day) Value: 14
  misc_feature: MA Experiment 20000171 PARAMETER Experiment Name: At_42deg_Heat_P Parameter: Organism Value: A. thaliana
  misc_feature: MA Experiment 20000171 PARAMETER Experiment Name: At_42deg_Heat_P Parameter: Plant Line Value: WS
  misc_feature: MA Experiment 20000171 PARAMETER Experiment Name: At_42deg_Heat_P Parameter: Temperature (deg C) Value: 42 vs. 22
  misc_feature: MA Experiment 20000171 PARAMETER Experiment Name: At_42deg_Heat_P Parameter: Timepoint (hr) Value: 1
  misc_feature: MA Experiment 20000171 PARAMETER Experiment Name: At_42deg_Heat_P Parameter: Tissue Value: Aerial
  misc_feature: MA Experiment ID: 20000173 Result: Down-regulated in Transcription
  misc_feature: MA Experiment 20000173 PARAMETER Experiment Name: At_42deg_Heat_P Parameter: Age (day) Value: 14
  misc_feature: MA Experiment 20000173 PARAMETER Experiment Name: At_42deg_Heat_P Parameter: Organism Value: A. thaliana
  misc_feature: MA Experiment 20000173 PARAMETER Experiment Name: At_42deg_Heat_P Parameter: Plant Line Value: WS
  misc_feature: MA Experiment 20000173 PARAMETER Experiment Name: At_42deg_Heat_P Parameter: Temperature (deg C) Value: 42 vs. 22
  misc_feature: MA Experiment 20000173 PARAMETER Experiment Name: At_42deg_Heat_P Parameter: Timepoint (hr) Value: 6
  misc_feature: MA Experiment 20000173 PARAMETER Experiment Name: At_42deg_Heat_P Parameter: Tissue Value: Aerial
  misc_feature: MA Experiment ID: 20000180 Result: Up-regulated in Transcription
  misc_feature: MA Experiment 20000180 PARAMETER Experiment Name: At_Germinating_Seeds_P Parameter: Age (hr) Value: 24 vs. 0
  misc_feature: MA Experiment 20000180 PARAMETER Experiment Name: At_Germinating_Seeds_P Parameter: Tissue Value: Germinating Seeds
  misc_feature: MA Experiment ID: 20001451 Result: Up-regulated in Transcription
  misc_feature: MA Experiment 20001451 PARAMETER Experiment Name: At_Far-red-induction_P Parameter: Age (day) Value: 7
  misc_feature: MA Experiment 20001451 PARAMETER Experiment Name: At_Far-red-induction_P Parameter: Light Value: Far-red vs. White
  misc_feature: MA Experiment 20001451 PARAMETER Experiment Name: At_Far-red-induction_P Parameter: Organism Value: A. thaliana
  misc_feature: MA Experiment 20001451 PARAMETER Experiment Name: At_Far-red-induction_P Parameter: Plant Line Value: Columbia
  misc_feature: MA Experiment 20001451 PARAMETER Experiment Name: At_Far-red-induction_P Parameter: Timepoint (hr) Value: 24
  misc_feature: MA Experiment 20001451 PARAMETER Experiment Name: At_Far-red-induction_P Parameter: Tissue Value: Whole Plant
  misc_feature: MA Experiment ID: 20001560 Result: Up-regulated in Transcription
  misc_feature: MA Experiment 20001560 PARAMETER Experiment Name: At_Drought_Soil_Dry_P Parameter: Age (day) Value: 28
  misc_feature: MA Experiment 20001560 PARAMETER Experiment Name: At_Drought_Soil_Dry_P Parameter: Organism Value: A. thaliana
  misc_feature: MA Experiment 20001560 PARAMETER Experiment Name: At_Drought_Soil_Dry_P Parameter: Plant Line Value: WS
  misc_feature: MA Experiment 20001560 PARAMETER Experiment Name: At_Drought_Soil_Dry_P Parameter: Post Timepoint (hr) Value: None
  misc_feature: MA Experiment 20001560 PARAMETER Experiment Name: At_Drought_Soil_Dry_P Parameter: Post-Treatment Value: None
  misc_feature: MA Experiment 20001560 PARAMETER Experiment Name: At_Drought_Soil_Dry_P Parameter: Timepoint (day) Value: 14
  misc_feature: MA Experiment 20001560 PARAMETER Experiment Name: At_Drought_Soil_Dry_P Parameter: Treatment Value: Drought vs. No Drought
  misc_feature: MA Experiment ID: 20001905 Result: Down-regulated in Transcription
  misc_feature: MA Experiment 20001905 PARAMETER Experiment Name: At_Drought_Reproduction_P Parameter: Age (day) Value: 40
  misc_feature: MA Experiment 20001905 PARAMETER Experiment Name: At_Drought_Reproduction_P Parameter: Organism Value: A. thaliana
  misc_feature: MA Experiment 20001905 PARAMETER Experiment Name: At_Drought_Reproduction_P Parameter: Plant Line Value: WS
  misc_feature: MA Experiment 20001905 PARAMETER Experiment Name: At_Drought_Reproduction_P Parameter: Timepoint (day) Value: 10
  misc_feature: MA Experiment 20001905 PARAMETER Experiment Name: At_Drought_Reproduction_P Parameter: Tissue Value: Rosettes
  misc_feature: MA Experiment 20001905 PARAMETER Experiment Name: At_Drought_Reproduction_P Parameter: Treatment Value: Drought vs. No Drought

SEQ ID NO: 32485 - protein, 141 aa, Arabidopsis thaliana; identical to SEQ ID NO: 28895
  peptide (1)..(141): Ceres Seq. ID no. 13490437
  misc_feature (1)..(128): Homolog of NCBI NO: 18410791 NR Description: expressed protein [Arabidopsis thaliana]
  misc_feature (1)..(128): Homolog of NCBI NO: 21553446 NR Description: unknown [Arabidopsis thaliana]
  misc_feature (1)..(138): Homolog of NCBI NO: 33088054 NR Description: unknown [Setaria italica]
  misc_feature (1)..(141): Homolog of NCBI NO: 15230905 NR Description: expressed protein [Arabidopsis thaliana]
  misc_feature (1)..(141): Homolog of NCBI NO: 21537173 NR Description: unknown [Arabidopsis thaliana]
  misc_feature (1)..(141): Homolog of NCBI NO: 18405905 NR Description: expressed protein [Arabidopsis thaliana]

SEQ ID NO: 32486 - protein, 102 aa, Arabidopsis thaliana; identical to SEQ ID NO: 28896
  peptide (1)..(102): Ceres Seq. ID no. 13490438
  misc_feature (1)..(89): Homolog of NCBI NO: 18410791 NR Description: expressed protein [Arabidopsis thaliana]
  misc_feature (1)..(89): Homolog of NCBI NO: 21553446 NR Description: unknown [Arabidopsis thaliana]
  misc_feature (1)..(99): Homolog of NCBI NO: 33088054 NR Description: unknown [Setaria italica]
  misc_feature (1)..(102): Homolog of NCBI NO: 15230905 NR Description: expressed protein [Arabidopsis thaliana]
  misc_feature (1)..(102): Homolog of NCBI NO: 21537173 NR Description: unknown [Arabidopsis thaliana]
  misc_feature (1)..(102): Homolog of NCBI NO: 18405905 NR Description: expressed protein [Arabidopsis thaliana]

SEQ ID NO: 32487 - protein, 87 aa, Arabidopsis thaliana; identical to SEQ ID NO: 28897
  peptide (1)..(87): Ceres Seq. ID no. 13490439
  misc_feature (1)..(74): Homolog of NCBI NO: 18410791 NR Description: expressed protein [Arabidopsis thaliana]
  misc_feature (1)..(74): Homolog of NCBI NO: 21553446 NR Description: unknown [Arabidopsis thaliana]
  misc_feature (1)..(84): Homolog of NCBI NO: 33088054 NR Description: unknown [Setaria italica]
  misc_feature (1)..(87): Homolog of NCBI NO: 15230905 NR Description: expressed protein [Arabidopsis thaliana]
  misc_feature (1)..(87): Homolog of NCBI NO: 21537173 NR Description: unknown [Arabidopsis thaliana]
  misc_feature (1)..(87): Homolog of NCBI NO: 18405905 NR Description: expressed protein [Arabidopsis thaliana]

SEQ ID NO: 32488 - DNA, 1559 bp, Arabidopsis thaliana; identical to SEQ ID NO: 28898
  misc_feature (1)..(1559): Ceres Seq. ID no. 13487605
  misc_feature: MA Experiment ID: 108595 Result: Up-regulated in Transcription
  misc_feature: MA Experiment 108595 PARAMETER Experiment Name: At_Ler-pi_Ovule_cDNA_P Parameter: Plant Line Value: null
  misc_feature: MA Experiment ID: 20000144 Result: Up-regulated in Transcription
  misc_feature: MA Experiment 20000144 PARAMETER Experiment Name: At_42deg_Heat_cDNA_P Parameter: Temperature (deg C) Value: 42 vs. 22
  misc_feature: MA Experiment 20000144 PARAMETER Experiment Name: At_42deg_Heat_cDNA_P Parameter: Timepoint (hr) Value: 1
  misc_feature: MA Experiment 20000144 PARAMETER Experiment Name: At_42deg_Heat_cDNA_P Parameter: Tissue Value: Aerial
  misc_feature: MA Experiment ID: 20000173 Result: Up-regulated in Transcription
  misc_feature: MA Experiment 20000173 PARAMETER Experiment Name: At_42deg_Heat_P Parameter: Age (day) Value: 14
  misc_feature: MA Experiment 20000173 PARAMETER Experiment Name: At_42deg_Heat_P Parameter: Organism Value: A. thaliana
  misc_feature: MA Experiment 20000173 PARAMETER Experiment Name: At_42deg_Heat_P Parameter: Plant Line Value: WS
  misc_feature: MA Experiment 20000173 PARAMETER Experiment Name: At_42deg_Heat_P Parameter: Temperature (deg C) Value: 42 vs. 22
  misc_feature: MA Experiment 20000173 PARAMETER Experiment Name: At_42deg_Heat_P Parameter: Timepoint (hr) Value: 6
  misc_feature: MA Experiment 20000173 PARAMETER Experiment Name: At_42deg_Heat_P Parameter: Tissue Value: Aerial
  misc_feature: MA Experiment ID: 20000437 Result: Up-regulated in Transcription
  misc_feature: MA Experiment 20000437 PARAMETER Experiment Name: At_Drought_P Parameter: Age (day) Value: 8
  misc_feature: MA Experiment 20000437 PARAMETER Experiment Name: At_Drought_P Parameter: Organism Value: A. thaliana
  misc_feature: MA Experiment 20000437 PARAMETER Experiment Name: At_Drought_P Parameter: Plant Line Value: WS
  misc_feature: MA Experiment 20000437 PARAMETER Experiment Name: At_Drought_P Parameter: Timepoint (hr) Value: 24
  misc_feature: MA Experiment 20000437 PARAMETER Experiment Name: At_Drought_P Parameter: Tissue Value: Whole Plant
  misc_feature: MA Experiment 20000437 PARAMETER Experiment Name: At_Drought_P Parameter: Treatment Value: Drought vs. No Drought
  misc_feature: MA Experiment ID: 20001905 Result: Up-regulated in Transcription
  misc_feature: MA Experiment 20001905 PARAMETER Experiment Name: At_Drought_Reproduction_P Parameter: Age (day) Value: 40
  misc_feature: MA Experiment 20001905 PARAMETER Experiment Name: At_Drought_Reproduction_P Parameter: Organism Value: A. thaliana
  misc_feature: MA Experiment 20001905 PARAMETER Experiment Name: At_Drought_Reproduction_P Parameter: Plant Line Value: WS
  misc_feature: MA Experiment 20001905 PARAMETER Experiment Name: At_Drought_Reproduction_P Parameter: Timepoint (day) Value: 10
  misc_feature: MA Experiment 20001905 PARAMETER Experiment Name: At_Drought_Reproduction_P Parameter: Tissue Value: Rosettes
  misc_feature: MA Experiment 20001905 PARAMETER Experiment Name: At_Drought_Reproduction_P Parameter: Treatment Value: Drought vs. No Drought
  misc_feature: Phenotype: ROSETTE LEAVES Shape-Oval
  misc_feature: Phenotype: ROSETTE LEAVES Shape-Oval
  misc_feature: Phenotype: ROSETTE LEAVES Wax-Glossy
  misc_feature: Phenotype: WHOLE PLANT Size-Small
  misc_feature: Phenotype: INFLORESCENCE Flowering Time-Late Flowering
  misc_feature: Phenotype: INFLORESCENCE Height-Short
  misc_feature: Phenotype: ROSETTE LEAVES Curled-Curled 3
  misc_feature: Phenotype: ROSETTE LEAVES Shape-Oval
  misc_feature: Phenotype: ROSETTE LEAVES Shape-Serrate
  misc_feature: Phenotype: INFLORESCENCE Flowering Time-Late Flowering
  misc_feature: Phenotype: INFLORESCENCE Height-Short
  misc_feature: Phenotype: ROSETTE LEAVES Curled-Curled 3
  misc_feature: Phenotype: ROSETTE LEAVES Shape-Oval
  misc_feature: Phenotype: ROSETTE LEAVES Shape-Serrate
  misc_feature: Phenotype: INFLORESCENCE Flowering Time-Late Flowering
  misc_feature: Phenotype: INFLORESCENCE Height-Short
  misc_feature: Phenotype: ROSETTE LEAVES Shape-Serrate
  misc_feature: Phenotype: ROSETTE LEAVES Other
  misc_feature: Phenotype: WHOLE PLANT Size-Large
  misc_feature: Phenotype: ROSETTE LEAVES Petiole Length-Short Petioles
  misc_feature: Phenotype: ROSETTE LEAVES Shape-Oval
  misc_feature: Phenotype: WHOLE PLANT Size-Large
  misc_feature: Phenotype: WHOLE PLANT Size-Large
  misc_feature: Phenotype: ROSETTE LEAVES Petiole Length-Short Petioles
  misc_feature: Phenotype: ROSETTE LEAVES Shape-Oval
  misc_feature: Phenotype: WHOLE PLANT Size-Large
  misc_feature: Phenotype: ROSETTE LEAVES Petiole Length-Short Petioles
  misc_feature: Phenotype: ROSETTE LEAVES Shape-Oval
  misc_feature: Phenotype: INFLORESCENCE Flowering Time-Late Flowering
  misc_feature: Phenotype: ROSETTE LEAVES Shape-Oval
  misc_feature: Phenotype: INFLORESCENCE Flowering Time-Late Flowering
  misc_feature: Phenotype: ROSETTE LEAVES Disorganized Rosette-Disorganized Rosette
  misc_feature: Phenotype: ROSETTE LEAVES Other
  misc_feature: Phenotype: INFLORESCENCE Flowering Time-Late Flowering
  misc_feature: Phenotype: ROSETTE LEAVES Shape-Oval
  misc_feature: Phenotype: ROSETTE LEAVES Shape-Oval
  misc_feature: Phenotype: WHOLE PLANT Size-Small
  misc_feature: Phenotype: INFLORESCENCE Flowering Time-Late Flowering
  misc_feature: Phenotype: INFLORESCENCE Height-Short
  misc_feature: Phenotype: ROSETTE LEAVES Curled-Curled 2

SEQ ID NO: 32489 - protein, 385 aa, Arabidopsis thaliana; identical to SEQ ID NO: 28899
  peptide (1)..(385): Ceres Seq. ID no. 13487606
  misc_feature (280)..(382): Homolog of NCBI NO: 15222765 NR Description: hypothetical protein [Arabidopsis thaliana]
  misc_feature (175)..(298): Homolog of NCBI NO: 15222765 NR Description: hypothetical protein [Arabidopsis thaliana]
  misc_feature (1)..(59): Homolog of NCBI NO: 9280327 NR Description: gb|AAD43149.1~gene_id:K13E13.21~strong similarity
  misc_feature (181)..(383): Homolog of NCBI NO: 9280327 NR Description: gb|AAD43149.1~gene_id:K13E13.21~strong similarity
  misc_feature (1)..(59): Homolog of NCBI NO: 15230276 NR Description: hypothetical protein [Arabidopsis thaliana]
  misc_feature (189)..(383): Homolog of NCBI NO: 15230276 NR Description: hypothetical protein [Arabidopsis thaliana]
  misc_feature (169)..(385): Homolog of NCBI NO: 32488657 NR Description: OSJNBa0087O24.7 [Oryza sativa (japonica
  misc_feature (1)..(345): Homolog of NCBI NO: 7486830 NR Description: hypothetical protein T10I14.190 - Arabidopsis
  misc_feature (1)..(385): Homolog of NCBI NO: 21537175 NR Description: unknown [Arabidopsis thaliana]
  misc_feature (1)..(385): Homolog of NCBI NO: 18415906 NR Description: expressed protein [Arabidopsis thaliana]

SEQ ID NO: 32490 - protein, 288 aa, Arabidopsis thaliana; identical to SEQ ID NO: 28900
  peptide (1)..(288): Ceres Seq. ID no. 13487607
  misc_feature (183)..(285): Homolog of NCBI NO: 25405318 NR Description: hypothetical protein F13F21.4 [imported] -
  misc_feature (78)..(201): Homolog of NCBI NO: 25405318 NR Description: hypothetical protein F13F21.4 [imported] -
  misc_feature (183)..(285): Homolog of NCBI NO: 15222765 NR Description: hypothetical protein [Arabidopsis thaliana]
  misc_feature (78)..(201): Homolog of NCBI NO: 15222765 NR Description: hypothetical protein [Arabidopsis thaliana]
  misc_feature (84)..(286): Homolog of NCBI NO: 9280327 NR Description: gb|AAD43149.1~gene_id:K13E13.21~strong similarity
  misc_feature (92)..(286): Homolog of NCBI NO: 15230276 NR Description: hypothetical protein [Arabidopsis thaliana]
  misc_feature (72)..(288): Homolog of NCBI NO: 32488657 NR Description: OSJNBa0087O24.7 [Oryza sativa (japonica
  misc_feature (1)..(248): Homolog of NCBI NO: 7486830 NR Description: hypothetical protein T10I14.190 - Arabidopsis
  misc_feature (1)..(288): Homolog of NCBI NO: 21537175 NR Description: unknown [Arabidopsis thaliana]
  misc_feature (1)..(288): Homolog of NCBI NO: 18415906 NR Description: expressed protein [Arabidopsis thaliana]

SEQ ID NO: 32491 - protein, 241 aa, Arabidopsis thaliana; identical to SEQ ID NO: 28901
  peptide (1)..(241): Ceres Seq. ID no. 13487608
  misc_feature (136)..(238): Homolog of NCBI NO: 25405318 NR Description: hypothetical protein F13F21.4 [imported] -
  misc_feature (31)..(154): Homolog of NCBI NO: 25405318 NR Description: hypothetical protein F13F21.4 [imported] -
  misc_feature (136)..(238): Homolog of NCBI NO: 15222765 NR Description: hypothetical protein [Arabidopsis thaliana]
  misc_feature (31)..(154): Homolog of NCBI NO: 15222765 NR Description: hypothetical protein [Arabidopsis thaliana]
  misc_feature (37)..(239): Homolog of NCBI NO: 9280327 NR Description: gb|AAD43149.1~gene_id:K13E13.21~strong similarity
  misc_feature (45)..(239): Homolog of NCBI NO: 15230276 NR Description: hypothetical protein [Arabidopsis thaliana]
  misc_feature (25)..(241): Homolog of NCBI NO: 32488657 NR Description: OSJNBa0087O24.7 [Oryza sativa (japonica
  misc_feature (1)..(201): Homolog of NCBI NO: 7486830 NR Description: hypothetical protein T10I14.190 - Arabidopsis
  misc_feature (1)..(241): Homolog of NCBI NO: 21537175 NR Description: unknown [Arabidopsis thaliana]
  misc_feature (1)..(241): Homolog of NCBI NO: 18415906 NR Description: expressed protein [Arabidopsis thaliana]

SEQ ID NO: 32492 - DNA, 876 bp, Arabidopsis thaliana; identical to SEQ ID NO: 28902
  misc_feature (1)..(876): Ceres Seq. ID no. 12372150
  misc_feature: MA Experiment ID: 108434 Result: Up-regulated in Transcription
  misc_feature: MA Experiment 108434 PARAMETER Experiment Name: At_Root_Tips_cDNA_P Parameter: Tissue Value: Root Tips
  misc_feature: MA Experiment ID: 108462 Result: Down-regulated in Transcription
  misc_feature: MA Experiment 108462 PARAMETER Experiment Name: At_Germinating_Seeds_cDNA_P Parameter: Age (day) Value: 2 vs. 0
  misc_feature: MA Experiment 108462 PARAMETER Experiment Name: At_Germinating_Seeds_cDNA_P Parameter: Tissue Value: Germinating Seeds
  misc_feature: MA Experiment ID: 108463 Result: Down-regulated in Transcription
  misc_feature: MA Experiment 108463 PARAMETER Experiment Name: At_Germinating_Seeds_cDNA_P Parameter: Age (day) Value: 3 vs. 0
  misc_feature: MA Experiment 108463 PARAMETER Experiment Name: At_Germinating_Seeds_cDNA_P Parameter: Tissue Value: Germinating Seeds
  misc_feature: MA Experiment ID: 108561 Result: Down-regulated in Transcription
  misc_feature: MA Experiment 108561 PARAMETER Experiment Name: At_100uM_ABA_cDNA_P Parameter: Timepoint (hr) Value: 6
  misc_feature: MA Experiment 108561 PARAMETER Experiment Name: At_100uM_ABA_cDNA_P Parameter: Tissue Value: Aerial
  misc_feature: MA Experiment 108561 PARAMETER Experiment Name: At_100uM_ABA_cDNA_P Parameter: Treatment Value: 100uM ABA vs. No Treatment
  misc_feature: MA Experiment ID: 108585 Result: Down-regulated in Transcription
  misc_feature: MA Experiment 108585 PARAMETER Experiment Name: At_5mM_NaNP_cDNA_P Parameter: Timepoint (hr) Value: 6
  misc_feature: MA Experiment 108585 PARAMETER Experiment Name: At_5mM_NaNP_cDNA_P Parameter: Tissue Value: Aerial
  misc_feature: MA Experiment 108585 PARAMETER Experiment Name: At_5mM_NaNP_cDNA_P Parameter: Treatment Value: null
  misc_feature: MA Experiment ID: 108595 Result: Down-regulated in Transcription
  misc_feature: MA Experiment 108595 PARAMETER Experiment Name: At_Ler-pi_Ovule_cDNA_P Parameter: Plant Line Value: null

SEQ ID NO: 32493 - protein, 193 aa, Arabidopsis thaliana; identical to SEQ ID NO: 28903
  peptide (1)..(193): Ceres Seq. ID no. 12372151
  misc_feature (104)..(190): Homolog of NCBI NO: 1093914 NR Description: thioredoxin
  misc_feature (104)..(190): Homolog of NCBI NO: 628902 NR Description: thioredoxin - Chloroflexus aurantiacus
  misc_feature (31)..(190): Homolog of NCBI NO: 21354 NR Description: thioredoxin M precursor (AA -67 to 114) [Spinacia
  misc_feature (83)..(168): Homolog of NCBI NO: 15594407 NR Description: thioredoxin (trxA) [Borrelia burgdorferi]
  misc_feature (100)..(190): Homolog of NCBI NO: 29346866 NR Description: thioredoxin (TRX) [Bacteroides thetaiotaomicron
  misc_feature (92)..(185): Homolog of NCBI NO: 21673615 NR Description: thioredoxin [Chlorobium tepidum TLS]
  misc_feature (75)..(193): Homolog of NCBI NO: 34904898 NR Description: similar to thioredoxin [Oryza sativa (japonica
  misc_feature (69)..(193): Homolog of NCBI NO: 8489792 NR Description: putative thioredoxin [Lycopersicon esculentum]
  misc_feature (11)..(193): Homolog of NCBI NO: 21537179 NR Description: thioredoxin, putative [Arabidopsis thaliana]
  misc_feature (11)..(193): Homolog of NCBI NO: 15230779 NR Description: thioredoxin, putative

SEQ ID NO: 32494 - protein, 183 aa, Arabidopsis thaliana; identical to SEQ ID NO: 28904
  peptide (1)..(183): Ceres Seq. ID no. 12372152
  misc_feature (94)..(180): Homolog of NCBI NO: 1093914 NR Description: thioredoxin
  misc_feature (94)..(180): Homolog of NCBI NO: 628902 NR Description: thioredoxin - Chloroflexus aurantiacus
  misc_feature (21)..(180): Homolog of NCBI NO: 21354 NR Description: thioredoxin M precursor (AA -67 to 114) [Spinacia
  misc_feature (73)..(158): Homolog of NCBI NO: 15594407 NR Description: thioredoxin (trxA) [Borrelia burgdorferi]
  misc_feature (90)..(180): Homolog of NCBI NO: 29346866 NR Description: thioredoxin (TRX) [Bacteroides thetaiotaomicron
  misc_feature (82)..(175): Homolog of NCBI NO: 21673615 NR Description: thioredoxin [Chlorobium tepidum TLS]
  misc_feature (65)..(183): Homolog of NCBI NO: 34904898 NR Description: similar to thioredoxin [Oryza sativa (japonica
  misc_feature (59)..(183): Homolog of NCBI NO: 8489792 NR Description: putative thioredoxin [Lycopersicon esculentum]
  misc_feature (1)..(183): Homolog of NCBI NO: 21537179 NR Description: thioredoxin, putative [Arabidopsis thaliana]
  misc_feature (1)..(183): Homolog of NCBI NO: 15230779 NR Description: thioredoxin, putative

SEQ ID NO: 32495 - protein, 102 aa, Arabidopsis thaliana; identical to SEQ ID NO: 28905
  peptide (1)..(102): Ceres Seq. ID no. 12372153

SEQ ID NO: 32496 - DNA, 1171 bp, Arabidopsis thaliana; identical to SEQ ID NO: 28906
  misc_feature (1)..(1171): Ceres Seq. ID no. 12397135
  misc_feature: MA Experiment ID: 108595 Result: Down-regulated in Transcription
  misc_feature: MA Experiment 108595 PARAMETER Experiment Name: At_Ler-pi_Ovule_cDNA_P Parameter: Plant Line Value: null
  misc_feature: MA Experiment ID: 108668 Result: Down-regulated in Transcription
  misc_feature: MA Experiment 108668 PARAMETER Experiment Name: At_2mM_SA_cDNA_P Parameter: Plant Line Value: WS
  misc_feature: MA Experiment 108668 PARAMETER Experiment Name: At_2mM_SA_cDNA_P Parameter: Timepoint (hr) Value: 6
  misc_feature: MA Experiment 108668 PARAMETER Experiment Name: At_2mM_SA_cDNA_P Parameter: Treatment Value: 2mM SA vs. No Treatment
  misc_feature: MA Experiment ID: 20000180 Result: Up-regulated in Transcription
  misc_feature: MA Experiment 20000180 PARAMETER Experiment Name: At_Germinating_Seeds_P Parameter: Age (hr) Value: 24 vs. 0
  misc_feature: MA Experiment 20000180 PARAMETER Experiment Name: At_Germinating_Seeds_P Parameter: Tissue Value: Germinating Seeds
  misc_feature: MA Experiment ID: 20000182 Result: Down-regulated in Transcription
  misc_feature: MA Experiment 20000182 PARAMETER Experiment Name: At_2mM_SA_P Parameter: Age (day) Value: 14
  misc_feature: MA Experiment 20000182 PARAMETER Experiment Name: At_2mM_SA_P Parameter: Organism Value: A. thaliana
  misc_feature: MA Experiment 20000182 PARAMETER Experiment Name: At_2mM_SA_P Parameter: Plant Line Value: WS
  misc_feature: MA Experiment 20000182 PARAMETER Experiment Name: At_2mM_SA_P Parameter: Timepoint (hr) Value: 6
  misc_feature: MA Experiment 20000182 PARAMETER Experiment Name: At_2mM_SA_P Parameter: Tissue Value: Aerial
  misc_feature: MA Experiment 20000182 PARAMETER Experiment Name: At_2mM_SA_P Parameter: Treatment Value: 2mM SA vs. No Treatment
  misc_feature: MA Experiment ID: 20000185 Result: Down-regulated in Transcription
  misc_feature: MA Experiment 20000185 PARAMETER Experiment Name: At_Roots__P Parameter: Age (day) Value: 7 vs. 21
  misc_feature: MA Experiment 20000185 PARAMETER Experiment Name: At_Roots__P Parameter: Organism Value: A. thaliana
  misc_feature: MA Experiment 20000185 PARAMETER Experiment Name: At_Roots__P Parameter: Tissue Value: Roots vs. Whole Plant
  misc_feature: MA Experiment ID: 20000264 Result: Down-regulated in Transcription
  misc_feature: MA Experiment 20000264 PARAMETER Experiment Name: At_Open_Flower_P Parameter: Age (day) Value: 21
  misc_feature: MA Experiment 20000264 PARAMETER Experiment Name: At_Open_Flower_P Parameter: Plant Line Value: WS
  misc_feature: MA Experiment 20000264 PARAMETER Experiment Name: At_Open_Flower_P Parameter: Tissue Value: Open Flower vs. Whole Plant
  misc_feature: MA Experiment ID: 20000286 Result: Down-regulated in Transcription
  misc_feature: MA Experiment 20000286 PARAMETER Experiment Name: At_Open_Flower_P Parameter: Age (day) Value: 21
  misc_feature: MA Experiment 20000286 PARAMETER Experiment Name: At_Open_Flower_P Parameter: Plant Line Value: WS
  misc_feature: MA Experiment 20000286 PARAMETER Experiment Name: At_Open_Flower_P Parameter: Tissue Value: Half Open vs. Whole Plant
  misc_feature: MA Experiment ID: 20000436 Result: Down-regulated in Transcription
  misc_feature: MA Experiment 20000436 PARAMETER Experiment Name: At_Drought_P Parameter: Age (day) Value: 7
  misc_feature: MA Experiment 20000436 PARAMETER Experiment Name: At_Drought_P Parameter: Organism Value: A. thaliana
  misc_feature: MA Experiment 20000436 PARAMETER Experiment Name: At_Drought_P Parameter: Plant Line Value: WS
  misc_feature: MA Experiment 20000436 PARAMETER Experiment Name: At_Drought_P Parameter: Timepoint (hr) Value: 12
  misc_feature: MA Experiment 20000436 PARAMETER Experiment Name: At_Drought_P Parameter: Tissue Value: Whole Plant
  misc_feature: MA Experiment 20000436 PARAMETER Experiment Name: At_Drought_P Parameter: Treatment Value: Drought vs. No Drought
  misc_feature: MA Experiment ID: 20000437 Result: Down-regulated in Transcription
  misc_feature: MA Experiment 20000437 PARAMETER Experiment Name: At_Drought_P Parameter: Age (day) Value: 8
  misc_feature: MA Experiment 20000437 PARAMETER Experiment Name: At_Drought_P Parameter: Organism Value: A. thaliana
  misc_feature: MA Experiment 20000437 PARAMETER Experiment Name: At_Drought_P Parameter: Plant Line Value: WS
  misc_feature: MA Experiment 20000437 PARAMETER Experiment Name: At_Drought_P Parameter: Timepoint (hr) Value: 24
  misc_feature: MA Experiment 20000437 PARAMETER Experiment Name: At_Drought_P Parameter: Tissue Value: Whole Plant
  misc_feature: MA Experiment 20000437 PARAMETER Experiment Name: At_Drought_P Parameter: Treatment Value: Drought vs. No Drought
  misc_feature: MA Experiment ID: 20000439 Result: Down-regulated in Transcription
  misc_feature: MA Experiment 20000439 PARAMETER Experiment Name: At_Roots__P Parameter: Age (day) Value: 14 vs. 21
  misc_feature: MA Experiment 20000439 PARAMETER Experiment Name: At_Roots__P Parameter: Organism Value: A. thaliana
  misc_feature: MA Experiment 20000439 PARAMETER Experiment Name: At_Roots__P Parameter: Tissue Value: Roots vs. Whole Plant
  misc_feature: MA Experiment ID: 20000794 Result: Down-regulated in Transcription
  misc_feature: MA Experiment 20000794 PARAMETER Experiment Name: At_Petals_P Parameter: Age (day) Value: 23-25 days
  misc_feature: MA Experiment 20000794 PARAMETER Experiment Name: At_Petals_P Parameter: Plant Line Value: WS
  misc_feature: MA Experiment 20000794 PARAMETER Experiment Name: At_Petals_P Parameter: Tissue Value: Petals vs. Whole plant
  misc_feature: MA Experiment ID: 20001757 Result: Up-regulated in Transcription
  misc_feature: MA Experiment 20001757 PARAMETER Experiment Name: At_50mM_NH4NO3_L-to-H_P Parameter: Timepoint (hr) Value: 6
  misc_feature: MA Experiment 20001757 PARAMETER Experiment Name: At_50mM_NH4NO3_L-to-H_P Parameter: Tissue Value: Leaf
  misc_feature: MA Experiment 20001757 PARAMETER Experiment Name: At_50mM_NH4NO3_L-to-H_P Parameter: Treatment Value: 50mM NH4NO3 vs 100mM Mannitol
  misc_feature: MA Experiment ID: 20001905 Result: Down-regulated in Transcription
  misc_feature: MA Experiment 20001905 PARAMETER Experiment Name: At_Drought_Reproduction_P Parameter: Age (day) Value: 40
  misc_feature: MA Experiment 20001905 PARAMETER Experiment Name: At_Drought_Reproduction_P Parameter: Organism Value: A. thaliana
  misc_feature: MA Experiment 20001905 PARAMETER Experiment Name: At_Drought_Reproduction_P Parameter: Plant Line Value: WS
  misc_feature: MA Experiment 20001905 PARAMETER Experiment Name: At_Drought_Reproduction_P Parameter: Timepoint (day) Value: 10
  misc_feature: MA Experiment 20001905 PARAMETER Experiment Name: At_Drought_Reproduction_P Parameter: Tissue Value: Rosettes
  misc_feature: MA Experiment 20001905 PARAMETER Experiment Name: At_Drought_Reproduction_P Parameter: Treatment Value: Drought vs. No Drought
  misc_feature: MA Experiment ID: 20001906 Result: Down-regulated in Transcription
  misc_feature: MA Experiment 20001906 PARAMETER Experiment Name: At_Drought_Reproduction_P Parameter: Age (day) Value: 35
  misc_feature: MA Experiment 20001906 PARAMETER Experiment Name: At_Drought_Reproduction_P Parameter: Organism Value: A. thaliana
  misc_feature: MA Experiment 20001906 PARAMETER Experiment Name: At_Drought_Reproduction_P Parameter: Plant Line Value: WS
  misc_feature: MA Experiment 20001906 PARAMETER Experiment Name: At_Drought_Reproduction_P Parameter: Timepoint (day) Value: 5
  misc_feature: MA Experiment 20001906 PARAMETER Experiment Name: At_Drought_Reproduction_P Parameter: Tissue Value: Siliques
  misc_feature: MA Experiment 20001906 PARAMETER Experiment Name: At_Drought_Reproduction_P Parameter: Treatment Value: Drought vs. No Drought
  misc_feature: MA Experiment ID: 20001907 Result: Down-regulated in Transcription
  misc_feature: MA Experiment 20001907 PARAMETER Experiment Name: At_Drought_Reproduction_P Parameter: Age (day) Value: 37
  misc_feature: MA Experiment 20001907 PARAMETER Experiment Name: At_Drought_Reproduction_P Parameter: Organism Value: A. thaliana
  misc_feature: MA Experiment 20001907 PARAMETER Experiment Name: At_Drought_Reproduction_P Parameter: Plant Line Value: WS
  misc_feature: MA Experiment 20001907 PARAMETER Experiment Name: At_Drought_Reproduction_P Parameter: Timepoint (day) Value: 7
  misc_feature: MA Experiment 20001907 PARAMETER Experiment Name: At_Drought_Reproduction_P Parameter: Tissue Value: Siliques
  misc_feature: MA Experiment 20001907 PARAMETER Experiment Name: At_Drought_Reproduction_P Parameter: Treatment Value: Drought vs. No Drought
  misc_feature: MA Experiment ID: 20001911 Result: Down-regulated in Transcription
  misc_feature: MA Experiment 20001911 PARAMETER Experiment Name: At_Drought_Reproduction_P Parameter: Age (day) Value: 40
  misc_feature: MA Experiment 20001911 PARAMETER Experiment Name: At_Drought_Reproduction_P Parameter: Organism Value: A. thaliana
  misc_feature: MA Experiment 20001911 PARAMETER Experiment Name: At_Drought_Reproduction_P Parameter: Plant Line Value: WS
  misc_feature: MA Experiment 20001911 PARAMETER Experiment Name: At_Drought_Reproduction_P Parameter: Timepoint (day) Value: 10
  misc_feature: MA Experiment 20001911 PARAMETER Experiment Name: At_Drought_Reproduction_P Parameter: Tissue Value: Flowers
  misc_feature: MA Experiment 20001911 PARAMETER Experiment Name: At_Drought_Reproduction_P Parameter: Treatment Value: Drought vs. No Drought

SEQ ID NO: 32497 - protein, 349 aa, Arabidopsis thaliana; identical to SEQ ID NO: 28907
  peptide (1)..(349): Ceres Seq. ID no. 12397136
  misc_feature (127)..(205): Pfam Name: Isocitrate lyase family Pfam Description: Isocitrate lyase family
  misc_feature (42)..(325): Homolog of NCBI NO: 16082233 NR Description: probable carboxyphosphonoenolpyruvate
  misc_feature (59)..(339): Homolog of NCBI NO: 18312827 NR Description: carboxyphosphonoenolpyruvate phosphonomutase
  misc_feature (54)..(339): Homolog of NCBI NO: 17229355 NR Description: carboxyphosphonoenolpyruvate phosphonomutase
  misc_feature (54)..(338): Homolog of NCBI NO: 23043034 NR Description: hypothetical protein [Trichodesmium erythraeum
  misc_feature (78)..(348): Homolog of NCBI NO: 25324627 NR Description: F24J8.7 protein - Arabidopsis thaliana
  misc_feature (48)..(339): Homolog of NCBI NO: 6831519 NR Description: PUTATIVE CARBOXYVINYL-CARBOXYPHOSPHONATE (CARBOXYPHOSPHONOENOLPYRUVATE PHOSPHONOMUTASE) (CPEP
  misc_feature (11)..(348): Homolog of NCBI NO: 30687359 NR Description: expressed protein [Arabidopsis thaliana]
  misc_feature (15)..(349): Homolog of NCBI NO: 6831518 NR Description: Putative carboxyvinyl-carboxyphosphonate (Carboxyphosphonoenolpyruvate phosphonomutase) (CPEP
  misc_feature (13)..(349): Homolog of NCBI NO: 18252195 NR Description: putative carboxyphosphonoenolpyruvate mutase
  misc_feature (11)..(349): Homolog of NCBI NO: 18411340 NR Description: carboxyphosphonoenolpyruvate mutase, putative

SEQ ID NO: 32498 - protein, 339 aa, Arabidopsis thaliana; identical to SEQ ID NO: 28908
  peptide (1)..(339): Ceres Seq. ID no. 12397137
  misc_feature (117)..(195): Pfam Name: Isocitrate lyase family Pfam Description: Isocitrate lyase family
  misc_feature (32)..(315): Homolog of NCBI NO: 16082233 NR Description: probable carboxyphosphonoenolpyruvate
  misc_feature (49)..(329): Homolog of NCBI NO: 18312827 NR Description: carboxyphosphonoenolpyruvate phosphonomutase
  misc_feature (44)..(329): Homolog of NCBI NO: 17229355 NR Description: carboxyphosphonoenolpyruvate phosphonomutase
  misc_feature (44)..(328): Homolog of NCBI NO: 23043034 NR Description: hypothetical protein [Trichodesmium erythraeum
  misc_feature (68)..(338): Homolog of NCBI NO: 25324627 NR Description: F24J8.7 protein - Arabidopsis thaliana
  misc_feature (38)..(329): Homolog of NCBI NO: 6831519 NR Description: PUTATIVE CARBOXYVINYL-CARBOXYPHOSPHONATE (CARBOXYPHOSPHONOENOLPYRUVATE PHOSPHONOMUTASE) (CPEP
  misc_feature (1)..(338): Homolog of NCBI NO: 30687359 NR Description: expressed protein [Arabidopsis thaliana]
  misc_feature (5)..(339): Homolog of NCBI NO: 6831518 NR Description: Putative carboxyvinyl-carboxyphosphonate (Carboxyphosphonoenolpyruvate phosphonomutase) (CPEP
  misc_feature (3)..(339): Homolog of NCBI NO: 18252195 NR Description: putative carboxyphosphonoenolpyruvate mutase
  misc_feature (1)..(339): Homolog of NCBI NO: 18411340 NR Description: carboxyphosphonoenolpyruvate mutase, putative

SEQ ID NO: 32499 - protein, 337 aa, Arabidopsis thaliana; identical to SEQ ID NO: 28909
  peptide (1)..(337): Ceres Seq. ID no. 12397138
  misc_feature (115)..(193): Pfam Name: Isocitrate lyase family Pfam Description: Isocitrate lyase family
  misc_feature (30)..(313): Homolog of NCBI NO: 16082233 NR Description: probable carboxyphosphonoenolpyruvate
  misc_feature (47)..(327): Homolog of NCBI NO: 18312827 NR Description: carboxyphosphonoenolpyruvate phosphonomutase
  misc_feature (42)..(327): Homolog of NCBI NO: 17229355 NR Description: carboxyphosphonoenolpyruvate phosphonomutase
  misc_feature (42)..(326): Homolog of NCBI NO: 23043034 NR Description: hypothetical protein [Trichodesmium erythraeum
  misc_feature (66)..(336): Homolog of NCBI NO: 25324627 NR Description: F24J8.7 protein - Arabidopsis thaliana
  misc_feature (36)..(327): Homolog of NCBI NO: 6831519 NR Description: PUTATIVE CARBOXYVINYL-CARBOXYPHOSPHONATE (CARBOXYPHOSPHONOENOLPYRUVATE PHOSPHONOMUTASE) (CPEP
  misc_feature (1)..(336): Homolog of NCBI NO: 30687359 NR Description: expressed protein [Arabidopsis thaliana]
  misc_feature (3)..(337): Homolog of NCBI NO: 6831518 NR Description: Putative carboxyvinyl-carboxyphosphonate (Carboxyphosphonoenolpyruvate phosphonomutase) (CPEP
  misc_feature (1)..(337): Homolog of NCBI NO: 18252195 NR Description: putative carboxyphosphonoenolpyruvate mutase
  misc_feature (1)..(337): Homolog of NCBI NO: 18411340 NR Description: carboxyphosphonoenolpyruvate mutase, putative

SEQ ID NO: 32500 - DNA, 1982 bp, Arabidopsis thaliana; identical to SEQ ID NO: 28910
  misc_feature (1)..(1982): Ceres Seq. ID no. 13494341
  misc_feature: MA Experiment ID: 20000173 Result: Down-regulated in Transcription
  misc_feature: MA Experiment 20000173 PARAMETER Experiment Name: At_42deg_Heat_P Parameter: Age (day) Value: 14
  misc_feature: MA Experiment 20000173 PARAMETER Experiment Name: At_42deg_Heat_P Parameter: Organism Value: A. thaliana
  misc_feature: MA Experiment 20000173 PARAMETER Experiment Name: At_42deg_Heat_P Parameter: Plant Line Value: WS
  misc_feature: MA Experiment 20000173 PARAMETER Experiment Name: At_42deg_Heat_P Parameter: Temperature (deg C) Value: 42 vs. 22
  misc_feature: MA Experiment 20000173 PARAMETER Experiment Name: At_42deg_Heat_P Parameter: Timepoint (hr) Value: 6
  misc_feature: MA Experiment 20000173 PARAMETER Experiment Name: At_42deg_Heat_P Parameter: Tissue Value: Aerial
  misc_feature: MA Experiment ID: 20000234 Result: Up-regulated in Transcription
  misc_feature: MA Experiment 20000234 PARAMETER Experiment Name: At_Siliques_P Parameter: Age (day) Value: 21
  misc_feature: MA Experiment 20000234 PARAMETER Experiment Name: At_Siliques_P Parameter: Organism Value: A. thaliana
  misc_feature: MA Experiment 20000234 PARAMETER Experiment Name: At_Siliques_P Parameter: Plant Line Value: WS
  misc_feature: MA Experiment 20000234 PARAMETER Experiment Name: At_Siliques_P Parameter: Tissue Value: Less Than 5mm Siliques vs. Whole Plant
  misc_feature: MA Experiment ID: 20001451 Result: Down-regulated in Transcription
  misc_feature: MA Experiment 20001451 PARAMETER Experiment Name: At_Far-red-induction_P Parameter: Age (day) Value: 7
  misc_feature: MA Experiment 20001451 PARAMETER Experiment Name: At_Far-red-induction_P Parameter: Light Value: Far-red vs. White
  misc_feature: MA Experiment 20001451 PARAMETER Experiment Name: At_Far-red-induction_P Parameter: Organism Value: A. thaliana
  misc_feature: MA Experiment 20001451 PARAMETER Experiment Name: At_Far-red-induction_P Parameter: Plant Line Value: Columbia
  misc_feature: MA Experiment 20001451 PARAMETER Experiment Name: At_Far-red-induction_P Parameter: Timepoint (hr) Value: 24
  misc_feature: MA Experiment 20001451 PARAMETER Experiment Name: At_Far-red-induction_P Parameter: Tissue Value: Whole Plant

SEQ ID NO: 32501 - protein, 527 aa, Arabidopsis thaliana; identical to SEQ ID NO: 28911
  peptide (1)..(527): Ceres Seq. ID no. 13494342
  misc_feature (394)..(524): Pfam Name: Pyruvate kinase, alpha/beta domain Pfam Description: Pyruvate kinase, alpha/beta domain
  misc_feature (54)..(527): Homolog of NCBI NO: 25287747 NR Description: probable pyruvate kinase [imported] - Arabidopsis
  misc_feature (37)..(527): Homolog of NCBI NO: 20562907 NR Description: pyruvate kinase-like [Deschampsia antarctica]
  misc_feature (1)..(527): Homolog of NCBI NO: 23308151 NR Description: At2g36580/F1O11.21 [Arabidopsis thaliana]
  misc_feature (1)..(527): Homolog of NCBI NO: 21537122 NR Description: putative pyruvate kinase [Arabidopsis thaliana]
  misc_feature (1)..(527): Homolog of NCBI NO: 18404169 NR Description: pyruvate kinase, putative [Arabidopsis thaliana]
  misc_feature (14)..(527): Homolog of NCBI NO: 11260409 NR Description: pyruvate kinase-like protein - Arabidopsis
  misc_feature (1)..(527): Homolog of NCBI NO: 18409740 NR Description: pyruvate kinase, putative [Arabidopsis thaliana]

SEQ ID NO: 32502 - protein, 514 aa, Arabidopsis thaliana; identical to SEQ ID NO: 28912
  peptide (1)..(514): Ceres Seq. ID no. 13494343
  misc_feature (381)..(511): Pfam Name: Pyruvate kinase, alpha/beta domain Pfam Description: Pyruvate kinase, alpha/beta domain
  misc_feature (41)..(514): Homolog of NCBI NO: 25287747 NR Description: probable pyruvate kinase [imported] - Arabidopsis
  misc_feature (24)..(514): Homolog of NCBI NO: 20562907 NR Description: pyruvate kinase-like [Deschampsia antarctica]
  misc_feature (1)..(514): Homolog of NCBI NO: 23308151 NR Description: At2g36580/F1O11.21 [Arabidopsis thaliana]
  misc_feature (1)..(514): Homolog of NCBI NO: 21537122 NR Description: putative pyruvate kinase [Arabidopsis thaliana]
  misc_feature (1)..(514): Homolog of NCBI NO: 18404169 NR Description: pyruvate kinase, putative [Arabidopsis thaliana]
  misc_feature (1)..(514): Homolog of NCBI NO: 11260409 NR Description: pyruvate kinase-like protein - Arabidopsis
  misc_feature (1)..(514): Homolog of NCBI NO: 18409740 NR Description: pyruvate kinase, putative [Arabidopsis thaliana]

SEQ ID NO: 32503 - protein, 474 aa, Arabidopsis thaliana; identical to SEQ ID NO: 28913
  peptide (1)..(474): Ceres Seq. ID no. 13494344
  misc_feature (341)..(471): Pfam Name: Pyruvate kinase, alpha/beta domain Pfam Description: Pyruvate kinase, alpha/beta domain
  misc_feature (1)..(474): Homolog of NCBI NO: 25287747 NR Description: probable pyruvate kinase [imported] - Arabidopsis
  misc_feature (1)..(474): Homolog of NCBI NO: 20562907 NR Description: pyruvate kinase-like [Deschampsia antarctica]
  misc_feature (1)..(474): Homolog of NCBI NO: 23308151 NR Description: At2g36580/F1O11.21 [Arabidopsis thaliana]
  misc_feature (1)..(474): Homolog of NCBI NO: 21537122 NR Description: putative pyruvate kinase [Arabidopsis thaliana]
  misc_feature (1)..(474): Homolog of NCBI NO: 18404169 NR Description: pyruvate kinase, putative [Arabidopsis thaliana]
  misc_feature (1)..(474): Homolog of NCBI NO: 11260409 NR Description: pyruvate kinase-like protein - Arabidopsis
  misc_feature (1)..(474): Homolog of NCBI NO: 18409740 NR Description: pyruvate kinase, putative [Arabidopsis thaliana]

SEQ ID NO: 32504 - DNA, 1106 bp, Arabidopsis thaliana; identical to SEQ ID NO: 28914
  misc_feature (1)..(1106): Ceres Seq. ID no. 12396876
  misc_feature: MA Experiment ID: 108435 Result: Down-regulated in Transcription
  misc_feature: MA Experiment 108435 PARAMETER Experiment Name: At_stm_Mutants_cDNA_P Parameter: Plant Line Value: wt Landsburg vs stm
  misc_feature: MA Experiment 108435 PARAMETER Experiment Name: At_stm_Mutants_cDNA_P Parameter: Tissue Value: Shoot Apical Meristem Region
  misc_feature: MA Experiment ID: 108462 Result: Up-regulated in Transcription
  misc_feature: MA Experiment 108462 PARAMETER Experiment Name: At_Germinating_Seeds_cDNA_P Parameter: Age (day) Value: 2 vs. 0
  misc_feature: MA Experiment 108462 PARAMETER Experiment Name: At_Germinating_Seeds_cDNA_P Parameter: Tissue Value: Germinating Seeds
  misc_feature: MA Experiment ID: 108463 Result: Up-regulated in Transcription
  misc_feature: MA Experiment 108463 PARAMETER Experiment Name: At_Germinating_Seeds_cDNA_P Parameter: Age (day) Value: 3 vs. 0
  misc_feature: MA Experiment 108463 PARAMETER Experiment Name: At_Germinating_Seeds_cDNA_P Parameter: Tissue Value: Germinating Seeds
  misc_feature: MA Experiment ID: 108473 Result: Down-regulated in Transcription
  misc_feature: MA Experiment 108473 PARAMETER Experiment Name: At_Drought_Flowers_cDNA_P Parameter: Timepoint (hr) Value: 7 d
  misc_feature: MA Experiment 108473 PARAMETER Experiment Name: At_Drought_Flowers_cDNA_P Parameter: Tissue Value: Flower
  misc_feature: MA Experiment 108473 PARAMETER Experiment Name: At_Drought_Flowers_cDNA_P Parameter: Treatment Value: Drought vs. No Drought
  misc_feature: MA Experiment ID: 108573 Result: Down-regulated in Transcription
  misc_feature: MA Experiment 108573 PARAMETER Experiment Name: At_Drought_cDNA_P Parameter: Timepoint (hr) Value: 6
  misc_feature: MA Experiment 108573 PARAMETER Experiment Name: At_Drought_cDNA_P Parameter: Tissue Value: Aerial
  misc_feature: MA Experiment 108573 PARAMETER Experiment Name: At_Drought_cDNA_P Parameter: Treatment Value: Drought vs. No Drought
  misc_feature: MA Experiment ID: 108595 Result: Down-regulated in Transcription
  misc_feature: MA Experiment 108595 PARAMETER Experiment Name: At_Ler-pi_Ovule_cDNA_P Parameter: Plant Line Value: null
  misc_feature: MA Experiment ID: 108607 Result: Down-regulated in Transcription
  misc_feature: MA Experiment 108607 PARAMETER Experiment Name: At_100uM_ABA_cDNA_P Parameter: Timepoint (hr) Value: 4
  misc_feature: MA Experiment 108607 PARAMETER Experiment Name: At_100uM_ABA_cDNA_P Parameter: Tissue Value: Aerial
  misc_feature: MA Experiment 108607 PARAMETER Experiment Name: At_100uM_ABA_cDNA_P Parameter: Treatment Value: 100uM ABA vs. No Treatment
  misc_feature: MA Experiment ID: 108668 Result: Down-regulated in Transcription
  misc_feature: MA Experiment 108668 PARAMETER Experiment Name: At_2mM_SA_cDNA_P Parameter: Plant Line Value: WS
  misc_feature: MA Experiment 108668 PARAMETER Experiment Name: At_2mM_SA_cDNA_P Parameter: Timepoint (hr) Value: 6
  misc_feature: MA Experiment 108668 PARAMETER Experiment Name: At_2mM_SA_cDNA_P Parameter: Treatment Value: 2mM SA vs. No Treatment
  misc_feature: MA Experiment ID: 20000069 Result: Down-regulated in Transcription
  misc_feature: MA Experiment 20000069 PARAMETER Experiment Name: At_100uM_ABA_Mutants_cDNA_P Parameter: Plant Line Value: CS23
  misc_feature: MA Experiment 20000069 PARAMETER Experiment Name: At_100uM_ABA_Mutants_cDNA_P Parameter: Timepoint (hr) Value: 6
  misc_feature: MA Experiment 20000069 PARAMETER Experiment Name: At_100uM_ABA_Mutants_cDNA_P Parameter: Tissue Value: Aerial
  misc_feature: MA Experiment 20000069 PARAMETER Experiment Name: At_100uM_ABA_Mutants_cDNA_P Parameter: Treatment Value: 100uM ABA vs. No Treatment
  misc_feature: MA Experiment ID: 20000070 Result: Down-regulated in Transcription
  misc_feature: MA Experiment 20000070 PARAMETER Experiment Name: At_100uM_ABA_Mutants_cDNA_P Parameter: Plant Line Value: CS24
  misc_feature: MA Experiment 20000070 PARAMETER Experiment Name: At_100uM_ABA_Mutants_cDNA_P Parameter: Timepoint (hr) Value: 6
  misc_feature: MA Experiment 20000070 PARAMETER Experiment Name: At_100uM_ABA_Mutants_cDNA_P Parameter: Tissue Value: Aerial
  misc_feature: MA Experiment 20000070 PARAMETER Experiment Name: At_100uM_ABA_Mutants_cDNA_P Parameter: Treatment Value: 100uM ABA vs. No Treatment
  misc_feature: MA Experiment ID: 20000071 Result: Down-regulated in Transcription
  misc_feature: MA Experiment 20000071 PARAMETER Experiment Name: At_100uM_ABA_Mutants_cDNA_P Parameter: Plant Line Value: CS8104
  misc_feature: MA Experiment 20000071 PARAMETER Experiment Name: At_100uM_ABA_Mutants_cDNA_P Parameter: Timepoint (hr) Value: 6
  misc_feature: MA Experiment 20000071 PARAMETER Experiment Name: At_100uM_ABA_Mutants_cDNA_P Parameter: Tissue Value: Aerial
  misc_feature: MA Experiment 20000071 PARAMETER Experiment Name: At_100uM_ABA_Mutants_cDNA_P Parameter: Treatment Value: 100uM ABA vs. No Treatment
  misc_feature: MA Experiment ID: 20000072 Result: Down-regulated in Transcription
  misc_feature: MA Experiment 20000072 PARAMETER Experiment Name: At_100uM_ABA_Mutants_cDNA_P Parameter: Plant Line Value: CS8105
  misc_feature: MA Experiment 20000072 PARAMETER Experiment Name: At_100uM_ABA_Mutants_cDNA_P Parameter: Timepoint (hr) Value: 6
  misc_feature: MA Experiment 20000072 PARAMETER Experiment Name: At_100uM_ABA_Mutants_cDNA_P Parameter: Tissue Value: Aerial
  misc_feature: MA Experiment 20000072 PARAMETER Experiment Name: At_100uM_ABA_Mutants_cDNA_P Parameter: Treatment Value: 100uM ABA vs. No Treatment
  misc_feature: MA Experiment ID: 20000087 Result: Down-regulated in Transcription
  misc_feature: MA Experiment 20000087 PARAMETER Experiment Name: At_100uM_ABA_Mutants_cDNA_P Parameter: Plant Line Value: WS
  misc_feature: MA Experiment 20000087 PARAMETER Experiment Name: At_100uM_ABA_Mutants_cDNA_P Parameter: Timepoint (hr) Value: 6
  misc_feature: MA Experiment 20000087 PARAMETER Experiment Name: At_100uM_ABA_Mutants_cDNA_P Parameter: Tissue Value: Aerial
  misc_feature: MA Experiment 20000087 PARAMETER Experiment Name: At_100uM_ABA_Mutants_cDNA_P Parameter: Treatment Value: 100uM ABA vs. No Treatment
  misc_feature: MA Experiment ID: 20000089 Result: Down-regulated in Transcription
  misc_feature: MA Experiment ID: 20000090 Result: Down-regulated in Transcription
  misc_feature: MA Experiment ID: 20000112 Result: Down-regulated in Transcription
  misc_feature: MA Experiment 20000112 PARAMETER Experiment Name: At_42deg_Heat_cDNA_P Parameter: Temperature (deg C) Value: 42 vs. 22
  misc_feature: MA Experiment 20000112 PARAMETER Experiment Name: At_42deg_Heat_cDNA_P Parameter: Timepoint (hr) Value: 2
  misc_feature: MA Experiment 20000112 PARAMETER Experiment Name: At_42deg_Heat_cDNA_P Parameter: Tissue Value: Aerial
  misc_feature: MA Experiment ID: 20000117 Result: Down-regulated in Transcription
  misc_feature: MA Experiment 20000117 PARAMETER Experiment Name: At_100uM_ABA_Mutants_cDNA_P Parameter: Plant Line Value: Columbia
  misc_feature: MA Experiment 20000117 PARAMETER Experiment Name: At_100uM_ABA_Mutants_cDNA_P Parameter: Timepoint (hr) Value: 6
  misc_feature: MA Experiment 20000117 PARAMETER Experiment Name: At_100uM_ABA_Mutants_cDNA_P Parameter: Tissue Value: Aerial
  misc_feature: MA Experiment 20000117 PARAMETER Experiment Name: At_100uM_ABA_Mutants_cDNA_P Parameter: Treatment Value: 100uM ABA vs. No Treatment
  misc_feature: MA Experiment ID: 20000182 Result: Down-regulated in Transcription
  misc_feature: MA Experiment 20000182 PARAMETER Experiment Name: At_2mM_SA_P Parameter: Age (day) Value: 14
  misc_feature: MA Experiment 20000182 PARAMETER Experiment Name: At_2mM_SA_P Parameter: Organism Value: A. thaliana
  misc_feature: MA Experiment 20000182 PARAMETER Experiment Name: At_2mM_SA_P Parameter: Plant Line Value: WS
  misc_feature: MA Experiment 20000182 PARAMETER Experiment Name: At_2mM_SA_P Parameter: Timepoint (hr) Value: 6
  misc_feature: MA Experiment 20000182 PARAMETER Experiment Name: At_2mM_SA_P Parameter: Tissue Value: Aerial
  misc_feature: MA Experiment 20000182 PARAMETER Experiment Name: At_2mM_SA_P Parameter: Treatment Value: 2mM SA vs. No Treatment
  misc_feature: MA Experiment ID: 20000185 Result: Down-regulated in Transcription
  misc_feature: MA Experiment 20000185 PARAMETER Experiment Name: At_Roots__P Parameter: Age (day) Value: 7 vs. 21
  misc_feature: MA Experiment 20000185 PARAMETER Experiment Name: At_Roots__P Parameter: Organism Value: A. thaliana
  misc_feature: MA Experiment 20000185 PARAMETER Experiment Name: At_Roots__P Parameter: Tissue Value: Roots vs. Whole Plant
  misc_feature: MA Experiment ID: 20000224 Result: Down-regulated in Transcription
  misc_feature: MA Experiment ID: 20000264 Result: Down-regulated in Transcription
  misc_feature: MA Experiment 20000264 PARAMETER Experiment Name: At_Open_Flower_P Parameter: Age (day) Value: 21
  misc_feature: MA Experiment 20000264 PARAMETER Experiment Name: At_Open_Flower_P Parameter: Plant Line Value: WS
  misc_feature: MA Experiment 20000264 PARAMETER Experiment Name: At_Open_Flower_P Parameter: Tissue Value: Open Flower vs. Whole Plant
  misc_feature: MA Experiment ID: 20000267 Result: Down-regulated in Transcription
  misc_feature: MA Experiment 20000267 PARAMETER Experiment Name: At_Drought_P Parameter: Age (day) Value: 7
  misc_feature: MA Experiment 20000267 PARAMETER Experiment Name: At_Drought_P Parameter: Organism Value: A. thaliana
  misc_feature: MA Experiment 20000267 PARAMETER Experiment Name: At_Drought_P Parameter: Plant Line Value: WS
  misc_feature: MA Experiment 20000267 PARAMETER Experiment Name: At_Drought_P Parameter: Timepoint (hr) Value: 6
  misc_feature: MA Experiment 20000267 PARAMETER Experiment Name: At_Drought_P Parameter: Tissue Value: Whole Plant
  misc_feature: MA Experiment 20000267 PARAMETER Experiment Name: At_Drought_P Parameter: Treatment Value: Drought vs. No Drought
  misc_feature: MA Experiment ID: 20000268 Result: Down-regulated in Transcription
  misc_feature: MA Experiment 20000268 PARAMETER Experiment Name: At_100mM_NaCl__P Parameter: Age (day) Value: 14
  misc_feature: MA Experiment 20000268 PARAMETER Experiment Name: At_100mM_NaCl__P Parameter: Organism Value: A. thaliana
  misc_feature: MA Experiment 20000268 PARAMETER Experiment Name: At_100mM_NaCl__P Parameter: Plant Line Value: WS
  misc_feature: MA Experiment 20000268 PARAMETER Experiment Name: At_100mM_NaCl__P Parameter: Timepoint (hr) Value: 6
  misc_feature: MA Experiment 20000268 PARAMETER Experiment Name: At_100mM_NaCl__P Parameter: Tissue Value: Whole Plant
  misc_feature: MA Experiment 20000268 PARAMETER Experiment Name: At_100mM_NaCl__P Parameter: Treatment Value: 100mM NaCl vs. No Treatment
  misc_feature: MA Experiment ID: 20000436 Result: Down-regulated in Transcription
  misc_feature: MA Experiment 20000436 PARAMETER Experiment Name: At_Drought_P Parameter: Age (day) Value: 7
  misc_feature: MA Experiment 20000436 PARAMETER Experiment Name: At_Drought_P Parameter: Organism Value: A. thaliana
  misc_feature: MA Experiment 20000436 PARAMETER Experiment Name: At_Drought_P Parameter: Plant Line Value: WS
  misc_feature: MA Experiment 20000436 PARAMETER Experiment Name: At_Drought_P Parameter: Timepoint (hr) Value: 12
  misc_feature: MA Experiment 20000436 PARAMETER Experiment Name: At_Drought_P Parameter: Tissue Value: Whole Plant
  misc_feature: MA Experiment 20000436 PARAMETER Experiment Name: At_Drought_P Parameter: Treatment Value: Drought vs. No Drought
  misc_feature: MA Experiment ID: 20000437 Result: Down-regulated in Transcription
  misc_feature: MA Experiment 20000437 PARAMETER Experiment Name: At_Drought_P Parameter: Age (day) Value: 8
  misc_feature: MA Experiment 20000437 PARAMETER Experiment Name: At_Drought_P Parameter: Organism Value: A. thaliana
  misc_feature: MA Experiment 20000437 PARAMETER Experiment Name: At_Drought_P Parameter: Plant Line Value: WS
  misc_feature: MA Experiment 20000437 PARAMETER Experiment Name: At_Drought_P Parameter: Timepoint (hr) Value: 24
  misc_feature: MA Experiment 20000437 PARAMETER Experiment Name: At_Drought_P Parameter: Tissue Value: Whole Plant
  misc_feature: MA Experiment 20000437 PARAMETER Experiment Name: At_Drought_P Parameter: Treatment Value: Drought vs. No Drought
  misc_feature: MA Experiment ID: 20000439 Result: Down-regulated in Transcription
  misc_feature: MA Experiment 20000439 PARAMETER Experiment Name: At_Roots__P Parameter: Age (day) Value: 14 vs. 21
  misc_feature: MA Experiment 20000439 PARAMETER Experiment Name: At_Roots__P Parameter: Organism Value: A. thaliana
  misc_feature: MA Experiment 20000439 PARAMETER Experiment Name: At_Roots__P Parameter: Tissue Value: Roots vs. Whole Plant
  misc_feature: MA Experiment ID: 20000441 Result: Up-regulated in Transcription
  misc_feature: MA Experiment 20000441 PARAMETER Experiment Name: At_1uM_BR-BRZ__P Parameter: Tissue Value: Shoot Apices
  misc_feature: MA Experiment 20000441 PARAMETER Experiment Name: At_1uM_BR-BRZ__P Parameter: Treatment Value: 1uM BR vs. No Treatment
  misc_feature: MA Experiment ID: 20000443 Result: Up-regulated in Transcription
  misc_feature: MA Experiment 20000443 PARAMETER Experiment Name: At_1uM_BR-BRZ__P Parameter: Tissue Value: Shoot Apices
  misc_feature: MA Experiment 20000443 PARAMETER Experiment Name: At_1uM_BR-BRZ__P Parameter: Treatment Value: 1uM BRZ vs. No Treatment
  misc_feature: MA Experiment ID: 20000456 Result: Down-regulated in Transcription
  misc_feature: MA Experiment 20000456 PARAMETER Experiment Name: At_100uM_BA_P Parameter: Age (day) Value: 14
  misc_feature: MA Experiment 20000456 PARAMETER Experiment Name: At_100uM_BA_P Parameter: Organism Value: A. thaliana
  misc_feature: MA Experiment 20000456 PARAMETER Experiment Name: At_100uM_BA_P Parameter: Plant Line Value: WS
  misc_feature: MA Experiment 20000456 PARAMETER Experiment Name: At_100uM_BA_P Parameter: Timepoint (hr) Value: 6
  misc_feature: MA Experiment 20000456 PARAMETER Experiment Name: At_100uM_BA_P Parameter: Tissue Value: Aerial
  misc_feature: MA Experiment 20000456 PARAMETER Experiment Name: At_100uM_BA_P Parameter: Treatment Value: 100uM BA vs. No Treatment
  misc_feature: MA Experiment ID: 20000496 Result: Down-regulated in Transcription
  misc_feature: MA Experiment 20000496 PARAMETER Experiment Name: At_Guard_Cells_P Parameter: Harvest Date Value: 7/19/2002
  misc_feature: MA Experiment 20000496 PARAMETER Experiment Name: At_Guard_Cells_P Parameter: Organism Value: Canola
  misc_feature: MA Experiment 20000496 PARAMETER Experiment Name: At_Guard_Cells_P Parameter: Tissue Value: Guard Cells vs. Leaves
  misc_feature: MA Experiment ID: 20000794 Result: Down-regulated in Transcription
  misc_feature: MA Experiment 20000794 PARAMETER Experiment Name: At_Petals_P Parameter: Age (day) Value: 23-25 days
  misc_feature: MA Experiment 20000794 PARAMETER Experiment Name: At_Petals_P Parameter: Plant Line Value: WS
  misc_feature: MA Experiment 20000794 PARAMETER Experiment Name: At_Petals_P Parameter: Tissue Value: Petals vs. Whole plant
  misc_feature: MA Experiment ID: 20001247 Result: Up-regulated in Transcription
  misc_feature: MA Experiment 20001247 PARAMETER Experiment Name: At_Far-red-induction_P Parameter: Age (day) Value: 7
  misc_feature: MA Experiment 20001247 PARAMETER Experiment Name: At_Far-red-induction_P Parameter: Light Value: Far-red vs. White
  misc_feature: MA Experiment 20001247 PARAMETER Experiment Name: At_Far-red-induction_P Parameter: Organism Value: A. thaliana
  misc_feature: MA Experiment 20001247 PARAMETER Experiment Name: At_Far-red-induction_P Parameter: Plant Line Value: Columbia
  misc_feature: MA Experiment 20001247 PARAMETER Experiment Name: At_Far-red-induction_P Parameter: Timepoint (hr) Value: 1
  misc_feature: MA Experiment 20001247 PARAMETER Experiment Name: At_Far-red-induction_P Parameter: Tissue Value: Whole Plant
  misc_feature: MA Experiment ID: 20001450 Result: Up-regulated in Transcription
  misc_feature: MA Experiment 20001450 PARAMETER Experiment Name: At_Far-red-induction_P Parameter: Age (day) Value: 7
  misc_feature: MA Experiment 20001450 PARAMETER Experiment Name: At_Far-red-induction_P Parameter: Light Value: Far-red vs. White
  misc_feature: MA Experiment 20001450 PARAMETER Experiment Name: At_Far-red-induction_P Parameter: Organism Value: A. thaliana
  misc_feature: MA Experiment 20001450 PARAMETER Experiment Name: At_Far-red-induction_P Parameter: Plant Line Value: Columbia
  misc_feature: MA Experiment 20001450 PARAMETER Experiment Name: At_Far-red-induction_P Parameter: Timepoint (hr) Value: 8
  misc_feature: MA Experiment 20001450 PARAMETER Experiment Name: At_Far-red-induction_P Parameter: Tissue Value: Whole Plant
  misc_feature: MA Experiment ID: 20001451 Result: Up-regulated in Transcription
  misc_feature: MA Experiment 20001451 PARAMETER Experiment Name: At_Far-red-induction_P Parameter: Age (day) Value: 7
  misc_feature: MA Experiment 20001451 PARAMETER Experiment Name: At_Far-red-induction_P Parameter: Light Value: Far-red vs. White
  misc_feature: MA Experiment 20001451 PARAMETER Experiment Name: At_Far-red-induction_P Parameter: Organism Value: A. thaliana
  misc_feature: MA Experiment 20001451 PARAMETER Experiment Name: At_Far-red-induction_P Parameter: Plant Line Value: Columbia
  misc_feature: MA Experiment 20001451 PARAMETER Experiment Name: At_Far-red-induction_P Parameter: Timepoint (hr) Value: 24
  misc_feature: MA Experiment 20001451 PARAMETER Experiment Name: At_Far-red-induction_P Parameter: Tissue Value: Whole Plant
  misc_feature: MA Experiment ID: 20001554 Result: Down-regulated in Transcription
  misc_feature: MA Experiment 20001554 PARAMETER Experiment Name: At_Drought_Soil_Dry_P Parameter: Age (day) Value: 21
  misc_feature: MA Experiment 20001554 PARAMETER Experiment Name: At_Drought_Soil_Dry_P Parameter: Organism Value: A. thaliana
  misc_feature: MA Experiment 20001554 PARAMETER Experiment Name: At_Drought_Soil_Dry_P Parameter: Plant Line Value: WS
  misc_feature: MA Experiment 20001554 PARAMETER Experiment Name: At_Drought_Soil_Dry_P Parameter: Post Timepoint (hr) Value: None
  misc_feature: MA Experiment 20001554 PARAMETER Experiment Name: At_Drought_Soil_Dry_P Parameter: Post-Treatment Value: None
  misc_feature: MA Experiment 20001554 PARAMETER Experiment Name: At_Drought_Soil_Dry_P Parameter: Timepoint (day) Value: 7
  misc_feature: MA Experiment 20001554 PARAMETER Experiment Name: At_Drought_Soil_Dry_P Parameter: Treatment Value: Drought vs. No Drought
  misc_feature: MA Experiment ID: 20001555 Result: Down-regulated in Transcription
  misc_feature: MA Experiment 20001555 PARAMETER Experiment Name: At_Drought_Soil_Dry_P Parameter: Age (day) Value: 24
  misc_feature: MA Experiment 20001555 PARAMETER Experiment Name: At_Drought_Soil_Dry_P Parameter: Organism Value: A. thaliana
  misc_feature: MA Experiment 20001555 PARAMETER Experiment Name: At_Drought_Soil_Dry_P Parameter: Plant Line Value: WS
  misc_feature: MA Experiment 20001555 PARAMETER Experiment Name: At_Drought_Soil_Dry_P Parameter: Post Timepoint (hr) Value: None
  misc_feature: MA Experiment 20001555 PARAMETER Experiment Name: At_Drought_Soil_Dry_P Parameter: Post-Treatment Value: None
  misc_feature: MA Experiment 20001555 PARAMETER Experiment Name: At_Drought_Soil_Dry_P Parameter: Timepoint (day) Value: 10
  misc_feature: MA Experiment 20001555 PARAMETER Experiment Name: At_Drought_Soil_Dry_P Parameter: Treatment Value: Drought vs. No Drought
  misc_feature: MA Experiment ID: 20001556 Result: Down-regulated in Transcription
  misc_feature: MA Experiment 20001556 PARAMETER Experiment Name: At_Drought_Soil_Dry_P Parameter: Age (day) Value: 26
  misc_feature: MA Experiment 20001556 PARAMETER Experiment Name: At_Drought_Soil_Dry_P Parameter: Organism Value: A. thaliana
  misc_feature: MA Experiment 20001556 PARAMETER Experiment Name: At_Drought_Soil_Dry_P Parameter: Plant Line Value: WS
  misc_feature: MA Experiment 20001556 PARAMETER Experiment Name: At_Drought_Soil_Dry_P Parameter: Post Timepoint (hr) Value: None
  misc_feature: MA Experiment 20001556 PARAMETER Experiment Name: At_Drought_Soil_Dry_P Parameter: Post-Treatment Value: None
  misc_feature: MA Experiment 20001556 PARAMETER Experiment Name: At_Drought_Soil_Dry_P Parameter: Timepoint (day) Value: 12
  misc_feature: MA Experiment 20001556 PARAMETER Experiment Name: At_Drought_Soil_Dry_P Parameter: Treatment Value: Drought vs. No Drought
  misc_feature: MA Experiment ID: 20001557 Result: Down-regulated in Transcription
  misc_feature: MA Experiment 20001557 PARAMETER Experiment Name: At_Drought_Soil_Dry_P Parameter: Age (day) Value: 27
  misc_feature: MA Experiment 20001557 PARAMETER Experiment Name: At_Drought_Soil_Dry_P Parameter: Organism Value: A. thaliana
  misc_feature: MA Experiment 20001557 PARAMETER Experiment Name: At_Drought_Soil_Dry_P Parameter: Plant Line Value: WS
  misc_feature: MA Experiment 20001557 PARAMETER Experiment Name: At_Drought_Soil_Dry_P Parameter: Post Timepoint (hr) Value: 3
  misc_feature: MA Experiment 20001557 PARAMETER Experiment Name: At_Drought_Soil_Dry_P Parameter: Post-Treatment Value: Re-Water vs. No Drought
  misc_feature: MA Experiment 20001557 PARAMETER Experiment Name: At_Drought_Soil_Dry_P Parameter: Timepoint (day) Value: 13
  misc_feature: MA Experiment 20001557 PARAMETER Experiment Name: At_Drought_Soil_Dry_P Parameter: Treatment Value: Drought vs. No Drought
  misc_feature: MA Experiment ID: 20001559 Result: Down-regulated in Transcription
  misc_feature: MA Experiment 20001559 PARAMETER Experiment Name: At_Drought_Soil_Dry_P Parameter: Age (day) Value: 28
  misc_feature: MA Experiment 20001559 PARAMETER Experiment Name: At_Drought_Soil_Dry_P Parameter: Organism Value: A. thaliana
  misc_feature: MA Experiment 20001559 PARAMETER Experiment Name: At_Drought_Soil_Dry_P Parameter: Plant Line Value: WS
  misc_feature: MA Experiment 20001559 PARAMETER Experiment Name: At_Drought_Soil_Dry_P Parameter: Post Timepoint (hr) Value: 29
  misc_feature: MA Experiment 20001559 PARAMETER Experiment Name: At_Drought_Soil_Dry_P Parameter: Post-Treatment Value: Re-Water vs. No Drought
  misc_feature: MA Experiment 20001559 PARAMETER Experiment Name: At_Drought_Soil_Dry_P Parameter: Timepoint (day) Value: 14
  misc_feature: MA Experiment 20001559 PARAMETER Experiment Name: At_Drought_Soil_Dry_P Parameter: Treatment Value: Drought vs. No Drought
  misc_feature: MA Experiment ID: 20001560 Result: Up-regulated in Transcription
  misc_feature: MA Experiment 20001560 PARAMETER Experiment Name: At_Drought_Soil_Dry_P Parameter: Age (day) Value: 28
  misc_feature: MA Experiment 20001560 PARAMETER Experiment Name: At_Drought_Soil_Dry_P Parameter: Organism Value: A. thaliana
  misc_feature: MA Experiment 20001560 PARAMETER Experiment Name: At_Drought_Soil_Dry_P Parameter: Plant Line Value: WS
  misc_feature: MA Experiment 20001560 PARAMETER Experiment Name: At_Drought_Soil_Dry_P Parameter: Post Timepoint (hr) Value: None
  misc_feature: MA Experiment 20001560 PARAMETER Experiment Name: At_Drought_Soil_Dry_P Parameter: Post-Treatment Value: None
  misc_feature: MA Experiment 20001560 PARAMETER Experiment Name: At_Drought_Soil_Dry_P Parameter: Timepoint (day) Value: 14
  misc_feature: MA Experiment 20001560 PARAMETER Experiment Name: At_Drought_Soil_Dry_P Parameter: Treatment Value: Drought vs. No Drought
  misc_feature: MA Experiment ID: 20001761 Result: Up-regulated in Transcription
  misc_feature: MA Experiment 20001761 PARAMETER Experiment Name: At_50mM_NH4NO3_L-to-H_P Parameter: Timepoint (hr) Value: 4
  misc_feature: MA Experiment 20001761 PARAMETER Experiment Name: At_50mM_NH4NO3_L-to-H_P Parameter: Tissue Value: Siliques
  misc_feature: MA Experiment 20001761 PARAMETER Experiment Name: At_50mM_NH4NO3_L-to-H_P Parameter: Treatment Value: 50mM NH4NO3 vs 100mM Mannitol
  misc_feature: MA Experiment ID: 20001904 Result: Down-regulated in Transcription
  misc_feature: MA Experiment 20001904 PARAMETER Experiment Name: At_Drought_Reproduction_P Parameter: Age (day) Value: 37
  misc_feature: MA Experiment 20001904 PARAMETER Experiment Name: At_Drought_Reproduction_P Parameter: Organism Value: A. thaliana
  misc_feature: MA Experiment 20001904 PARAMETER Experiment Name: At_Drought_Reproduction_P Parameter: Plant Line Value: WS
  misc_feature: MA Experiment 20001904 PARAMETER Experiment Name: At_Drought_Reproduction_P Parameter: Timepoint (day) Value: 7
  misc_feature: MA Experiment 20001904 PARAMETER Experiment Name: At_Drought_Reproduction_P Parameter: Tissue Value: Rosettes
  misc_feature: MA Experiment 20001904 PARAMETER Experiment Name: At_Drought_Reproduction_P Parameter: Treatment Value: Drought vs. No Drought
  misc_feature: MA Experiment ID: 20001906 Result: Down-regulated in Transcription
  misc_feature: MA Experiment 20001906 PARAMETER Experiment Name: At_Drought_Reproduction_P Parameter: Age (day) Value: 35
  misc_feature: MA Experiment 20001906 PARAMETER Experiment Name: At_Drought_Reproduction_P Parameter: Organism Value: A. thaliana
  misc_feature: MA Experiment 20001906 PARAMETER Experiment Name: At_Drought_Reproduction_P Parameter: Plant Line Value: WS
  misc_feature: MA Experiment 20001906 PARAMETER Experiment Name: At_Drought_Reproduction_P Parameter: Timepoint (day) Value: 5
  misc_feature: MA Experiment 20001906 PARAMETER Experiment Name: At_Drought_Reproduction_P Parameter: Tissue Value: Siliques
  misc_feature: MA Experiment 20001906 PARAMETER Experiment Name: At_Drought_Reproduction_P Parameter: Treatment Value: Drought vs. No Drought
  misc_feature: MA Experiment ID: 20001907 Result: Down-regulated in Transcription
  misc_feature: MA Experiment 20001907 PARAMETER Experiment Name: At_Drought_Reproduction_P Parameter: Age (day) Value: 37
  misc_feature: MA Experiment 20001907 PARAMETER Experiment Name: At_Drought_Reproduction_P Parameter: Organism Value: A. thaliana
  misc_feature: MA Experiment 20001907 PARAMETER Experiment Name: At_Drought_Reproduction_P Parameter: Plant Line Value: WS
  misc_feature: MA Experiment 20001907 PARAMETER Experiment Name: At_Drought_Reproduction_P Parameter: Timepoint (day) Value: 7
  misc_feature: MA Experiment 20001907 PARAMETER Experiment Name: At_Drought_Reproduction_P Parameter: Tissue Value: Siliques
  misc_feature: MA Experiment 20001907 PARAMETER Experiment Name: At_Drought_Reproduction_P Parameter: Treatment Value: Drought vs. No Drought
  misc_feature: MA Experiment ID: 20001908 Result: Down-regulated in Transcription
  misc_feature: MA Experiment 20001908 PARAMETER Experiment Name: At_Drought_Reproduction_P Parameter: Age (day) Value: 40
  misc_feature: MA Experiment 20001908 PARAMETER Experiment Name: At_Drought_Reproduction_P Parameter: Organism Value: A. thaliana
  misc_feature: MA Experiment 20001908 PARAMETER Experiment Name: At_Drought_Reproduction_P Parameter: Plant Line Value: WS
  misc_feature: MA Experiment 20001908 PARAMETER Experiment Name: At_Drought_Reproduction_P Parameter: Timepoint (day) Value: 10
  misc_feature: MA Experiment 20001908 PARAMETER Experiment Name: At_Drought_Reproduction_P Parameter: Tissue Value: Siliques
  misc_feature: MA Experiment 20001908 PARAMETER Experiment Name: At_Drought_Reproduction_P Parameter: Treatment Value: Drought vs. No Drought
  misc_feature: MA Experiment ID: 20001910 Result: Down-regulated in Transcription
  misc_feature: MA Experiment 20001910 PARAMETER Experiment Name: At_Drought_Reproduction_P Parameter: Age (day) Value: 37
  misc_feature: MA Experiment 20001910 PARAMETER Experiment Name: At_Drought_Reproduction_P Parameter: Organism Value: A. thaliana
  misc_feature: MA Experiment 20001910 PARAMETER Experiment Name: At_Drought_Reproduction_P Parameter: Plant Line Value: WS
  misc_feature: MA Experiment 20001910 PARAMETER Experiment Name: At_Drought_Reproduction_P Parameter: Timepoint (day) Value: 7
  misc_feature: MA Experiment 20001910 PARAMETER Experiment Name: At_Drought_Reproduction_P Parameter: Tissue Value: Flowers
  misc_feature: MA Experiment 20001910 PARAMETER Experiment Name: At_Drought_Reproduction_P Parameter: Treatment Value: Drought vs. No Drought
  misc_feature: MA Experiment ID: 20001911 Result: Down-regulated in Transcription
  misc_feature: MA Experiment 20001911 PARAMETER Experiment Name: At_Drought_Reproduction_P Parameter: Age (day) Value: 40
  misc_feature: MA Experiment 20001911 PARAMETER Experiment Name: At_Drought_Reproduction_P Parameter: Organism Value: A. thaliana
  misc_feature: MA Experiment 20001911 PARAMETER Experiment Name: At_Drought_Reproduction_P Parameter: Plant Line Value: WS
  misc_feature: MA Experiment 20001911 PARAMETER Experiment Name: At_Drought_Reproduction_P Parameter: Timepoint (day) Value: 10
  misc_feature: MA Experiment 20001911 PARAMETER Experiment Name: At_Drought_Reproduction_P Parameter: Tissue Value: Flowers
  misc_feature: MA Experiment 20001911 PARAMETER Experiment Name: At_Drought_Reproduction_P Parameter: Treatment Value: Drought vs. No Drought

SEQ ID NO: 32505 - protein, 292 aa, Arabidopsis thaliana; identical to SEQ ID NO: 28915
  peptide (1)..(292): Ceres Seq. ID no. 12396877
  misc_feature (35)..(217): Pfam Name: Glycosyl hydrolases family 16 Pfam Description: Glycosyl hydrolases family 16
  misc_feature (35)..(291): Homolog of NCBI NO: 950299 NR Description: xyloglucan endotransglycosylase precursor
  misc_feature (12)..(291): Homolog of NCBI NO: 15240733 NR Description: xyloglucan endotransglycosylase (EXGT-A4)
  misc_feature (17)..(290): Homolog of NCBI NO: 5070246 NR Description: xyloglucan endo-transglycosylase-like protein
  misc_feature (15)..(290): Homolog of NCBI NO: 30841326 NR Description: xyloglucan endotransglycosylase [Gossypium
  misc_feature (12)..(292): Homolog of NCBI NO: 21553421 NR Description: endo-xyloglucan transferase-like protein
  misc_feature (12)..(292): Homolog of NCBI NO: 15235714 NR Description: xyloglucan endotransglycosylase, putative
  misc_feature (17)..(290): Homolog of NCBI NO: 7447418 NR Description: probable endo-xyloglucan transferase - upland
  misc_feature (24)..(292): Homolog of NCBI NO: 7447407 NR Description: xyloglucan endo-1,4-beta-D-glucanase (EC 3.2.1.-)
  misc_feature (1)..(292): Homolog of NCBI NO: 21537188 NR Description: xyloglucan endo-transglycosylase-like protein
  misc_feature (1)..(292): Homolog of NCBI NO: 18424986 NR Description: xyloglucan endotransglycosylase, putative

SEQ ID NO: 32506 - protein, 269 aa, Arabidopsis thaliana; identical to SEQ ID NO: 28916
  peptide (1)..(269): Ceres Seq. ID no. 12396878
  misc_feature (12)..(194): Pfam Name: Glycosyl hydrolases family 16 Pfam Description: Glycosyl hydrolases family 16
  misc_feature (12)..(268): Homolog of NCBI NO: 950299 NR Description: xyloglucan endotransglycosylase precursor
  misc_feature (1)..(268): Homolog of NCBI NO: 15240733 NR Description: xyloglucan endotransglycosylase (EXGT-A4)
  misc_feature (1)..(267): Homolog of NCBI NO: 5070246 NR Description: xyloglucan endo-transglycosylase-like protein
  misc_feature (1)..(267): Homolog of NCBI NO: 30841326 NR Description: xyloglucan endotransglycosylase [Gossypium
  misc_feature (1)..(269): Homolog of NCBI NO: 21553421 NR Description: endo-xyloglucan transferase-like protein
  misc_feature (1)..(269): Homolog of NCBI NO: 15235714 NR Description: xyloglucan endotransglycosylase, putative
  misc_feature (1)..(267): Homolog of NCBI NO: 7447418 NR Description: probable endo-xyloglucan transferase - upland
  misc_feature (1)..(269): Homolog of NCBI NO: 7447407 NR Description: xyloglucan endo-1,4-beta-D-glucanase (EC 3.2.1.-)
  misc_feature (1)..(269): Homolog of NCBI NO: 21537188 NR Description: xyloglucan endo-transglycosylase-like protein
  misc_feature (1)..(269): Homolog of NCBI NO: 18424986 NR Description: xyloglucan endotransglycosylase, putative

SEQ ID NO: 32507 - protein, 242 aa, Arabidopsis thaliana; identical to SEQ ID NO: 28917
  peptide (1)..(242): Ceres Seq. ID no. 12396879
  misc_feature (1)..(167): Pfam Name: Glycosyl hydrolases family 16 Pfam Description: Glycosyl hydrolases family 16
  misc_feature (1)..(241): Homolog of NCBI NO: 950299 NR Description: xyloglucan endotransglycosylase precursor
  misc_feature (1)..(241): Homolog of NCBI NO: 15240733 NR Description: xyloglucan endotransglycosylase (EXGT-A4)
  misc_feature (1)..(240): Homolog of NCBI NO: 5070246 NR Description: xyloglucan endo-transglycosylase-like protein
  misc_feature (1)..(240): Homolog of NCBI NO: 30841326 NR Description: xyloglucan endotransglycosylase [Gossypium
  misc_feature (1)..(242): Homolog of NCBI NO: 21553421 NR Description: endo-xyloglucan transferase-like protein
  misc_feature (1)..(242): Homolog of NCBI NO: 15235714 NR Description: xyloglucan endotransglycosylase, putative
  misc_feature (1)..(240): Homolog of NCBI NO: 7447418 NR Description: probable endo-xyloglucan transferase - upland
  misc_feature (1)..(242): Homolog of NCBI NO: 7447407 NR Description: xyloglucan endo-1,4-beta-D-glucanase (EC 3.2.1.-)
  misc_feature (1)..(242): Homolog of NCBI NO: 21537188 NR Description: xyloglucan endo-transglycosylase-like protein
  misc_feature (1)..(242): Homolog of NCBI NO: 18424986 NR Description: xyloglucan endotransglycosylase, putative

SEQ ID NO: 32508 - DNA, 643 bp, Arabidopsis thaliana; identical to SEQ ID NO: 24196
  misc_feature (1)..(643): Ceres Seq. ID no. 13645876
  misc_feature: MA Experiment ID: 108435 Result: Down-regulated in Transcription
  misc_feature: MA Experiment 108435 PARAMETER Experiment Name: At_stm_Mutants_cDNA_P Parameter: Plant Line Value: wt Landsburg vs stm
  misc_feature: MA Experiment 108435 PARAMETER Experiment Name: At_stm_Mutants_cDNA_P Parameter: Tissue Value: Shoot Apical Meristem Region
  misc_feature: MA Experiment ID: 108573 Result: Down-regulated in Transcription
  misc_feature: MA Experiment 108573 PARAMETER Experiment Name: At_Drought_cDNA_P Parameter: Timepoint (hr) Value: 6
  misc_feature: MA Experiment 108573 PARAMETER Experiment Name: At_Drought_cDNA_P Parameter: Tissue Value: Aerial
  misc_feature: MA Experiment 108573 PARAMETER Experiment Name: At_Drought_cDNA_P Parameter: Treatment Value: Drought vs. No Drought
  misc_feature: MA Experiment ID: 108595 Result: Down-regulated in Transcription
  misc_feature: MA Experiment 108595 PARAMETER Experiment Name: At_Ler-pi_Ovule_cDNA_P Parameter: Plant Line Value: null
  misc_feature: MA Experiment ID: 20000185 Result: Down-regulated in Transcription
  misc_feature: MA Experiment 20000185 PARAMETER Experiment Name: At_Roots__P Parameter: Age (day) Value: 7 vs. 21
  misc_feature: MA Experiment 20000185 PARAMETER Experiment Name: At_Roots__P Parameter: Organism Value: A. thaliana
  misc_feature: MA Experiment 20000185 PARAMETER Experiment Name: At_Roots__P Parameter: Tissue Value: Roots vs. Whole Plant
  misc_feature: MA Experiment ID: 20000437 Result: Down-regulated in Transcription
  misc_feature: MA Experiment 20000437 PARAMETER Experiment Name: At_Drought_P Parameter: Age (day) Value: 8
  misc_feature: MA Experiment 20000437 PARAMETER Experiment Name: At_Drought_P Parameter: Organism Value: A. thaliana
  misc_feature: MA Experiment 20000437 PARAMETER Experiment Name: At_Drought_P Parameter: Plant Line Value: WS
  misc_feature: MA Experiment 20000437 PARAMETER Experiment Name: At_Drought_P Parameter: Timepoint (hr) Value: 24
  misc_feature: MA Experiment 20000437 PARAMETER Experiment Name: At_Drought_P Parameter: Tissue Value: Whole Plant
  misc_feature: MA Experiment 20000437 PARAMETER Experiment Name: At_Drought_P Parameter: Treatment Value: Drought vs. No Drought
  misc_feature: MA Experiment ID: 20000439 Result: Down-regulated in Transcription
  misc_feature: MA Experiment 20000439 PARAMETER Experiment Name: At_Roots__P Parameter: Age (day) Value: 14 vs. 21
  misc_feature: MA Experiment 20000439 PARAMETER Experiment Name: At_Roots__P Parameter: Organism Value: A. thaliana
  misc_feature: MA Experiment 20000439 PARAMETER Experiment Name: At_Roots__P Parameter: Tissue Value: Roots vs. Whole Plant
  misc_feature: MA Experiment ID: 20000794 Result: Down-regulated in Transcription
  misc_feature: MA Experiment 20000794 PARAMETER Experiment Name: At_Petals_P Parameter: Age (day) Value: 23-25 days
  misc_feature: MA Experiment 20000794 PARAMETER Experiment Name: At_Petals_P Parameter: Plant Line Value: WS
  misc_feature: MA Experiment 20000794 PARAMETER Experiment Name: At_Petals_P Parameter: Tissue Value: Petals vs. Whole plant
  misc_feature: MA Experiment ID: 20001757 Result: Up-regulated in Transcription
  misc_feature: MA Experiment 20001757 PARAMETER Experiment Name: At_50mM_NH4NO3_L-to-H_P Parameter: Timepoint (hr) Value: 6
  misc_feature: MA Experiment 20001757 PARAMETER Experiment Name: At_50mM_NH4NO3_L-to-H_P Parameter: Tissue Value: Leaf
  misc_feature: MA Experiment 20001757 PARAMETER Experiment Name: At_50mM_NH4NO3_L-to-H_P Parameter: Treatment Value: 50mM NH4NO3 vs 100mM Mannitol

SEQ ID NO: 32509 - protein, 144 aa, Arabidopsis thaliana; identical to SEQ ID NO: 24197
  peptide (1)..(144): Ceres Seq. ID no. 13645877
  misc_feature (50)..(117): Pfam Name: Ribosomal protein L31 Pfam Description: Ribosomal protein L31
  misc_feature (50)..(117): Pfam Name: Ribosomal protein L31 Pfam Description: Ribosomal protein L31
  misc_feature (50)..(113): Homolog of NCBI NO: 33241133 NR Description: Ribosomal protein L31
  misc_feature (50)..(117): Homolog of NCBI NO: 17231678 NR Description: 50S ribosomal protein L31 [Nostoc sp. PCC 7120]
  misc_feature (50)..(113): Homolog of NCBI NO: 33862086 NR Description: 50S ribosomal protein L31
  misc_feature (50)..(143): Homolog of NCBI NO: 23042796 NR Description: hypothetical protein [Trichodesmium erythraeum
  misc_feature (50)..(118): Homolog of NCBI NO: 11467741 NR Description: ribosomal protein L31 [Guillardia theta]
  misc_feature (50)..(113): Homolog of NCBI NO: 33241133 NR Description: Ribosomal protein L31
  misc_feature (50)..(113): Homolog of NCBI NO: 33862086 NR Description: 50S ribosomal protein L31
  misc_feature (50)..(118): Homolog of NCBI NO: 11467741 NR Description: ribosomal protein L31 [Guillardia theta]
  misc_feature (1)..(144): Homolog of NCBI NO: 18410833 NR Description: chloroplast 50S ribosomal protein L31 -related
  misc_feature (46)..(144): Homolog of NCBI NO: 3885513 NR Description: similar to chloroplast 50S ribosomal protein L31
  misc_feature (24)..(118): Homolog of NCBI NO: 34912982 NR Description: putative chloroplast 50S ribosomal protein L31
  misc_feature (50)..(119): Homolog of NCBI NO: 32307564 NR Description: ribosomal protein rpL31 [Bigelowiella natans]
  misc_feature (50)..(144): Homolog of NCBI NO: 22297654 NR Description: 50S ribosomal protein L31 [Thermosynechococcus
  misc_feature (50)..(143): Homolog of NCBI NO: 23042796 NR Description: hypothetical protein [Trichodesmium erythraeum
  misc_feature (50)..(117): Homolog of NCBI NO: 17231678 NR Description: 50S ribosomal protein L31 [Nostoc sp. PCC 7120]
  misc_feature (50)..(144): Homolog of NCBI NO: 22297654 NR Description: 50S ribosomal protein L31 [Thermosynechococcus
  misc_feature (50)..(119): Homolog of NCBI NO: 32307564 NR Description: ribosomal protein rpL31 [Bigelowiella natans]
  misc_feature (24)..(118): Homolog of NCBI NO: 34912982 NR Description: putative chloroplast 50S ribosomal protein L31
  misc_feature (46)..(144): Homolog of NCBI NO: 3885513 NR Description: similar to chloroplast 50S ribosomal protein L31
  misc_feature (1)..(144): Homolog of NCBI NO: 18410833 NR Description: chloroplast 50S ribosomal protein L31 -related

SEQ ID NO: 32510 - protein, 119 aa, Arabidopsis thaliana; identical to SEQ ID NO: 24198
  peptide (1)..(119): Ceres Seq. ID no. 13645878
  misc_feature (25)..(92): Pfam Name: Ribosomal protein L31 Pfam Description: Ribosomal protein L31
  misc_feature (25)..(92): Pfam Name: Ribosomal protein L31 Pfam Description: Ribosomal protein L31
  misc_feature (25)..(88): Homolog of NCBI NO: 33241133 NR Description: Ribosomal protein L31
  misc_feature (25)..(92): Homolog of NCBI NO: 17231678 NR Description: 50S ribosomal protein L31 [Nostoc sp. PCC 7120]
  misc_feature (25)..(88): Homolog of NCBI NO: 33862086 NR Description: 50S ribosomal protein L31
  misc_feature (25)..(118): Homolog of NCBI NO: 23042796 NR Description: hypothetical protein [Trichodesmium erythraeum
  misc_feature (25)..(93): Homolog of NCBI NO: 11467741 NR Description: ribosomal protein L31 [Guillardia theta]
  misc_feature (25)..(88): Homolog of NCBI NO: 33241133 NR Description: Ribosomal protein L31
  misc_feature (25)..(88): Homolog of NCBI NO: 33862086 NR Description: 50S ribosomal protein L31
  misc_feature (25)..(93): Homolog of NCBI NO: 11467741 NR Description: ribosomal protein L31 [Guillardia theta]
  misc_feature (1)..(119): Homolog of NCBI NO: 18410833 NR Description: chloroplast 50S ribosomal protein L31 -related
  misc_feature (21)..(119): Homolog of NCBI NO: 3885513 NR Description: similar to chloroplast 50S ribosomal protein L31
  misc_feature (1)..(93): Homolog of NCBI NO: 34912982 NR Description: putative chloroplast 50S ribosomal protein L31
  misc_feature (25)..(94): Homolog of NCBI NO: 32307564 NR Description: ribosomal protein rpL31 [Bigelowiella natans]
  misc_feature (25)..(119): Homolog of NCBI NO: 22297654 NR Description: 50S ribosomal protein L31 [Thermosynechococcus
  misc_feature (25)..(118): Homolog of NCBI NO: 23042796 NR Description: hypothetical protein [Trichodesmium erythraeum
  misc_feature (25)..(92): Homolog of NCBI NO: 17231678 NR Description: 50S ribosomal protein L31 [Nostoc sp. PCC 7120]
  misc_feature (25)..(119): Homolog of NCBI NO: 22297654 NR Description: 50S ribosomal protein L31 [Thermosynechococcus
  misc_feature (25)..(94): Homolog of NCBI NO: 32307564 NR Description: ribosomal protein rpL31 [Bigelowiella natans]
  misc_feature (1)..(93): Homolog of NCBI NO: 34912982 NR Description: putative chloroplast 50S ribosomal protein L31
  misc_feature (21)..(119): Homolog of NCBI NO: 3885513 NR Description: similar to chloroplast 50S ribosomal protein L31
  misc_feature (1)..(119): Homolog of NCBI NO: 18410833 NR Description: chloroplast 50S ribosomal protein L31 -related

SEQ ID NO: 32511 - protein, 74 aa, Arabidopsis thaliana; identical to SEQ ID NO: 24199
  peptide (1)..(74): Ceres Seq. ID no. 13645879
  misc_feature (1)..(43): Homolog of NCBI NO: 33241133 NR Description: Ribosomal protein L31
  misc_feature (1)..(47): Homolog of NCBI NO: 17231678 NR Description: 50S ribosomal protein L31 [Nostoc sp. PCC 7120]
  misc_feature (1)..(43): Homolog of NCBI NO: 33862086 NR Description: 50S ribosomal protein L31
  misc_feature (1)..(73): Homolog of NCBI NO: 23042796 NR Description: hypothetical protein [Trichodesmium erythraeum
  misc_feature (1)..(48): Homolog of NCBI NO: 11467741 NR Description: ribosomal protein L31 [Guillardia theta]
  misc_feature (1)..(74): Homolog of NCBI NO: 22297654 NR Description: 50S ribosomal protein L31 [Thermosynechococcus
  misc_feature (1)..(49): Homolog of NCBI NO: 32307564 NR Description: ribosomal protein rpL31 [Bigelowiella natans]
  misc_feature (1)..(48): Homolog of NCBI NO: 34912982 NR Description: putative chloroplast 50S ribosomal protein L31
  misc_feature (1)..(74): Homolog of NCBI NO: 3885513 NR Description: similar to chloroplast 50S ribosomal protein L31
  misc_feature (1)..(74): Homolog of NCBI NO: 18410833 NR Description: chloroplast 50S ribosomal protein L31 -related
  misc_feature (1)..(43): Homolog of NCBI NO: 33241133 NR Description: Ribosomal protein L31
  misc_feature (1)..(47): Homolog of NCBI NO: 17231678 NR Description: 50S ribosomal protein L31 [Nostoc sp. PCC 7120]
  misc_feature (1)..(43): Homolog of NCBI NO: 33862086 NR Description: 50S ribosomal protein L31
  misc_feature (1)..(73): Homolog of NCBI NO: 23042796 NR Description: hypothetical protein [Trichodesmium erythraeum
  misc_feature (1)..(48): Homolog of NCBI NO: 11467741 NR Description: ribosomal protein L31 [Guillardia theta]
  misc_feature (1)..(74): Homolog of NCBI NO: 22297654 NR Description: 50S ribosomal protein L31 [Thermosynechococcus
  misc_feature (1)..(49): Homolog of NCBI NO: 32307564 NR Description: ribosomal protein rpL31 [Bigelowiella natans]
  misc_feature (1)..(48): Homolog of NCBI NO: 34912982 NR Description: putative chloroplast 50S ribosomal protein L31
  misc_feature (1)..(74): Homolog of NCBI NO: 3885513 NR Description: similar to chloroplast 50S ribosomal protein L31
  misc_feature (1)..(74): Homolog of NCBI NO: 18410833 NR Description: chloroplast 50S ribosomal protein L31 -related

SEQ ID NO: 32512 - DNA, 997 bp, Arabidopsis thaliana; identical to SEQ ID NO: 28922
  misc_feature (1)..(997): Ceres Seq. ID no. 13488106
  misc_feature: MA Experiment ID: 108462 Result: Up-regulated in Transcription
  misc_feature: MA Experiment 108462 PARAMETER Experiment Name: At_Germinating_Seeds_cDNA_P Parameter: Age (day) Value: 2 vs. 0
  misc_feature: MA Experiment 108462 PARAMETER Experiment Name: At_Germinating_Seeds_cDNA_P Parameter: Tissue Value: Germinating Seeds
  misc_feature: MA Experiment ID: 108463 Result: Up-regulated in Transcription
  misc_feature: MA Experiment 108463 PARAMETER Experiment Name: At_Germinating_Seeds_cDNA_P Parameter: Age (day) Value: 3 vs. 0
  misc_feature: MA Experiment 108463 PARAMETER Experiment Name: At_Germinating_Seeds_cDNA_P Parameter: Tissue Value: Germinating Seeds
  misc_feature: MA Experiment ID: 108464 Result: Up-regulated in Transcription
  misc_feature: MA Experiment 108464 PARAMETER Experiment Name: At_Germinating_Seeds_cDNA_P Parameter: Age (day) Value: 4 vs. 0
  misc_feature: MA Experiment 108464 PARAMETER Experiment Name: At_Germinating_Seeds_cDNA_P Parameter: Tissue Value: Germinating Seeds
  misc_feature: MA Experiment ID: 108489 Result: Down-regulated in Transcription
  misc_feature: MA Experiment ID: 108585 Result: Down-regulated in Transcription
  misc_feature: MA Experiment 108585 PARAMETER Experiment Name: At_5mM_NaNP_cDNA_P Parameter: Timepoint (hr) Value: 6
  misc_feature: MA Experiment 108585 PARAMETER Experiment Name: At_5mM_NaNP_cDNA_P Parameter: Tissue Value: Aerial
  misc_feature: MA Experiment 108585 PARAMETER Experiment Name: At_5mM_NaNP_cDNA_P Parameter: Treatment Value: null
  misc_feature: MA Experiment ID: 108595 Result: Down-regulated in Transcription
  misc_feature: MA Experiment 108595 PARAMETER Experiment Name: At_Ler-pi_Ovule_cDNA_P Parameter: Plant Line Value: null
  misc_feature: MA Experiment ID: 20000070 Result: Down-regulated in Transcription
  misc_feature: MA Experiment 20000070 PARAMETER Experiment Name: At_100uM_ABA_Mutants_cDNA_P Parameter: Plant Line Value: CS24
  misc_feature: MA Experiment 20000070 PARAMETER Experiment Name: At_100uM_ABA_Mutants_cDNA_P Parameter: Timepoint (hr) Value: 6
  misc_feature: MA Experiment 20000070 PARAMETER Experiment Name: At_100uM_ABA_Mutants_cDNA_P Parameter: Tissue Value: Aerial
  misc_feature: MA Experiment 20000070 PARAMETER Experiment Name: At_100uM_ABA_Mutants_cDNA_P Parameter: Treatment Value: 100uM ABA vs. No Treatment
  misc_feature: MA Experiment ID: 20000071 Result: Down-regulated in Transcription
  misc_feature: MA Experiment 20000071 PARAMETER Experiment Name: At_100uM_ABA_Mutants_cDNA_P Parameter: Plant Line Value: CS8104
  misc_feature: MA Experiment 20000071 PARAMETER Experiment Name: At_100uM_ABA_Mutants_cDNA_P Parameter: Timepoint (hr) Value: 6
  misc_feature: MA Experiment 20000071 PARAMETER Experiment Name: At_100uM_ABA_Mutants_cDNA_P Parameter: Tissue Value: Aerial
  misc_feature: MA Experiment 20000071 PARAMETER Experiment Name: At_100uM_ABA_Mutants_cDNA_P Parameter: Treatment Value: 100uM ABA vs. No Treatment
  misc_feature: MA Experiment ID: 20000180 Result: Up-regulated in Transcription
  misc_feature: MA Experiment 20000180 PARAMETER Experiment Name: At_Germinating_Seeds_P Parameter: Age (hr) Value: 24 vs. 0
  misc_feature: MA Experiment 20000180 PARAMETER Experiment Name: At_Germinating_Seeds_P Parameter: Tissue Value: Germinating Seeds
  misc_feature: MA Experiment ID: 20000184 Result: Up-regulated in Transcription
  misc_feature: MA Experiment 20000184 PARAMETER Experiment Name: At_Shoots__P Parameter: Age (day) Value: 7
  misc_feature: MA Experiment 20000184 PARAMETER Experiment Name: At_Shoots__P Parameter: Tissue Value: Shoots vs. Whole Plant
  misc_feature: MA Experiment ID: 20000185 Result: Down-regulated in Transcription
  misc_feature: MA Experiment 20000185 PARAMETER Experiment Name: At_Roots__P Parameter: Age (day) Value: 7 vs. 21
  misc_feature: MA Experiment 20000185 PARAMETER Experiment Name: At_Roots__P Parameter: Organism Value: A. thaliana
  misc_feature: MA Experiment 20000185 PARAMETER Experiment Name: At_Roots__P Parameter: Tissue Value: Roots vs. Whole Plant
  misc_feature: MA Experiment ID: 20000438 Result: Up-regulated in Transcription
  misc_feature: MA Experiment 20000438 PARAMETER Experiment Name: At_Shoots__P Parameter: Age (day) Value: 14
  misc_feature: MA Experiment 20000438 PARAMETER Experiment Name: At_Shoots__P Parameter: Tissue Value: Shoots vs. Whole Plant
  misc_feature: MA Experiment ID: 20000439 Result: Down-regulated in Transcription
  misc_feature: MA Experiment 20000439 PARAMETER Experiment Name: At_Roots__P Parameter: Age (day) Value: 14 vs. 21
  misc_feature: MA Experiment 20000439 PARAMETER Experiment Name: At_Roots__P Parameter: Organism Value: A. thaliana
  misc_feature: MA Experiment 20000439 PARAMETER Experiment Name: At_Roots__P Parameter: Tissue Value: Roots vs. Whole Plant
  misc_feature: MA Experiment ID: 20001248 Result: Down-regulated in Transcription
  misc_feature: MA Experiment 20001248 PARAMETER Experiment Name: At_Far-red-induction_P Parameter: Age (day) Value: 7
  misc_feature: MA Experiment 20001248 PARAMETER Experiment Name: At_Far-red-induction_P Parameter: Light Value: Far-red vs. White
  misc_feature: MA Experiment 20001248 PARAMETER Experiment Name: At_Far-red-induction_P Parameter: Organism Value: A. thaliana
  misc_feature: MA Experiment 20001248 PARAMETER Experiment Name: At_Far-red-induction_P Parameter: Plant Line Value: Columbia
  misc_feature: MA Experiment 20001248 PARAMETER Experiment Name: At_Far-red-induction_P Parameter: Timepoint (hr) Value: 4
  misc_feature: MA Experiment 20001248 PARAMETER Experiment Name: At_Far-red-induction_P Parameter: Tissue Value: Whole Plant
  misc_feature: MA Experiment ID: 20001450 Result: Down-regulated in Transcription
  misc_feature: MA Experiment 20001450 PARAMETER Experiment Name: At_Far-red-induction_P Parameter: Age (day) Value: 7
  misc_feature: MA Experiment 20001450 PARAMETER Experiment Name: At_Far-red-induction_P Parameter: Light Value: Far-red vs. White
  misc_feature: MA Experiment 20001450 PARAMETER Experiment Name: At_Far-red-induction_P Parameter: Organism Value: A. thaliana
  misc_feature: MA Experiment 20001450 PARAMETER Experiment Name: At_Far-red-induction_P Parameter: Plant Line Value: Columbia
  misc_feature: MA Experiment 20001450 PARAMETER Experiment Name: At_Far-red-induction_P Parameter: Timepoint (hr) Value: 8
  misc_feature: MA Experiment 20001450 PARAMETER Experiment Name: At_Far-red-induction_P Parameter: Tissue Value: Whole Plant
  misc_feature: MA Experiment ID: 20001557 Result: Down-regulated in Transcription
  misc_feature: MA Experiment 20001557 PARAMETER Experiment Name: At_Drought_Soil_Dry_P Parameter: Age (day) Value: 27
  misc_feature: MA Experiment 20001557 PARAMETER Experiment Name: At_Drought_Soil_Dry_P Parameter: Organism Value: A. thaliana
  misc_feature: MA Experiment 20001557 PARAMETER Experiment Name: At_Drought_Soil_Dry_P Parameter: Plant Line Value: WS
  misc_feature: MA Experiment 20001557 PARAMETER Experiment Name: At_Drought_Soil_Dry_P Parameter: Post Timepoint (hr) Value: 3
  misc_feature: MA Experiment 20001557 PARAMETER Experiment Name: At_Drought_Soil_Dry_P Parameter: Post-Treatment Value: Re-Water vs. No Drought
  misc_feature: MA Experiment 20001557 PARAMETER Experiment Name: At_Drought_Soil_Dry_P Parameter: Timepoint (day) Value: 13
  misc_feature: MA Experiment 20001557 PARAMETER Experiment Name: At_Drought_Soil_Dry_P Parameter: Treatment Value: Drought vs. No Drought
  misc_feature: MA Experiment ID: 20001558 Result: Down-regulated in Transcription
  misc_feature: MA Experiment 20001558 PARAMETER Experiment Name: At_Drought_Soil_Dry_P Parameter: Age (day) Value: 27
  misc_feature: MA Experiment 20001558 PARAMETER Experiment Name: At_Drought_Soil_Dry_P Parameter: Organism Value: A. thaliana
  misc_feature: MA Experiment 20001558 PARAMETER Experiment Name: At_Drought_Soil_Dry_P Parameter: Plant Line Value: WS
  misc_feature: MA Experiment 20001558 PARAMETER Experiment Name: At_Drought_Soil_Dry_P Parameter: Post Timepoint (hr) Value: 6
  misc_feature: MA Experiment 20001558 PARAMETER Experiment Name: At_Drought_Soil_Dry_P Parameter: Post-Treatment Value: Re-Water vs. No Drought
  misc_feature: MA Experiment 20001558 PARAMETER Experiment Name: At_Drought_Soil_Dry_P Parameter: Timepoint (day) Value: 13
  misc_feature: MA Experiment 20001558 PARAMETER Experiment Name: At_Drought_Soil_Dry_P Parameter: Treatment Value: Drought vs. No Drought
  misc_feature: MA Experiment ID: 20001904 Result: Down-regulated in Transcription
  misc_feature: MA Experiment 20001904 PARAMETER Experiment Name: At_Drought_Reproduction_P Parameter: Age (day) Value: 37
  misc_feature: MA Experiment 20001904 PARAMETER Experiment Name: At_Drought_Reproduction_P Parameter: Organism Value: A. thaliana
  misc_feature: MA Experiment 20001904 PARAMETER Experiment Name: At_Drought_Reproduction_P Parameter: Plant Line Value: WS
  misc_feature: MA Experiment 20001904 PARAMETER Experiment Name: At_Drought_Reproduction_P Parameter: Timepoint (day) Value: 7
  misc_feature: MA Experiment 20001904 PARAMETER Experiment Name: At_Drought_Reproduction_P Parameter: Tissue Value: Rosettes
  misc_feature: MA Experiment 20001904 PARAMETER Experiment Name: At_Drought_Reproduction_P Parameter: Treatment Value: Drought vs. No Drought
  misc_feature: MA Experiment ID: 20001905 Result: Down-regulated in Transcription
  misc_feature: MA Experiment 20001905 PARAMETER Experiment Name: At_Drought_Reproduction_P Parameter: Age (day) Value: 40
  misc_feature: MA Experiment 20001905 PARAMETER Experiment Name: At_Drought_Reproduction_P Parameter: Organism Value: A. thaliana
  misc_feature: MA Experiment 20001905 PARAMETER Experiment Name: At_Drought_Reproduction_P Parameter: Plant Line Value: WS
  misc_feature: MA Experiment 20001905 PARAMETER Experiment Name: At_Drought_Reproduction_P Parameter: Timepoint (day) Value: 10
  misc_feature: MA Experiment 20001905 PARAMETER Experiment Name: At_Drought_Reproduction_P Parameter: Tissue Value: Rosettes
  misc_feature: MA Experiment 20001905 PARAMETER Experiment Name: At_Drought_Reproduction_P Parameter: Treatment Value: Drought vs. No Drought
  misc_feature: MA Experiment ID: 20001906 Result: Down-regulated in Transcription
  misc_feature: MA Experiment 20001906 PARAMETER Experiment Name: At_Drought_Reproduction_P Parameter: Age (day) Value: 35
  misc_feature: MA Experiment 20001906 PARAMETER Experiment Name: At_Drought_Reproduction_P Parameter: Organism Value: A. thaliana
  misc_feature: MA Experiment 20001906 PARAMETER Experiment Name: At_Drought_Reproduction_P Parameter: Plant Line Value: WS
  misc_feature: MA Experiment 20001906 PARAMETER Experiment Name: At_Drought_Reproduction_P Parameter: Timepoint (day) Value: 5
  misc_feature: MA Experiment 20001906 PARAMETER Experiment Name: At_Drought_Reproduction_P Parameter: Tissue Value: Siliques
  misc_feature: MA Experiment 20001906 PARAMETER Experiment Name: At_Drought_Reproduction_P Parameter: Treatment Value: Drought vs. No Drought
  misc_feature: MA Experiment ID: 20001908 Result: Down-regulated in Transcription
  misc_feature: MA Experiment 20001908 PARAMETER Experiment Name: At_Drought_Reproduction_P Parameter: Age (day) Value: 40
  misc_feature: MA Experiment 20001908 PARAMETER Experiment Name: At_Drought_Reproduction_P Parameter: Organism Value: A. thaliana
  misc_feature: MA Experiment 20001908 PARAMETER Experiment Name: At_Drought_Reproduction_P Parameter: Plant Line Value: WS
  misc_feature: MA Experiment 20001908 PARAMETER Experiment Name: At_Drought_Reproduction_P Parameter: Timepoint (day) Value: 10
  misc_feature: MA Experiment 20001908 PARAMETER Experiment Name: At_Drought_Reproduction_P Parameter: Tissue Value: Siliques
  misc_feature: MA Experiment 20001908 PARAMETER Experiment Name: At_Drought_Reproduction_P Parameter: Treatment Value: Drought vs. No Drought

SEQ ID NO: 32513 - protein, 291 aa, Arabidopsis thaliana; identical to SEQ ID NO: 28923
  peptide (1)..(291): Ceres Seq. ID no. 13488107
  misc_feature (56)..(291): Homolog of NCBI NO: 34906888 NR Description: P0470A12.24 [Oryza sativa (japonica
  misc_feature (45)..(258): Homolog of NCBI NO: 25404541 NR Description: hypothetical protein T23K8.14 [imported] -
  misc_feature (6)..(291): Homolog of NCBI NO: 22330431 NR Description: expressed protein [Arabidopsis thaliana]

SEQ ID NO: 32514 - protein, 286 aa, Arabidopsis thaliana; identical to SEQ ID NO: 28924
  peptide (1)..(286): Ceres Seq. ID no. 13488108
  misc_feature (51)..(286): Homolog of NCBI NO: 34906888 NR Description: P0470A12.24 [Oryza sativa (japonica
  misc_feature (40)..(253): Homolog of NCBI NO: 25404541 NR Description: hypothetical protein T23K8.14 [imported] -
  misc_feature (1)..(286): Homolog of NCBI NO: 22330431 NR Description: expressed protein [Arabidopsis thaliana]

SEQ ID NO: 32515 - protein, 247 aa, Arabidopsis thaliana; identical to SEQ ID NO: 28925
  peptide (1)..(247): Ceres Seq. ID no. 13488109
  misc_feature (12)..(247): Homolog of NCBI NO: 34906888 NR Description: P0470A12.24 [Oryza sativa (japonica
  misc_feature (1)..(214): Homolog of NCBI NO: 25404541 NR Description: hypothetical protein T23K8.14 [imported] -
  misc_feature (1)..(247): Homolog of NCBI NO: 22330431 NR Description: expressed protein [Arabidopsis thaliana]

SEQ ID NO: 32516 - DNA, 1486 bp, Arabidopsis thaliana; identical to SEQ ID NO: 28926
  misc_feature (1)..(1486): Ceres Seq. ID no. 13499724
  misc_feature: MA Experiment ID: 108434 Result: Down-regulated in Transcription
  misc_feature: MA Experiment 108434 PARAMETER Experiment Name: At_Root_Tips_cDNA_P Parameter: Tissue Value: Root Tips
  misc_feature: MA Experiment ID: 108461 Result: Down-regulated in Transcription
  misc_feature: MA Experiment 108461 PARAMETER Experiment Name: At_Germinating_Seeds_cDNA_P Parameter: Age (day) Value: 1 vs. 0
  misc_feature: MA Experiment 108461 PARAMETER Experiment Name: At_Germinating_Seeds_cDNA_P Parameter: Tissue Value: Germinating Seeds
  misc_feature: MA Experiment ID: 108462 Result: Down-regulated in Transcription
  misc_feature: MA Experiment 108462 PARAMETER Experiment Name: At_Germinating_Seeds_cDNA_P Parameter: Age (day) Value: 2 vs. 0
  misc_feature: MA Experiment 108462 PARAMETER Experiment Name: At_Germinating_Seeds_cDNA_P Parameter: Tissue Value: Germinating Seeds
  misc_feature: MA Experiment ID: 108463 Result: Down-regulated in Transcription
  misc_feature: MA Experiment 108463 PARAMETER Experiment Name: At_Germinating_Seeds_cDNA_P Parameter: Age (day) Value: 3 vs. 0
  misc_feature: MA Experiment 108463 PARAMETER Experiment Name: At_Germinating_Seeds_cDNA_P Parameter: Tissue Value: Germinating Seeds
  misc_feature: MA Experiment ID: 108464 Result: Down-regulated in Transcription
  misc_feature: MA Experiment 108464 PARAMETER Experiment Name: At_Germinating_Seeds_cDNA_P Parameter: Age (day) Value: 4 vs. 0
  misc_feature: MA Experiment 108464 PARAMETER Experiment Name: At_Germinating_Seeds_cDNA_P Parameter: Tissue Value: Germinating Seeds
  misc_feature: MA Experiment ID: 108473 Result: Up-regulated in Transcription
  misc_feature: MA Experiment 108473 PARAMETER Experiment Name: At_Drought_Flowers_cDNA_P Parameter: Timepoint (hr) Value: 7 d
  misc_feature: MA Experiment 108473 PARAMETER Experiment Name: At_Drought_Flowers_cDNA_P Parameter: Tissue Value: Flower
  misc_feature: MA Experiment 108473 PARAMETER Experiment Name: At_Drought_Flowers_cDNA_P Parameter: Treatment Value: Drought vs. No Drought
  misc_feature: MA Experiment ID: 108474 Result: Up-regulated in Transcription
  misc_feature: MA Experiment 108474 PARAMETER Experiment Name: At_Drought_Flowers_cDNA_P Parameter: Timepoint (hr) Value: null
  misc_feature: MA Experiment 108474 PARAMETER Experiment Name: At_Drought_Flowers_cDNA_P Parameter: Treatment Value: Drought vs. No Drought
  misc_feature: MA Experiment ID: 108489 Result: Up-regulated in Transcription
  misc_feature: MA Experiment ID: 108561 Result: Up-regulated in Transcription
  misc_feature: MA Experiment 108561 PARAMETER Experiment Name: At_100uM_ABA_cDNA_P Parameter: Timepoint (hr) Value: 6
  misc_feature: MA Experiment 108561 PARAMETER Experiment Name: At_100uM_ABA_cDNA_P Parameter: Tissue Value: Aerial
  misc_feature: MA Experiment 108561 PARAMETER Experiment Name: At_100uM_ABA_cDNA_P Parameter: Treatment Value: 100uM ABA vs. No Treatment
  misc_feature: MA Experiment ID: 108572 Result: Up-regulated in Transcription
  misc_feature: MA Experiment 108572 PARAMETER Experiment Name: At_Drought_cDNA_P Parameter: Timepoint (hr) Value: 1
  misc_feature: MA Experiment 108572 PARAMETER Experiment Name: At_Drought_cDNA_P Parameter: Tissue Value: Aerial
  misc_feature: MA Experiment 108572 PARAMETER Experiment Name: At_Drought_cDNA_P Parameter: Treatment Value: Drought vs. No Drought
  misc_feature: MA Experiment ID: 108573 Result: Up-regulated in Transcription
  misc_feature: MA Experiment 108573 PARAMETER Experiment Name: At_Drought_cDNA_P Parameter: Timepoint (hr) Value: 6
  misc_feature: MA Experiment 108573 PARAMETER Experiment Name: At_Drought_cDNA_P Parameter: Tissue Value: Aerial
  misc_feature: MA Experiment 108573 PARAMETER Experiment Name: At_Drought_cDNA_P Parameter: Treatment Value: Drought vs. No Drought
  misc_feature: MA Experiment ID: 108605 Result: Up-regulated in Transcription
  misc_feature: MA Experiment 108605 PARAMETER Experiment Name: At_100uM_ABA_cDNA_P Parameter: Timepoint (hr) Value: 6
  misc_feature: MA Experiment 108605 PARAMETER Experiment Name: At_100uM_ABA_cDNA_P Parameter: Tissue Value: Aerial
  misc_feature: MA Experiment 108605 PARAMETER Experiment Name: At_100uM_ABA_cDNA_P Parameter: Treatment Value: 100uM ABA vs. No Treatment
  misc_feature: MA Experiment ID: 108667 Result: Up-regulated in Transcription
  misc_feature: MA Experiment 108667 PARAMETER Experiment Name: At_2mM_SA_cDNA_P Parameter: Plant Line Value: WS
  misc_feature: MA Experiment 108667 PARAMETER Experiment Name: At_2mM_SA_cDNA_P Parameter: Timepoint (hr) Value: 1
  misc_feature: MA Experiment 108667 PARAMETER Experiment Name: At_2mM_SA_cDNA_P Parameter: Treatment Value: 2mM SA vs. No Treatment
  misc_feature: MA Experiment ID: 20000069 Result: Up-regulated in Transcription
  misc_feature: MA Experiment 20000069 PARAMETER Experiment Name: At_100uM_ABA_Mutants_cDNA_P Parameter: Plant Line Value: CS23
  misc_feature: MA Experiment 20000069 PARAMETER Experiment Name: At_100uM_ABA_Mutants_cDNA_P Parameter: Timepoint (hr) Value: 6
  misc_feature: MA Experiment 20000069 PARAMETER Experiment Name: At_100uM_ABA_Mutants_cDNA_P Parameter: Tissue Value: Aerial
  misc_feature: MA Experiment 20000069 PARAMETER Experiment Name: At_100uM_ABA_Mutants_cDNA_P Parameter: Treatment Value: 100uM ABA vs. No Treatment
  misc_feature: MA Experiment ID: 20000070 Result: Up-regulated in Transcription
  misc_feature: MA Experiment 20000070 PARAMETER Experiment Name: At_100uM_ABA_Mutants_cDNA_P Parameter: Plant Line Value: CS24
  misc_feature: MA Experiment 20000070 PARAMETER Experiment Name: At_100uM_ABA_Mutants_cDNA_P Parameter: Timepoint (hr) Value: 6
  misc_feature: MA Experiment 20000070 PARAMETER Experiment Name: At_100uM_ABA_Mutants_cDNA_P Parameter: Tissue Value: Aerial
  misc_feature: MA Experiment 20000070 PARAMETER Experiment Name: At_100uM_ABA_Mutants_cDNA_P Parameter: Treatment Value: 100uM ABA vs. No Treatment
  misc_feature: MA Experiment ID: 20000071 Result: Up-regulated in Transcription
  misc_feature: MA Experiment 20000071 PARAMETER Experiment Name: At_100uM_ABA_Mutants_cDNA_P Parameter: Plant Line Value: CS8104
  misc_feature: MA Experiment 20000071 PARAMETER Experiment Name: At_100uM_ABA_Mutants_cDNA_P Parameter: Timepoint (hr) Value: 6
  misc_feature: MA Experiment 20000071 PARAMETER Experiment Name: At_100uM_ABA_Mutants_cDNA_P Parameter: Tissue Value: Aerial
  misc_feature: MA Experiment 20000071 PARAMETER Experiment Name: At_100uM_ABA_Mutants_cDNA_P Parameter: Treatment Value: 100uM ABA vs. No Treatment
  misc_feature: MA Experiment ID: 20000072 Result: Up-regulated in Transcription
  misc_feature: MA Experiment 20000072 PARAMETER Experiment Name: At_100uM_ABA_Mutants_cDNA_P Parameter: Plant Line Value: CS8105
  misc_feature: MA Experiment 20000072 PARAMETER Experiment Name: At_100uM_ABA_Mutants_cDNA_P Parameter: Timepoint (hr) Value: 6
  misc_feature: MA Experiment 20000072 PARAMETER Experiment Name: At_100uM_ABA_Mutants_cDNA_P Parameter: Tissue Value: Aerial
  misc_feature: MA Experiment 20000072 PARAMETER Experiment Name: At_100uM_ABA_Mutants_cDNA_P Parameter: Treatment Value: 100uM ABA vs. No Treatment
  misc_feature: MA Experiment ID: 20000088 Result: Up-regulated in Transcription
  misc_feature: MA Experiment 20000088 PARAMETER Experiment Name: At_100uM_ABA_Mutants_cDNA_P Parameter: Plant Line Value: Landsberg
  misc_feature: MA Experiment 20000088 PARAMETER Experiment Name: At_100uM_ABA_Mutants_cDNA_P Parameter: Timepoint (hr) Value: 6
  misc_feature: MA Experiment 20000088 PARAMETER Experiment Name: At_100uM_ABA_Mutants_cDNA_P Parameter: Tissue Value: Aerial
  misc_feature: MA Experiment 20000088 PARAMETER Experiment Name: At_100uM_ABA_Mutants_cDNA_P Parameter: Treatment Value: 100uM ABA vs. No Treatment
  misc_feature: MA Experiment ID: 20000169 Result: Up-regulated in Transcription
  misc_feature: MA Experiment 20000169 PARAMETER Experiment Name: At_100uM_ABA_P Parameter: Age (day) Value: 14
  misc_feature: MA Experiment 20000169 PARAMETER Experiment Name: At_100uM_ABA_P Parameter: Organism Value: A. thaliana
  misc_feature: MA Experiment 20000169 PARAMETER Experiment Name: At_100uM_ABA_P Parameter: Plant Line Value: WS
  misc_feature: MA Experiment 20000169 PARAMETER Experiment Name: At_100uM_ABA_P Parameter: Timepoint (hr) Value: 6
  misc_feature: MA Experiment 20000169 PARAMETER Experiment Name: At_100uM_ABA_P Parameter: Tissue Value: Aerial
  misc_feature: MA Experiment 20000169 PARAMETER Experiment Name: At_100uM_ABA_P Parameter: Treatment Value: 100uM ABA vs. No Treatment
  misc_feature: MA Experiment ID: 20000180 Result: Down-regulated in Transcription
  misc_feature: MA Experiment 20000180 PARAMETER Experiment Name: At_Germinating_Seeds_P Parameter: Age (hr) Value: 24 vs. 0
  misc_feature: MA Experiment 20000180 PARAMETER Experiment Name: At_Germinating_Seeds_P Parameter: Tissue Value: Germinating Seeds
  misc_feature: MA Experiment ID: 20000227 Result: Down-regulated in Transcription
  misc_feature: MA Experiment 20000227 PARAMETER Experiment Name: At_Root-Tips-vs-Tops_P Parameter: Tissue Value: Root Tips vs. Root Tops
  misc_feature: MA Experiment ID: 20000234 Result: Down-regulated in Transcription
  misc_feature: MA Experiment 20000234 PARAMETER Experiment Name: At_Siliques_P Parameter: Age (day) Value: 21
  misc_feature: MA Experiment 20000234 PARAMETER Experiment Name: At_Siliques_P Parameter: Organism Value: A. thaliana
  misc_feature: MA Experiment 20000234 PARAMETER Experiment Name: At_Siliques_P Parameter: Plant Line Value: WS
  misc_feature: MA Experiment 20000234 PARAMETER Experiment Name: At_Siliques_P Parameter: Tissue Value: Less Than 5mm Siliques vs. Whole Plant
  misc_feature: MA Experiment ID: 20000235 Result: Down-regulated in Transcription
  misc_feature: MA Experiment 20000235 PARAMETER Experiment Name: At_Siliques_P Parameter: Age (day) Value: 21
  misc_feature: MA Experiment 20000235 PARAMETER Experiment Name: At_Siliques_P Parameter: Organism Value: A. thaliana
  misc_feature: MA Experiment 20000235 PARAMETER Experiment Name: At_Siliques_P Parameter: Plant Line Value: WS
  misc_feature: MA Experiment 20000235 PARAMETER Experiment Name: At_Siliques_P Parameter: Tissue Value: 5-10mm Siliques vs. Whole Plant
  misc_feature: MA Experiment ID: 20000264 Result: Down-regulated in Transcription
  misc_feature: MA Experiment 20000264 PARAMETER Experiment Name: At_Open_Flower_P Parameter: Age (day) Value: 21
  misc_feature: MA Experiment 20000264 PARAMETER Experiment Name: At_Open_Flower_P Parameter: Plant Line Value: WS
  misc_feature: MA Experiment 20000264 PARAMETER Experiment Name: At_Open_Flower_P Parameter: Tissue Value: Open Flower vs. Whole Plant
  misc_feature: MA Experiment ID: 20000265 Result: Down-regulated in Transcription
  misc_feature: MA Experiment 20000265 PARAMETER Experiment Name: At_Open_Flower_P Parameter: Age (day) Value: 21
  misc_feature: MA Experiment 20000265 PARAMETER Experiment Name: At_Open_Flower_P Parameter: Plant Line Value: WS
  misc_feature: MA Experiment 20000265 PARAMETER Experiment Name: At_Open_Flower_P Parameter: Tissue Value: Closed Flower vs. Whole Plant
  misc_feature: MA Experiment ID: 20000286 Result: Down-regulated in Transcription
  misc_feature: MA Experiment 20000286 PARAMETER Experiment Name: At_Open_Flower_P Parameter: Age (day) Value: 21
  misc_feature: MA Experiment 20000286 PARAMETER Experiment Name: At_Open_Flower_P Parameter: Plant Line Value: WS
  misc_feature: MA Experiment 20000286 PARAMETER Experiment Name: At_Open_Flower_P Parameter: Tissue Value: Half Open vs. Whole Plant
  misc_feature: MA Experiment ID: 20000437 Result: Up-regulated in Transcription
  misc_feature: MA Experiment 20000437 PARAMETER Experiment Name: At_Drought_P Parameter: Age (day) Value: 8
  misc_feature: MA Experiment 20000437 PARAMETER Experiment Name: At_Drought_P Parameter: Organism Value: A. thaliana
  misc_feature: MA Experiment 20000437 PARAMETER Experiment Name: At_Drought_P Parameter: Plant Line Value: WS
  misc_feature: MA Experiment 20000437 PARAMETER Experiment Name: At_Drought_P Parameter: Timepoint (hr) Value: 24
  misc_feature: MA Experiment 20000437 PARAMETER Experiment Name: At_Drought_P Parameter: Tissue Value: Whole Plant
  misc_feature: MA Experiment 20000437 PARAMETER Experiment Name: At_Drought_P Parameter: Treatment Value: Drought vs. No Drought
  misc_feature: MA Experiment ID: 20000438 Result: Down-regulated in Transcription
  misc_feature: MA Experiment 20000438 PARAMETER Experiment Name: At_Shoots__P Parameter: Age (day) Value: 14
  misc_feature: MA Experiment 20000438 PARAMETER Experiment Name: At_Shoots__P Parameter: Tissue Value: Shoots vs. Whole Plant
  misc_feature: MA Experiment ID: 20000441 Result: Up-regulated in Transcription
  misc_feature: MA Experiment 20000441 PARAMETER Experiment Name: At_1uM_BR-BRZ__P Parameter: Tissue Value: Shoot Apices
  misc_feature: MA Experiment 20000441 PARAMETER Experiment Name: At_1uM_BR-BRZ__P Parameter: Treatment Value: 1uM BR vs. No Treatment
  misc_feature: MA Experiment ID: 20000455 Result: Up-regulated in Transcription
  misc_feature: MA Experiment 20000455 PARAMETER Experiment Name: At_100uM_ABA_P Parameter: Age (day) Value: 16
  misc_feature: MA Experiment 20000455 PARAMETER Experiment Name: At_100uM_ABA_P Parameter: Organism Value: A. thaliana
  misc_feature: MA Experiment 20000455 PARAMETER Experiment Name: At_100uM_ABA_P Parameter: Plant Line Value: WS
  misc_feature: MA Experiment 20000455 PARAMETER Experiment Name: At_100uM_ABA_P Parameter: Timepoint (hr) Value: 48
  misc_feature: MA Experiment 20000455 PARAMETER Experiment Name: At_100uM_ABA_P Parameter: Tissue Value: Aerial
  misc_feature: MA Experiment 20000455 PARAMETER Experiment Name: At_100uM_ABA_P Parameter: Treatment Value: 100uM ABA vs. No Treatment
  misc_feature: MA Experiment ID: 20000495 Result: Down-regulated in Transcription
  misc_feature: MA Experiment 20000495 PARAMETER Experiment Name: At_Guard_Cells_P Parameter: Harvest Date Value: 8/2/2002
  misc_feature: MA Experiment 20000495 PARAMETER Experiment Name: At_Guard_Cells_P Parameter: Organism Value: A. thaliana
  misc_feature: MA Experiment 20000495 PARAMETER Experiment Name: At_Guard_Cells_P Parameter: Tissue Value: Guard Cells vs. Leaves
  misc_feature: MA Experiment ID: 20000709 Result: Up-regulated in Transcription
  misc_feature: MA Experiment 20000709 PARAMETER Experiment Name: At_15mM_NH4NO3_L-to-H_P Parameter: Age (hr) Value: 14
  misc_feature: MA Experiment 20000709 PARAMETER Experiment Name: At_15mM_NH4NO3_L-to-H_P Parameter: Organism Value: A. thaliana
  misc_feature: MA Experiment 20000709 PARAMETER Experiment Name: At_15mM_NH4NO3_L-to-H_P Parameter: Plant Line Value: WS
  misc_feature: MA Experiment 20000709 PARAMETER Experiment Name: At_15mM_NH4NO3_L-to-H_P Parameter: Timepoint (hr) Value: 4
  misc_feature: MA Experiment 20000709 PARAMETER Experiment Name: At_15mM_NH4NO3_L-to-H_P Parameter: Tissue Value: Aerial
  misc_feature: MA Experiment 20000709 PARAMETER Experiment Name: At_15mM_NH4NO3_L-to-H_P Parameter: Treatment Value: 15mM NH4NO3 vs. 30mM Mannitol
  misc_feature: MA Experiment ID: 20000794 Result: Down-regulated in Transcription
  misc_feature: MA Experiment 20000794 PARAMETER Experiment Name: At_Petals_P Parameter: Age (day) Value: 23-25 days
  misc_feature: MA Experiment 20000794 PARAMETER Experiment Name: At_Petals_P Parameter: Plant Line Value: WS
  misc_feature: MA Experiment 20000794 PARAMETER Experiment Name: At_Petals_P Parameter: Tissue Value: Petals vs. Whole plant
  misc_feature: MA Experiment ID: 20001458 Result: Up-regulated in Transcription
  misc_feature: MA Experiment 20001458 PARAMETER Experiment Name: At_50mM_NH4NO3_L-to-H_P Parameter: Age (day) Value: Undefined
  misc_feature: MA Experiment 20001458 PARAMETER Experiment Name: At_50mM_NH4NO3_L-to-H_P Parameter: Organism Value: Undefined
  misc_feature: MA Experiment 20001458 PARAMETER Experiment Name: At_50mM_NH4NO3_L-to-H_P Parameter: Plant Line Value: Undefined
  misc_feature: MA Experiment 20001458 PARAMETER Experiment Name: At_50mM_NH4NO3_L-to-H_P Parameter: Timepoint (hr) Value: 2
  misc_feature: MA Experiment 20001458 PARAMETER Experiment Name: At_50mM_NH4NO3_L-to-H_P Parameter: Tissue Value: Siliques
  misc_feature: MA Experiment 20001458 PARAMETER Experiment Name: At_50mM_NH4NO3_L-to-H_P Parameter: Treatment Value: 50mM NH4NO3 vs. 100mM Manitol
  misc_feature: MA Experiment ID: 20001556 Result: Up-regulated in Transcription
  misc_feature: MA Experiment 20001556 PARAMETER Experiment Name: At_Drought_Soil_Dry_P Parameter: Age (day) Value: 26
  misc_feature: MA Experiment 20001556 PARAMETER Experiment Name: At_Drought_Soil_Dry_P Parameter: Organism Value: A. thaliana
  misc_feature: MA Experiment 20001556 PARAMETER Experiment Name: At_Drought_Soil_Dry_P Parameter: Plant Line Value: WS
  misc_feature: MA Experiment 20001556 PARAMETER Experiment Name: At_Drought_Soil_Dry_P Parameter: Post Timepoint (hr) Value: None
  misc_feature: MA Experiment 20001556 PARAMETER Experiment Name: At_Drought_Soil_Dry_P Parameter: Post-Treatment Value: None
  misc_feature: MA Experiment 20001556 PARAMETER Experiment Name: At_Drought_Soil_Dry_P Parameter: Timepoint (day) Value: 12
  misc_feature: MA Experiment 20001556 PARAMETER Experiment Name: At_Drought_Soil_Dry_P Parameter: Treatment Value: Drought vs. No Drought
  misc_feature: MA Experiment ID: 20001557 Result: Up-regulated in Transcription
  misc_feature: MA Experiment 20001557 PARAMETER Experiment Name: At_Drought_Soil_Dry_P Parameter: Age (day) Value: 27
  misc_feature: MA Experiment 20001557 PARAMETER Experiment Name: At_Drought_Soil_Dry_P Parameter: Organism Value: A. thaliana
  misc_feature: MA Experiment 20001557 PARAMETER Experiment Name: At_Drought_Soil_Dry_P Parameter: Plant Line Value: WS
  misc_feature: MA Experiment 20001557 PARAMETER Experiment Name: At_Drought_Soil_Dry_P Parameter: Post Timepoint (hr) Value: 3
  misc_feature: MA Experiment 20001557 PARAMETER Experiment Name: At_Drought_Soil_Dry_P Parameter: Post-Treatment Value: Re-Water vs. No Drought
  misc_feature: MA Experiment 20001557 PARAMETER Experiment Name: At_Drought_Soil_Dry_P Parameter: Timepoint (day) Value: 13
  misc_feature: MA Experiment 20001557 PARAMETER Experiment Name: At_Drought_Soil_Dry_P Parameter: Treatment Value: Drought vs. No Drought
  misc_feature: MA Experiment ID: 20001558 Result: Up-regulated in Transcription
  misc_feature: MA Experiment 20001558 PARAMETER Experiment Name: At_Drought_Soil_Dry_P Parameter: Age (day) Value: 27
  misc_feature: MA Experiment 20001558 PARAMETER Experiment Name: At_Drought_Soil_Dry_P Parameter: Organism Value: A. thaliana
  misc_feature: MA Experiment 20001558 PARAMETER Experiment Name: At_Drought_Soil_Dry_P Parameter: Plant Line Value: WS
  misc_feature: MA Experiment 20001558 PARAMETER Experiment Name: At_Drought_Soil_Dry_P Parameter: Post Timepoint (hr) Value: 6
  misc_feature: MA Experiment 20001558 PARAMETER Experiment Name: At_Drought_Soil_Dry_P Parameter: Post-Treatment Value: Re-Water vs. No Drought
  misc_feature: MA Experiment 20001558 PARAMETER Experiment Name: At_Drought_Soil_Dry_P Parameter: Timepoint (day) Value: 13
  misc_feature: MA Experiment 20001558 PARAMETER Experiment Name: At_Drought_Soil_Dry_P Parameter: Treatment Value: Drought vs. No Drought
  misc_feature: MA Experiment ID: 20001559 Result: Up-regulated in Transcription
  misc_feature: MA Experiment 20001559 PARAMETER Experiment Name: At_Drought_Soil_Dry_P Parameter: Age (day) Value: 28
  misc_feature: MA Experiment 20001559 PARAMETER Experiment Name: At_Drought_Soil_Dry_P Parameter: Organism Value: A. thaliana
  misc_feature: MA Experiment 20001559 PARAMETER Experiment Name: At_Drought_Soil_Dry_P Parameter: Plant Line Value: WS
  misc_feature: MA Experiment 20001559 PARAMETER Experiment Name: At_Drought_Soil_Dry_P Parameter: Post Timepoint (hr) Value: 29
  misc_feature: MA Experiment 20001559 PARAMETER Experiment Name: At_Drought_Soil_Dry_P Parameter: Post-Treatment Value: Re-Water vs. No Drought
  misc_feature: MA Experiment 20001559 PARAMETER Experiment Name: At_Drought_Soil_Dry_P Parameter: Timepoint (day) Value: 14
  misc_feature: MA Experiment 20001559 PARAMETER Experiment Name: At_Drought_Soil_Dry_P Parameter: Treatment Value: Drought vs. No Drought
  misc_feature: MA Experiment ID: 20001904 Result: Up-regulated in Transcription
  misc_feature: MA Experiment 20001904 PARAMETER Experiment Name: At_Drought_Reproduction_P Parameter: Age (day) Value: 37
  misc_feature: MA Experiment 20001904 PARAMETER Experiment Name: At_Drought_Reproduction_P Parameter: Organism Value: A. thaliana
  misc_feature: MA Experiment 20001904 PARAMETER Experiment Name: At_Drought_Reproduction_P Parameter: Plant Line Value: WS
  misc_feature: MA Experiment 20001904 PARAMETER Experiment Name: At_Drought_Reproduction_P Parameter: Timepoint (day) Value: 7
  misc_feature: MA Experiment 20001904 PARAMETER Experiment Name: At_Drought_Reproduction_P Parameter: Tissue Value: Rosettes
  misc_feature: MA Experiment 20001904 PARAMETER Experiment Name: At_Drought_Reproduction_P Parameter: Treatment Value: Drought vs. No Drought
  misc_feature: MA Experiment ID: 20001905 Result: Up-regulated in Transcription
  misc_feature: MA Experiment 20001905 PARAMETER Experiment Name: At_Drought_Reproduction_P Parameter: Age (day) Value: 40
  misc_feature: MA Experiment 20001905 PARAMETER Experiment Name: At_Drought_Reproduction_P Parameter: Organism Value: A. thaliana
  misc_feature: MA Experiment 20001905 PARAMETER Experiment Name: At_Drought_Reproduction_P Parameter: Plant Line Value: WS
  misc_feature: MA Experiment 20001905 PARAMETER Experiment Name: At_Drought_Reproduction_P Parameter: Timepoint (day) Value: 10
  misc_feature: MA Experiment 20001905 PARAMETER Experiment Name: At_Drought_Reproduction_P Parameter: Tissue Value: Rosettes
  misc_feature: MA Experiment 20001905 PARAMETER Experiment Name: At_Drought_Reproduction_P Parameter: Treatment Value: Drought vs. No Drought
  misc_feature: MA Experiment ID: 20001911 Result: Up-regulated in Transcription
  misc_feature: MA Experiment 20001911 PARAMETER Experiment Name: At_Drought_Reproduction_P Parameter: Age (day) Value: 40
  misc_feature: MA Experiment 20001911 PARAMETER Experiment Name: At_Drought_Reproduction_P Parameter: Organism Value: A. thaliana
  misc_feature: MA Experiment 20001911 PARAMETER Experiment Name: At_Drought_Reproduction_P Parameter: Plant Line Value: WS
  misc_feature: MA Experiment 20001911 PARAMETER Experiment Name: At_Drought_Reproduction_P Parameter: Timepoint (day) Value: 10
  misc_feature: MA Experiment 20001911 PARAMETER Experiment Name: At_Drought_Reproduction_P Parameter: Tissue Value: Flowers
  misc_feature: MA Experiment 20001911 PARAMETER Experiment Name: At_Drought_Reproduction_P Parameter: Treatment Value: Drought vs. No Drought

SEQ ID NO: 32517 - protein, 433 aa, Arabidopsis thaliana; identical to SEQ ID NO: 28927
  peptide (1)..(433): Ceres Seq. ID no. 13499725
  misc_feature (21)..(415): Pfam Name: Eukaryotic aspartyl protease Pfam Description: Eukaryotic aspartyl protease
  misc_feature (6)..(431): Homolog of NCBI NO: 1401240 NR Description: 7S seed globulin precursor
  misc_feature (20)..(426): Homolog of NCBI NO: 99969 NR Description: conglutin gamma precursor - narrow-leaved blue
  misc_feature (20)..(426): Homolog of NCBI NO: 662366 NR Description: conglutin gamma [Lupinus angustifolius]
  misc_feature (6)..(426): Homolog of NCBI NO: 11191819 NR Description: conglutin gamma [Lupinus albus]
  misc_feature (7)..(431): Homolog of NCBI NO: 7488910 NR Description: dermal glycoprotein precursor, extracellular -
  misc_feature (1)..(431): Homolog of NCBI NO: 27372527 NR Description: xyloglucan-specific fungal endoglucanase
  misc_feature (1)..(433): Homolog of NCBI NO: 32482806 NR Description: putative xyloglucanase inhibitor [Solanum
  misc_feature (1)..(433): Homolog of NCBI NO: 18379072 NR Description: expressed protein [Arabidopsis thaliana]
  misc_feature (1)..(433): Homolog of NCBI NO: 21537233 NR Description: EDGP precursor [Arabidopsis thaliana]
  misc_feature (1)..(433): Homolog of NCBI NO: 15218740 NR Description: expressed protein [Arabidopsis thaliana]

SEQ ID NO: 32518 - protein, 258 aa, Arabidopsis thaliana; identical to SEQ ID NO: 28928
  peptide (1)..(258): Ceres Seq. ID no. 13499726
  misc_feature (1)..(240): Pfam Name: Eukaryotic aspartyl protease Pfam Description: Eukaryotic aspartyl protease
  misc_feature (1)..(256): Homolog of NCBI NO: 1401240 NR Description: 7S seed globulin precursor
  misc_feature (1)..(251): Homolog of NCBI NO: 99969 NR Description: conglutin gamma precursor - narrow-leaved blue
  misc_feature (1)..(251): Homolog of NCBI NO: 662366 NR Description: conglutin gamma [Lupinus angustifolius]
  misc_feature (1)..(251): Homolog of NCBI NO: 11191819 NR Description: conglutin gamma [Lupinus albus]
  misc_feature (1)..(256): Homolog of NCBI NO: 7488910 NR Description: dermal glycoprotein precursor, extracellular -
  misc_feature (1)..(256): Homolog of NCBI NO: 27372527 NR Description: xyloglucan-specific fungal endoglucanase
  misc_feature (1)..(258): Homolog of NCBI NO: 32482806 NR Description: putative xyloglucanase inhibitor [Solanum
  misc_feature (1)..(258): Homolog of NCBI NO: 18379072 NR Description: expressed protein [Arabidopsis thaliana]
  misc_feature (1)..(258): Homolog of NCBI NO: 21537233 NR Description: EDGP precursor [Arabidopsis thaliana]
  misc_feature (1)..(258): Homolog of NCBI NO: 15218740 NR Description: expressed protein [Arabidopsis thaliana]

SEQ ID NO: 32519 - protein, 255 aa, Arabidopsis thaliana; identical to SEQ ID NO: 28929
  peptide (1)..(255): Ceres Seq. ID no. 13499727
  misc_feature (1)..(237): Pfam Name: Eukaryotic aspartyl protease Pfam Description: Eukaryotic aspartyl protease
  misc_feature (1)..(253): Homolog of NCBI NO: 1401240 NR Description: 7S seed globulin precursor
  misc_feature (1)..(248): Homolog of NCBI NO: 99969 NR Description: conglutin gamma precursor - narrow-leaved blue
  misc_feature (1)..(248): Homolog of NCBI NO: 662366 NR Description: conglutin gamma [Lupinus angustifolius]
  misc_feature (1)..(248): Homolog of NCBI NO: 11191819 NR Description: conglutin gamma [Lupinus albus]
  misc_feature (1)..(253): Homolog of NCBI NO: 7488910 NR Description: dermal glycoprotein precursor, extracellular -
  misc_feature (1)..(253): Homolog of NCBI NO: 27372527 NR Description: xyloglucan-specific fungal endoglucanase
  misc_feature (1)..(255): Homolog of NCBI NO: 32482806 NR Description: putative xyloglucanase inhibitor [Solanum
  misc_feature (1)..(255): Homolog of NCBI NO: 18379072 NR Description: expressed protein [Arabidopsis thaliana]
  misc_feature (1)..(255): Homolog of NCBI NO: 21537233 NR Description: EDGP precursor [Arabidopsis thaliana]
  misc_feature (1)..(255): Homolog of NCBI NO: 15218740 NR Description: expressed protein [Arabidopsis thaliana]

SEQ ID NO: 32520 - DNA, 1084 bp, Arabidopsis thaliana; identical to SEQ ID NO: 28930
  misc_feature (1)..(1084): Ceres Seq. ID no. 13490650
  misc_feature: MA Experiment ID: 108434 Result: Up-regulated in Transcription
  misc_feature: MA Experiment 108434 PARAMETER Experiment Name: At_Root_Tips_cDNA_P Parameter: Tissue Value: Root Tips
  misc_feature: MA Experiment ID: 108462 Result: Down-regulated in Transcription
  misc_feature: MA Experiment 108462 PARAMETER Experiment Name: At_Germinating_Seeds_cDNA_P Parameter: Age (day) Value: 2 vs. 0
  misc_feature: MA Experiment 108462 PARAMETER Experiment Name: At_Germinating_Seeds_cDNA_P Parameter: Tissue Value: Germinating Seeds
  misc_feature: MA Experiment ID: 108463 Result: Down-regulated in Transcription
  misc_feature: MA Experiment 108463 PARAMETER Experiment Name: At_Germinating_Seeds_cDNA_P Parameter: Age (day) Value: 3 vs. 0
  misc_feature: MA Experiment 108463 PARAMETER Experiment Name: At_Germinating_Seeds_cDNA_P Parameter: Tissue Value: Germinating Seeds
  misc_feature: MA Experiment ID: 108573 Result: Up-regulated in Transcription
  misc_feature: MA Experiment 108573 PARAMETER Experiment Name: At_Drought_cDNA_P Parameter: Timepoint (hr) Value: 6
  misc_feature: MA Experiment 108573 PARAMETER Experiment Name: At_Drought_cDNA_P Parameter: Tissue Value: Aerial
  misc_feature: MA Experiment 108573 PARAMETER Experiment Name: At_Drought_cDNA_P Parameter: Treatment Value: Drought vs. No Drought
  misc_feature: MA Experiment ID: 108585 Result: Up-regulated in Transcription
  misc_feature: MA Experiment 108585 PARAMETER Experiment Name: At_5mM_NaNP_cDNA_P Parameter: Timepoint (hr) Value: 6
  misc_feature: MA Experiment 108585 PARAMETER Experiment Name: At_5mM_NaNP_cDNA_P Parameter: Tissue Value: Aerial
  misc_feature: MA Experiment 108585 PARAMETER Experiment Name: At_5mM_NaNP_cDNA_P Parameter: Treatment Value: null
  misc_feature: MA Experiment ID: 20000179 Result: Down-regulated in Transcription
  misc_feature: MA Experiment 20000179 PARAMETER Experiment Name: At_Germinating_Seeds_P Parameter: Age (hr) Value: 6 vs. 0
  misc_feature: MA Experiment 20000179 PARAMETER Experiment Name: At_Germinating_Seeds_P Parameter: Tissue Value: Germinating Seeds
  misc_feature: MA Experiment ID: 20000182 Result: Up-regulated in Transcription
  misc_feature: MA Experiment 20000182 PARAMETER Experiment Name: At_2mM_SA_P Parameter: Age (day) Value: 14
  misc_feature: MA Experiment 20000182 PARAMETER Experiment Name: At_2mM_SA_P Parameter: Organism Value: A. thaliana
  misc_feature: MA Experiment 20000182 PARAMETER Experiment Name: At_2mM_SA_P Parameter: Plant Line Value: WS
  misc_feature: MA Experiment 20000182 PARAMETER Experiment Name: At_2mM_SA_P Parameter: Timepoint (hr) Value: 6
  misc_feature: MA Experiment 20000182 PARAMETER Experiment Name: At_2mM_SA_P Parameter: Tissue Value: Aerial
  misc_feature: MA Experiment 20000182 PARAMETER Experiment Name: At_2mM_SA_P Parameter: Treatment Value: 2mM SA vs. No Treatment
  misc_feature: MA Experiment ID: 20000224 Result: Down-regulated in Transcription

SEQ ID NO: 32521 - protein, 278 aa, Arabidopsis thaliana; identical to SEQ ID NO: 28931
  peptide (1)..(278): Ceres Seq. ID no. 15219202
  misc_feature (29)..(214): Pfam Name: Proteasome A-type and B-type Pfam Description: Proteasome A-type and B-type
  misc_feature (1)..(245): Homolog of NCBI NO: 12229911 NR Description: Proteasome subunit alpha type 1 (Proteasome
  misc_feature (1)..(256): Homolog of NCBI NO: 33563282 NR Description: proteasome (prosome, macropain) subunit, alpha
  misc_feature (6)..(162): Homolog of NCBI NO: 14594923 NR Description: putative alpha6 proteasome subunit [Nicotiana
  misc_feature (1)..(262): Homolog of NCBI NO: 1709758 NR Description: Proteasome subunit alpha type 1 (20S proteasome subunit F) (20S proteasome subunit alpha-6) (Proteasome component
  misc_feature (1)..(278): Homolog of NCBI NO: 22947842 NR Description: 20S proteasome alpha 6 subunit [Nicotiana
  misc_feature (11)..(278): Homolog of NCBI NO: 2511586 NR Description: multicatalytic endopeptidase [Arabidopsis
  misc_feature (1)..(278): Homolog of NCBI NO: 15220151 NR Description: 20S proteasome alpha subunit F2 (PAF2)
  misc_feature (1)..(278): Homolog of NCBI NO: 15239061 NR Description: 20S proteasome alpha subunit F1 (PAF1)
  misc_feature (1)..(278): Homolog of NCBI NO: 25290066 NR Description: C 3.4.25.1 proteasome endopeptidase complex ()
  misc_feature (1)..(278): Homolog of NCBI NO: 21537234 NR Description: 20S proteasome subunit PAF1 [Arabidopsis thaliana]

SEQ ID NO: 32522 - protein, 253 aa, Arabidopsis thaliana; identical to SEQ ID NO: 28932
  peptide (1)..(253): Ceres Seq. ID no. 15219203
  misc_feature (4)..(189): Pfam Name: Proteasome A-type and B-type Pfam Description: Proteasome A-type and B-type
  misc_feature (1)..(220): Homolog of NCBI NO: 12229911 NR Description: Proteasome subunit alpha type 1 (Proteasome
  misc_feature (1)..(231): Homolog of NCBI NO: 33563282 NR Description: proteasome (prosome, macropain) subunit, alpha
  misc_feature (1)..(137): Homolog of NCBI NO: 14594923 NR Description: putative alpha6 proteasome subunit [Nicotiana
  misc_feature (1)..(237): Homolog of NCBI NO: 1709758 NR Description: Proteasome subunit alpha type 1 (20S proteasome subunit F) (20S proteasome subunit alpha-6) (Proteasome component
  misc_feature (1)..(253): Homolog of NCBI NO: 22947842 NR Description: 20S proteasome alpha 6 subunit [Nicotiana
  misc_feature (1)..(253): Homolog of NCBI NO: 2511586 NR Description: multicatalytic endopeptidase [Arabidopsis
  misc_feature (1)..(253): Homolog of NCBI NO: 15220151 NR Description: 20S proteasome alpha subunit F2 (PAF2)
  misc_feature (1)..(253): Homolog of NCBI NO: 15239061 NR Description: 20S proteasome alpha subunit F1 (PAF1)
  misc_feature (1)..(253): Homolog of NCBI NO: 25290066 NR Description: C 3.4.25.1 proteasome endopeptidase complex ()
  misc_feature (1)..(253): Homolog of NCBI NO: 21537234 NR Description: 20S proteasome subunit PAF1 [Arabidopsis thaliana]

SEQ ID NO: 32523 - protein, 191 aa, Arabidopsis thaliana; identical to SEQ ID NO: 28933
  peptide (1)..(191): Ceres Seq. ID no. 15219204
  misc_feature (1)..(127): Pfam Name: Proteasome A-type and B-type Pfam Description: Proteasome A-type and B-type
  misc_feature (1)..(158): Homolog of NCBI NO: 12229911 NR Description: Proteasome subunit alpha type 1 (Proteasome
  misc_feature (1)..(169): Homolog of NCBI NO: 33563282 NR Description: proteasome (prosome, macropain) subunit, alpha
  misc_feature (1)..(75): Homolog of NCBI NO: 14594923 NR Description: putative alpha6 proteasome subunit [Nicotiana
  misc_feature (1)..(175): Homolog of NCBI NO: 1709758 NR Description: Proteasome subunit alpha type 1 (20S proteasome subunit F) (20S proteasome subunit alpha-6) (Proteasome component
  misc_feature (1)..(191): Homolog of NCBI NO: 22947842 NR Description: 20S proteasome alpha 6 subunit [Nicotiana
  misc_feature (1)..(191): Homolog of NCBI NO: 2511586 NR Description: multicatalytic endopeptidase [Arabidopsis
  misc_feature (1)..(191): Homolog of NCBI NO: 15220151 NR Description: 20S proteasome alpha subunit F2 (PAF2)
  misc_feature (1)..(191): Homolog of NCBI NO: 15239061 NR Description: 20S proteasome alpha subunit F1 (PAF1)
  misc_feature (1)..(191): Homolog of NCBI NO: 25290066 NR Description: C 3.4.25.1 proteasome endopeptidase complex ()
  misc_feature (1)..(191): Homolog of NCBI NO: 21537234 NR Description: 20S proteasome subunit PAF1 [Arabidopsis thaliana]

SEQ ID NO: 32524 - DNA, 570 bp, Arabidopsis thaliana; identical to SEQ ID NO: 28934
  misc_feature (1)..(570): Ceres Seq. ID no. 12359958
  misc_feature: MA Experiment ID: 108433 Result: Down-regulated in Transcription
  misc_feature: MA Experiment 108433 PARAMETER Experiment Name: At_rhl_Mutant2_cDNA_P Parameter: Age (day) Value: 7
  misc_feature: MA Experiment 108433 PARAMETER Experiment Name: At_rhl_Mutant2_cDNA_P Parameter: Organism Value: A. thaliana
  misc_feature: MA Experiment 108433 PARAMETER Experiment Name: At_rhl_Mutant2_cDNA_P Parameter: Plant Line Value: rhl Mutant vs. wt landsburg
  misc_feature: MA Experiment 108433 PARAMETER Experiment Name: At_rhl_Mutant2_cDNA_P Parameter: Tissue Value: Roots
  misc_feature: MA Experiment ID: 108434 Result: Down-regulated in Transcription
  misc_feature: MA Experiment 108434 PARAMETER Experiment Name: At_Root_Tips_cDNA_P Parameter: Tissue Value: Root Tips
  misc_feature: MA Experiment ID: 20000184 Result: Up-regulated in Transcription
  misc_feature: MA Experiment 20000184 PARAMETER Experiment Name: At_Shoots__P Parameter: Age (day) Value: 7
  misc_feature: MA Experiment 20000184 PARAMETER Experiment Name: At_Shoots__P Parameter: Tissue Value: Shoots vs. Whole Plant
  misc_feature: MA Experiment ID: 20000185 Result: Up-regulated in Transcription
  misc_feature: MA Experiment 20000185 PARAMETER Experiment Name: At_Roots__P Parameter: Age (day) Value: 7 vs. 21
  misc_feature: MA Experiment 20000185 PARAMETER Experiment Name: At_Roots__P Parameter: Organism Value: A. thaliana
  misc_feature: MA Experiment 20000185 PARAMETER Experiment Name: At_Roots__P Parameter: Tissue Value: Roots vs. Whole Plant
  misc_feature: MA Experiment ID: 20000227 Result: Down-regulated in Transcription
  misc_feature: MA Experiment 20000227 PARAMETER Experiment Name: At_Root-Tips-vs-Tops_P Parameter: Tissue Value: Root Tips vs. Root Tops
  misc_feature: MA Experiment ID: 20000234 Result: Down-regulated in Transcription
  misc_feature: MA Experiment 20000234 PARAMETER Experiment Name: At_Siliques_P Parameter: Age (day) Value: 21
  misc_feature: MA Experiment 20000234 PARAMETER Experiment Name: At_Siliques_P Parameter: Organism Value: A. thaliana
  misc_feature: MA Experiment 20000234 PARAMETER Experiment Name: At_Siliques_P Parameter: Plant Line Value: WS
  misc_feature: MA Experiment 20000234 PARAMETER Experiment Name: At_Siliques_P Parameter: Tissue Value: Less Than 5mm Siliques vs. Whole Plant
  misc_feature: MA Experiment ID: 20000265 Result: Down-regulated in Transcription
  misc_feature: MA Experiment 20000265 PARAMETER Experiment Name: At_Open_Flower_P Parameter: Age (day) Value: 21
  misc_feature: MA Experiment 20000265 PARAMETER Experiment Name: At_Open_Flower_P Parameter: Plant Line Value: WS
  misc_feature: MA Experiment 20000265 PARAMETER Experiment Name: At_Open_Flower_P Parameter: Tissue Value: Closed Flower vs. Whole Plant
  misc_feature: MA Experiment ID: 20000269 Result: Down-regulated in Transcription
  misc_feature: MA Experiment 20000269 PARAMETER Experiment Name: At_1mM_KNO3_L-vs-H_Roots_P Parameter: Age (day) Value: 7,10,12
  misc_feature: MA Experiment 20000269 PARAMETER Experiment Name: At_1mM_KNO3_L-vs-H_Roots_P Parameter: Organism Value: A. thaliana
  misc_feature: MA Experiment 20000269 PARAMETER Experiment Name: At_1mM_KNO3_L-vs-H_Roots_P Parameter: Plant Line Value: WS
  misc_feature: MA Experiment 20000269 PARAMETER Experiment Name: At_1mM_KNO3_L-vs-H_Roots_P Parameter: Timepoint (day) Value: 7,10,12
  misc_feature: MA Experiment 20000269 PARAMETER Experiment Name: At_1mM_KNO3_L-vs-H_Roots_P Parameter: Tissue Value: Roots
  misc_feature: MA Experiment 20000269 PARAMETER Experiment Name: At_1mM_KNO3_L-vs-H_Roots_P Parameter: Treatment Value: 1mM KNO3 vs. 50mM KNO3
  misc_feature: MA Experiment ID: 20000286 Result: Down-regulated in Transcription
  misc_feature: MA Experiment 20000286 PARAMETER Experiment Name: At_Open_Flower_P Parameter: Age (day) Value: 21
  misc_feature: MA Experiment 20000286 PARAMETER Experiment Name: At_Open_Flower_P Parameter: Plant Line Value: WS
  misc_feature: MA Experiment 20000286 PARAMETER Experiment Name: At_Open_Flower_P Parameter: Tissue Value: Half Open vs. Whole Plant
  misc_feature: MA Experiment ID: 20000308 Result: Up-regulated in Transcription
  misc_feature: MA Experiment 20000308 PARAMETER Experiment Name: At_100mM_NaCl__P Parameter: Age (day) Value: 17
  misc_feature: MA Experiment 20000308 PARAMETER Experiment Name: At_100mM_NaCl__P Parameter: Organism Value: A. thaliana
  misc_feature: MA Experiment 20000308 PARAMETER Experiment Name: At_100mM_NaCl__P Parameter: Plant Line Value: WS
  misc_feature: MA Experiment 20000308 PARAMETER Experiment Name: At_100mM_NaCl__P Parameter: Timepoint (hr) Value: 72
  misc_feature: MA Experiment 20000308 PARAMETER Experiment Name: At_100mM_NaCl__P Parameter: Tissue Value: Whole Plant
  misc_feature: MA Experiment 20000308 PARAMETER Experiment Name: At_100mM_NaCl__P Parameter: Treatment Value: 100mM NaCl vs. No Treatment
  misc_feature: MA Experiment ID: 20000437 Result: Up-regulated in Transcription
  misc_feature: MA Experiment 20000437 PARAMETER Experiment Name: At_Drought_P Parameter: Age (day) Value: 8
  misc_feature: MA Experiment 20000437 PARAMETER Experiment Name: At_Drought_P Parameter: Organism Value: A. thaliana
  misc_feature: MA Experiment 20000437 PARAMETER Experiment Name: At_Drought_P Parameter: Plant Line Value: WS
  misc_feature: MA Experiment 20000437 PARAMETER Experiment Name: At_Drought_P Parameter: Timepoint (hr) Value: 24
  misc_feature: MA Experiment 20000437 PARAMETER Experiment Name: At_Drought_P Parameter: Tissue Value: Whole Plant
  misc_feature: MA Experiment 20000437 PARAMETER Experiment Name: At_Drought_P Parameter: Treatment Value: Drought vs. No Drought
  misc_feature: MA Experiment ID: 20000438 Result: Up-regulated in Transcription
  misc_feature: MA Experiment 20000438 PARAMETER Experiment Name: At_Shoots__P Parameter: Age (day) Value: 14
  misc_feature: MA Experiment 20000438 PARAMETER Experiment Name: At_Shoots__P Parameter: Tissue Value: Shoots vs. Whole Plant
  misc_feature: MA Experiment ID: 20000439 Result: Up-regulated in Transcription
  misc_feature: MA Experiment 20000439 PARAMETER Experiment Name: At_Roots__P Parameter: Age (day) Value: 14 vs. 21
  misc_feature: MA Experiment 20000439 PARAMETER Experiment Name: At_Roots__P Parameter: Organism Value: A. thaliana
  misc_feature: MA Experiment 20000439 PARAMETER Experiment Name: At_Roots__P Parameter: Tissue Value: Roots vs. Whole Plant
  misc_feature: MA Experiment ID: 20000460 Result: Up-regulated in Transcription
  misc_feature: MA Experiment 20000460 PARAMETER Experiment Name: At_10percent_PEG_P Parameter: Age (day) Value: 12
  misc_feature: MA Experiment 20000460 PARAMETER Experiment Name: At_10percent_PEG_P Parameter: Organism Value: A. thaliana
  misc_feature: MA Experiment 20000460 PARAMETER Experiment Name: At_10percent_PEG_P Parameter: Plant Line Value: WS
  misc_feature: MA Experiment 20000460 PARAMETER Experiment Name: At_10percent_PEG_P Parameter: Timepoint (day) Value: 12
  misc_feature: MA Experiment 20000460 PARAMETER Experiment Name: At_10percent_PEG_P Parameter: Tissue Value: Whole Plant
  misc_feature: MA Experiment 20000460 PARAMETER Experiment Name: At_10percent_PEG_P Parameter: Treatment Value: 10percent PEG vs. No Treatment
  misc_feature: MA Experiment ID: 20000574 Result: Up-regulated in Transcription
  misc_feature: MA Experiment 20000574 PARAMETER Experiment Name: At_100uM_ABA_Mutants__P Parameter: Organism Value: A. thaliana
  misc_feature: MA Experiment 20000574 PARAMETER Experiment Name: At_100uM_ABA_Mutants__P Parameter: Plant Line Value: CS23 vs. Ler wt
  misc_feature: MA Experiment 20000574 PARAMETER Experiment Name: At_100uM_ABA_Mutants__P Parameter: Timepoint (hr) Value: N/A
  misc_feature: MA Experiment 20000574 PARAMETER Experiment Name: At_100uM_ABA_Mutants__P Parameter: Tissue Value: Whole Plant
  misc_feature: MA Experiment 20000574 PARAMETER Experiment Name: At_100uM_ABA_Mutants__P Parameter: Treatment Value: None
  misc_feature: MA Experiment ID: 20000575 Result: Up-regulated in Transcription
  misc_feature: MA Experiment 20000575 PARAMETER Experiment Name: At_100uM_ABA_Mutants__P Parameter: Organism Value: A. thaliana
  misc_feature: MA Experiment 20000575 PARAMETER Experiment Name: At_100uM_ABA_Mutants__P Parameter: Plant Line Value: CS22
  misc_feature: MA Experiment 20000575 PARAMETER Experiment Name: At_100uM_ABA_Mutants__P Parameter: Timepoint (hr) Value: 6
  misc_feature: MA Experiment 20000575 PARAMETER Experiment Name: At_100uM_ABA_Mutants__P Parameter: Tissue Value: Whole Plant
  misc_feature: MA Experiment 20000575 PARAMETER Experiment Name: At_100uM_ABA_Mutants__P Parameter: Treatment Value: 1uM ABA vs. No Treatment
  misc_feature: MA Experiment ID: 20000576 Result: Up-regulated in Transcription
  misc_feature: MA Experiment 20000576 PARAMETER Experiment Name: At_100uM_ABA_Mutants__P Parameter: Organism Value: A. thaliana
  misc_feature: MA Experiment 20000576 PARAMETER Experiment Name: At_100uM_ABA_Mutants__P Parameter: Plant Line Value: CS23
  misc_feature: MA Experiment 20000576 PARAMETER Experiment Name: At_100uM_ABA_Mutants__P Parameter: Timepoint (hr) Value: 6
  misc_feature: MA Experiment 20000576 PARAMETER Experiment Name: At_100uM_ABA_Mutants__P Parameter: Tissue Value: Whole Plant
  misc_feature: MA Experiment 20000576 PARAMETER Experiment Name: At_100uM_ABA_Mutants__P Parameter: Treatment Value: 1uM ABA vs. No Treatment
  misc_feature: MA Experiment ID: 20001451 Result: Up-regulated in Transcription
  misc_feature: MA Experiment 20001451 PARAMETER Experiment Name: At_Far-red-induction_P Parameter: Age (day) Value: 7
  misc_feature: MA Experiment 20001451 PARAMETER Experiment Name: At_Far-red-induction_P Parameter: Light Value: Far-red vs. White
  misc_feature: MA Experiment 20001451 PARAMETER Experiment Name: At_Far-red-induction_P Parameter: Organism Value: A. thaliana
  misc_feature: MA Experiment 20001451 PARAMETER Experiment Name: At_Far-red-induction_P Parameter: Plant Line Value: Columbia
  misc_feature: MA Experiment 20001451 PARAMETER Experiment Name: At_Far-red-induction_P Parameter: Timepoint (hr) Value: 24
  misc_feature: MA Experiment 20001451 PARAMETER Experiment Name: At_Far-red-induction_P Parameter: Tissue Value: Whole Plant

SEQ ID NO: 32525 - protein, 127 aa, Arabidopsis thaliana; identical to SEQ ID NO: 28935
  peptide (1)..(127): Ceres Seq. ID no. 12359959
  misc_feature (42)..(126): Pfam Name: Herpesvirus latent membrane protein 1 (LMP1) Pfam Description: Herpesvirus latent membrane protein 1 (LMP1)
  misc_feature (1)..(126): Homolog of NCBI NO: 18266043 NR Description: glycine-rich protein [Brassica oleracea]
  misc_feature (1)..(114): Homolog of NCBI NO: 81625 NR Description: glycine-rich protein 3 precursor - Arabidopsis
  misc_feature (1)..(114): Homolog of NCBI NO: 259447 NR Description: glycine-rich protein; atGRP [Arabidopsis thaliana]
  misc_feature (4)..(116): Homolog of NCBI NO: 7488799 NR Description: dormancy-associated protein 2 - garden pea
  misc_feature (1)..(116): Homolog of NCBI NO: 15224548 NR Description: putative glycine-rich protein
  misc_feature (1)..(127): Homolog of NCBI NO: 9957568 NR Description: antimicrobial peptide shep-GRP [Capsella
  misc_feature (1)..(127): Homolog of NCBI NO: 30678191 NR Description: glycine-rich protein [Arabidopsis thaliana]
  misc_feature (1)..(127): Homolog of NCBI NO: 21536606 NR Description: putative glycine-rich protein [Arabidopsis
  misc_feature (1)..(127): Homolog of NCBI NO: 15224540 NR Description: putative glycine-rich protein
  misc_feature (1)..(127): Homolog of NCBI NO: 15224547 NR Description: putative glycine-rich protein; protein id:

SEQ ID NO: 32526 - protein, 99 aa, Arabidopsis thaliana; identical to SEQ ID NO: 28936
  peptide (1)..(99): Ceres Seq. ID no. 12359960
  misc_feature (14)..(98): Pfam Name: Herpesvirus latent membrane protein 1 (LMP1) Pfam Description: Herpesvirus latent membrane protein 1 (LMP1)
  misc_feature (1)..(98): Homolog of NCBI NO: 18266043 NR Description: glycine-rich protein [Brassica oleracea]
  misc_feature (1)..(86): Homolog of NCBI NO: 81625 NR Description: glycine-rich protein 3 precursor - Arabidopsis
  misc_feature (1)..(86): Homolog of NCBI NO: 259447 NR Description: glycine-rich protein; atGRP [Arabidopsis thaliana]
  misc_feature (1)..(88): Homolog of NCBI NO: 7488799 NR Description: dormancy-associated protein 2 - garden pea
  misc_feature (1)..(88): Homolog of NCBI NO: 15224548 NR Description: putative glycine-rich protein
  misc_feature (1)..(99): Homolog of NCBI NO: 9957568 NR Description: antimicrobial peptide shep-GRP [Capsella
  misc_feature (1)..(99): Homolog of NCBI NO: 30678191 NR Description: glycine-rich protein [Arabidopsis thaliana]
  misc_feature (1)..(99): Homolog of NCBI NO: 21536606 NR Description: putative glycine-rich protein [Arabidopsis
  misc_feature (1)..(99): Homolog of NCBI NO: 15224540 NR Description: putative glycine-rich protein
  misc_feature (1)..(99): Homolog of NCBI NO: 15224547 NR Description: putative glycine-rich protein; protein id:

SEQ ID NO: 32527 - protein, 70 aa, Arabidopsis thaliana; identical to SEQ ID NO: 28937
  peptide (1)..(70): Ceres Seq. ID no. 12359961
  misc_feature (1)..(64): Pfam Name: ELM2 domain Pfam Description: ELM2 domain

SEQ ID NO: 32528 - DNA, 1160 bp, Arabidopsis thaliana; identical to SEQ ID NO: 28938
  misc_feature (1)..(1160): Ceres Seq. ID no. 13490472
  misc_feature: MA Experiment ID: 108434 Result: Down-regulated in Transcription
  misc_feature: MA Experiment 108434 PARAMETER Experiment Name: At_Root_Tips_cDNA_P Parameter: Tissue Value: Root Tips
  misc_feature: MA Experiment ID: 108461 Result: Up-regulated in Transcription
  misc_feature: MA Experiment 108461 PARAMETER Experiment Name: At_Germinating_Seeds_cDNA_P Parameter: Age (day) Value: 1 vs. 0
  misc_feature: MA Experiment 108461 PARAMETER Experiment Name: At_Germinating_Seeds_cDNA_P Parameter: Tissue Value: Germinating Seeds
  misc_feature: MA Experiment ID: 108462 Result: Up-regulated in Transcription
  misc_feature: MA Experiment 108462 PARAMETER Experiment Name: At_Germinating_Seeds_cDNA_P Parameter: Age (day) Value: 2 vs. 0
  misc_feature: MA Experiment 108462 PARAMETER Experiment Name: At_Germinating_Seeds_cDNA_P Parameter: Tissue Value: Germinating Seeds
  misc_feature: MA Experiment ID: 108463 Result: Up-regulated in Transcription
  misc_feature: MA Experiment 108463 PARAMETER Experiment Name: At_Germinating_Seeds_cDNA_P Parameter: Age (day) Value: 3 vs. 0
  misc_feature: MA Experiment 108463 PARAMETER Experiment Name: At_Germinating_Seeds_cDNA_P Parameter: Tissue Value: Germinating Seeds
  misc_feature: MA Experiment ID: 108464 Result: Up-regulated in Transcription
  misc_feature: MA Experiment 108464 PARAMETER Experiment Name: At_Germinating_Seeds_cDNA_P Parameter: Age (day) Value: 4 vs. 0
  misc_feature: MA Experiment 108464 PARAMETER Experiment Name: At_Germinating_Seeds_cDNA_P Parameter: Tissue Value: Germinating Seeds
  misc_feature: MA Experiment ID: 108501 Result: Up-regulated in Transcription
  misc_feature: MA Experiment 108501 PARAMETER Experiment Name: At_ap2_floral_buds_cDNA_P Parameter: Plant Line Value: ap2 (Ler.)
  misc_feature: MA Experiment 108501 PARAMETER Experiment Name: At_ap2_floral_buds_cDNA_P Parameter: Tissue Value: Closed Flower
  misc_feature: MA Experiment ID: 108579 Result: Down-regulated in Transcription
  misc_feature: MA Experiment 108579 PARAMETER Experiment Name: At_4deg_Cold_cDNA_P Parameter: Temperature (deg C) Value: 4 vs. 22
  misc_feature: MA Experiment 108579 PARAMETER Experiment Name: At_4deg_Cold_cDNA_P Parameter: Timepoint (hr) Value: 6
  misc_feature: MA Experiment 108579 PARAMETER Experiment Name: At_4deg_Cold_cDNA_P Parameter: Tissue Value: Aerial
  misc_feature: MA Experiment ID: 108667 Result: Down-regulated in Transcription
  misc_feature: MA Experiment 108667 PARAMETER Experiment Name: At_2mM_SA_cDNA_P Parameter: Plant Line Value: WS
  misc_feature: MA Experiment 108667 PARAMETER Experiment Name: At_2mM_SA_cDNA_P Parameter: Timepoint (hr) Value: 1
  misc_feature: MA Experiment 108667 PARAMETER Experiment Name: At_2mM_SA_cDNA_P Parameter: Treatment Value: 2mM SA vs. No Treatment
  misc_feature: MA Experiment ID: 20000111 Result: Down-regulated in Transcription
  misc_feature: MA Experiment 20000111 PARAMETER Experiment Name: At_42deg_Heat_cDNA_P Parameter: Temperature (deg C) Value: 42 vs. 22
  misc_feature: MA Experiment 20000111 PARAMETER Experiment Name: At_42deg_Heat_cDNA_P Parameter: Timepoint (hr) Value: 6
  misc_feature: MA Experiment 20000111 PARAMETER Experiment Name: At_42deg_Heat_cDNA_P Parameter: Tissue Value: Aerial
  misc_feature: MA Experiment ID: 20000113 Result: Down-regulated in Transcription
  misc_feature: MA Experiment 20000113 PARAMETER Experiment Name: At_42deg_Heat_cDNA_P Parameter: Temperature (deg C) Value: 42 vs. 22
  misc_feature: MA Experiment 20000113 PARAMETER Experiment Name: At_42deg_Heat_cDNA_P Parameter: Timepoint (hr) Value: 8
  misc_feature: MA Experiment 20000113 PARAMETER Experiment Name: At_42deg_Heat_cDNA_P Parameter: Tissue Value: Aerial
  misc_feature: MA Experiment ID: 20000144 Result: Down-regulated in Transcription
  misc_feature: MA Experiment 20000144 PARAMETER Experiment Name: At_42deg_Heat_cDNA_P Parameter: Temperature (deg C) Value: 42 vs. 22
  misc_feature: MA Experiment 20000144 PARAMETER Experiment Name: At_42deg_Heat_cDNA_P Parameter: Timepoint (hr) Value: 1
  misc_feature: MA Experiment 20000144 PARAMETER Experiment Name: At_42deg_Heat_cDNA_P Parameter: Tissue Value: Aerial
  misc_feature: MA Experiment ID: 20000180 Result: Up-regulated in Transcription
  misc_feature: MA Experiment 20000180 PARAMETER Experiment Name: At_Germinating_Seeds_P Parameter: Age (hr) Value: 24 vs. 0
  misc_feature: MA Experiment 20000180 PARAMETER Experiment Name: At_Germinating_Seeds_P Parameter: Tissue Value: Germinating Seeds
  misc_feature: MA Experiment ID: 20000184 Result: Down-regulated in Transcription
  misc_feature: MA Experiment 20000184 PARAMETER Experiment Name: At_Shoots__P Parameter: Age (day) Value: 7
  misc_feature: MA Experiment 20000184 PARAMETER Experiment Name: At_Shoots__P Parameter: Tissue Value: Shoots vs. Whole Plant
  misc_feature: MA Experiment ID: 20000185 Result: Down-regulated in Transcription
  misc_feature: MA Experiment 20000185 PARAMETER Experiment Name: At_Roots__P Parameter: Age (day) Value: 7 vs. 21
  misc_feature: MA Experiment 20000185 PARAMETER Experiment Name: At_Roots__P Parameter: Organism Value: A. thaliana
  misc_feature: MA Experiment 20000185 PARAMETER Experiment Name: At_Roots__P Parameter: Tissue Value: Roots vs. Whole Plant
  misc_feature: MA Experiment ID: 20000224 Result: Up-regulated in Transcription
  misc_feature: MA Experiment ID: 20000439 Result: Down-regulated in Transcription
  misc_feature: MA Experiment 20000439 PARAMETER Experiment Name: At_Roots__P Parameter: Age (day) Value: 14 vs. 21
  misc_feature: MA Experiment 20000439 PARAMETER Experiment Name: At_Roots__P Parameter: Organism Value: A. thaliana
  misc_feature: MA Experiment 20000439 PARAMETER Experiment Name: At_Roots__P Parameter: Tissue Value: Roots vs. Whole Plant
  misc_feature: MA Experiment ID: 20001247 Result: Up-regulated in Transcription
  misc_feature: MA Experiment 20001247 PARAMETER Experiment Name: At_Far-red-induction_P Parameter: Age (day) Value: 7
  misc_feature: MA Experiment 20001247 PARAMETER Experiment Name: At_Far-red-induction_P Parameter: Light Value: Far-red vs. White
  misc_feature: MA Experiment 20001247 PARAMETER Experiment Name: At_Far-red-induction_P Parameter: Organism Value: A. thaliana
  misc_feature: MA Experiment 20001247 PARAMETER Experiment Name: At_Far-red-induction_P Parameter: Plant Line Value: Columbia
  misc_feature: MA Experiment 20001247 PARAMETER Experiment Name: At_Far-red-induction_P Parameter: Timepoint (hr) Value: 1
  misc_feature: MA Experiment 20001247 PARAMETER Experiment Name: At_Far-red-induction_P Parameter: Tissue Value: Whole Plant
  misc_feature: MA Experiment ID: 20001450 Result: Up-regulated in Transcription
  misc_feature: MA Experiment 20001450 PARAMETER Experiment Name: At_Far-red-induction_P Parameter: Age (day) Value: 7
  misc_feature: MA Experiment 20001450 PARAMETER Experiment Name: At_Far-red-induction_P Parameter: Light Value: Far-red vs. White
  misc_feature: MA Experiment 20001450 PARAMETER Experiment Name: At_Far-red-induction_P Parameter: Organism Value: A. thaliana
  misc_feature: MA Experiment 20001450 PARAMETER Experiment Name: At_Far-red-induction_P Parameter: Plant Line Value: Columbia
  misc_feature: MA Experiment 20001450 PARAMETER Experiment Name: At_Far-red-induction_P Parameter: Timepoint (hr) Value: 8
  misc_feature: MA Experiment 20001450 PARAMETER Experiment Name: At_Far-red-induction_P Parameter: Tissue Value: Whole Plant
  misc_feature: MA Experiment ID: 20001451 Result: Up-regulated in Transcription
  misc_feature: MA Experiment 20001451 PARAMETER Experiment Name: At_Far-red-induction_P Parameter: Age (day) Value: 7
  misc_feature: MA Experiment 20001451 PARAMETER Experiment Name: At_Far-red-induction_P Parameter: Light Value: Far-red vs. White
  misc_feature: MA Experiment 20001451 PARAMETER Experiment Name: At_Far-red-induction_P Parameter: Organism Value: A. thaliana
  misc_feature: MA Experiment 20001451 PARAMETER Experiment Name: At_Far-red-induction_P Parameter: Plant Line Value: Columbia
  misc_feature: MA Experiment 20001451 PARAMETER Experiment Name: At_Far-red-induction_P Parameter: Timepoint (hr) Value: 24
  misc_feature: MA Experiment 20001451 PARAMETER Experiment Name: At_Far-red-induction_P Parameter: Tissue Value: Whole Plant
  misc_feature: MA Experiment ID: 20001906 Result: Down-regulated in Transcription
  misc_feature: MA Experiment 20001906 PARAMETER Experiment Name: At_Drought_Reproduction_P Parameter: Age (day) Value: 35
  misc_feature: MA Experiment 20001906 PARAMETER Experiment Name: At_Drought_Reproduction_P Parameter: Organism Value: A. thaliana
  misc_feature: MA Experiment 20001906 PARAMETER Experiment Name: At_Drought_Reproduction_P Parameter: Plant Line Value: WS
  misc_feature: MA Experiment 20001906 PARAMETER Experiment Name: At_Drought_Reproduction_P Parameter: Timepoint (day) Value: 5
  misc_feature: MA Experiment 20001906 PARAMETER Experiment Name: At_Drought_Reproduction_P Parameter: Tissue Value: Siliques
  misc_feature: MA Experiment 20001906 PARAMETER Experiment Name: At_Drought_Reproduction_P Parameter: Treatment Value: Drought vs. No Drought

SEQ ID NO: 32529 - protein, 264 aa, Arabidopsis thaliana; identical to SEQ ID NO: 28939
  peptide (1)..(264): Ceres Seq. ID no. 13490473
  misc_feature (97)..(263): Homolog of NCBI NO: 15229617 NR Description: hypothetical protein [Arabidopsis thaliana]
  misc_feature (15)..(193): Homolog of NCBI NO: 15221963 NR Description: hypothetical protein [Arabidopsis thaliana]
  misc_feature (192)..(264): Homolog of NCBI NO: 15240881 NR Description: hypothetical protein [Arabidopsis thaliana]
  misc_feature (6)..(92): Homolog of NCBI NO: 15240881 NR Description: hypothetical protein [Arabidopsis thaliana]
  misc_feature (1)..(264): Homolog of NCBI NO: 18408679 NR Description: expressed protein [Arabidopsis thaliana]

SEQ ID NO: 32530 - protein, 253 aa, Arabidopsis thaliana; identical to SEQ ID NO: 28940
  peptide (1)..(253): Ceres Seq. ID no. 13490474
  misc_feature (86)..(252): Homolog of NCBI NO: 15229617 NR Description: hypothetical protein [Arabidopsis thaliana]
  misc_feature (4)..(182): Homolog of NCBI NO: 15221963 NR Description: hypothetical protein [Arabidopsis thaliana]
  misc_feature (181)..(253): Homolog of NCBI NO: 15240881 NR Description: hypothetical protein [Arabidopsis thaliana]
  misc_feature (1)..(81): Homolog of NCBI NO: 15240881 NR Description: hypothetical protein [Arabidopsis thaliana]
  misc_feature (1)..(253): Homolog of NCBI NO: 18408679 NR Description: expressed protein [Arabidopsis thaliana]

SEQ ID NO: 32531 - DNA, 2064 bp, Arabidopsis thaliana; identical to SEQ ID NO: 28941
  misc_feature (1)..(2064): Ceres Seq. ID no. 13490559
  misc_feature: MA Experiment ID: 108569 Result: Up-regulated in Transcription
  misc_feature: MA Experiment 108569 PARAMETER Experiment Name: At_0.001%_MeJA__cDNA_P Parameter: Timepoint (hr) Value: 6
  misc_feature: MA Experiment 108569 PARAMETER Experiment Name: At_0.001%_MeJA__cDNA_P Parameter: Tissue Value: Aerial
  misc_feature: MA Experiment 108569 PARAMETER Experiment Name: At_0.001%_MeJA__cDNA_P Parameter: Treatment Value: 0.001% MeJA vs. No Treatment
  misc_feature: MA Experiment ID: 20000171 Result: Up-regulated in Transcription
  misc_feature: MA Experiment 20000171 PARAMETER Experiment Name: At_42deg_Heat_P Parameter: Age (day) Value: 14
  misc_feature: MA Experiment 20000171 PARAMETER Experiment Name: At_42deg_Heat_P Parameter: Organism Value: A. thaliana
  misc_feature: MA Experiment 20000171 PARAMETER Experiment Name: At_42deg_Heat_P Parameter: Plant Line Value: WS
  misc_feature: MA Experiment 20000171 PARAMETER Experiment Name: At_42deg_Heat_P Parameter: Temperature (deg C) Value: 42 vs. 22
  misc_feature: MA Experiment 20000171 PARAMETER Experiment Name: At_42deg_Heat_P Parameter: Timepoint (hr) Value: 1
  misc_feature: MA Experiment 20000171 PARAMETER Experiment Name: At_42deg_Heat_P Parameter: Tissue Value: Aerial
  misc_feature: MA Experiment ID: 20000180 Result: Up-regulated in Transcription
  misc_feature: MA Experiment 20000180 PARAMETER Experiment Name: At_Germinating_Seeds_P Parameter: Age (hr) Value: 24 vs. 0
  misc_feature: MA Experiment 20000180 PARAMETER Experiment Name: At_Germinating_Seeds_P Parameter: Tissue Value: Germinating Seeds
  misc_feature: MA Experiment ID: 20000224 Result: Down-regulated in Transcription
  misc_feature: MA Experiment ID: 20000439 Result: Up-regulated in Transcription
  misc_feature: MA Experiment 20000439 PARAMETER Experiment Name: At_Roots__P Parameter: Age (day) Value: 14 vs. 21
  misc_feature: MA Experiment 20000439 PARAMETER Experiment Name: At_Roots__P Parameter: Organism Value: A. thaliana
  misc_feature: MA Experiment 20000439 PARAMETER Experiment Name: At_Roots__P Parameter: Tissue Value: Roots vs. Whole Plant
  misc_feature: MA Experiment ID: 20001555 Result: Up-regulated in Transcription
  misc_feature: MA Experiment 20001555 PARAMETER Experiment Name: At_Drought_Soil_Dry_P Parameter: Age (day) Value: 24
  misc_feature: MA Experiment 20001555 PARAMETER Experiment Name: At_Drought_Soil_Dry_P Parameter: Organism Value: A. thaliana
  misc_feature: MA Experiment 20001555 PARAMETER Experiment Name: At_Drought_Soil_Dry_P Parameter: Plant Line Value: WS
  misc_feature: MA Experiment 20001555 PARAMETER Experiment Name: At_Drought_Soil_Dry_P Parameter: Post Timepoint (hr) Value: None
  misc_feature: MA Experiment 20001555 PARAMETER Experiment Name: At_Drought_Soil_Dry_P Parameter: Post-Treatment Value: None
  misc_feature: MA Experiment 20001555 PARAMETER Experiment Name: At_Drought_Soil_Dry_P Parameter: Timepoint (day) Value: 10
  misc_feature: MA Experiment 20001555 PARAMETER Experiment Name: At_Drought_Soil_Dry_P Parameter: Treatment Value: Drought vs. No Drought

SEQ ID NO: 32532 - protein, 364 aa, Arabidopsis thaliana; identical to SEQ ID NO: 28942
  peptide (1)..(364): Ceres Seq. ID no. 13490560
  misc_feature (252)..(364): Homolog of NCBI NO: 40716478 NR Description: putative membrane protein type I [Musa acuminata]
  misc_feature (1)..(364): Homolog of NCBI NO: 15230073 NR Description: type 1 membrane protein -related [Arabidopsis

SEQ ID NO: 32533 - protein, 318 aa, Arabidopsis thaliana; identical to SEQ ID NO: 28943
  peptide (1)..(318): Ceres Seq. ID no. 13490561
  misc_feature (206)..(318): Homolog of NCBI NO: 40716478 NR Description: putative membrane protein type I [Musa acuminata]
  misc_feature (1)..(318): Homolog of NCBI NO: 15230073 NR Description: type 1 membrane protein -related [Arabidopsis

SEQ ID NO: 32534 - protein, 263 aa, Arabidopsis thaliana; identical to SEQ ID NO: 28944
  peptide (1)..(263): Ceres Seq. ID no. 13490562
  misc_feature (151)..(263): Homolog of NCBI NO: 40716478 NR Description: putative membrane protein type I [Musa acuminata]
  misc_feature (1)..(263): Homolog of NCBI NO: 15230073 NR Description: type 1 membrane protein -related [Arabidopsis

SEQ ID NO: 32535 - DNA, 1337 bp, Arabidopsis thaliana; identical to SEQ ID NO: 28945
  misc_feature (1)..(1337): Ceres Seq. ID no. 12325072
  misc_feature: MA Experiment ID: 108569 Result: Up-regulated in Transcription
  misc_feature: MA Experiment 108569 PARAMETER Experiment Name: At_0.001%_MeJA__cDNA_P Parameter: Timepoint (hr) Value: 6
  misc_feature: MA Experiment 108569 PARAMETER Experiment Name: At_0.001%_MeJA__cDNA_P Parameter: Tissue Value: Aerial
  misc_feature: MA Experiment 108569 PARAMETER Experiment Name: At_0.001%_MeJA__cDNA_P Parameter: Treatment Value: 0.001% MeJA vs. No Treatment

SEQ ID NO: 32536 - protein, 275 aa, Arabidopsis thaliana; identical to SEQ ID NO: 28946
  peptide (1)..(275): Ceres Seq. ID no. 12325073
  misc_feature (70)..(87): Pfam Name: Bacterial transferase hexapeptide (three repeats) Pfam Description: Bacterial transferase hexapeptide (three
  misc_feature (59)..(249): Homolog of NCBI NO: 40218049 NR Description: putative gamma carbonic anhydrase [Chlamydomonas
  misc_feature (46)..(259): Homolog of NCBI NO: 10177532 NR Description: ferripyochelin-binding protein-like [Arabidopsis
  misc_feature (1)..(256): Homolog of NCBI NO: 34902506 NR Description: P0581F09.11 [Oryza sativa (japonica
  misc_feature (1)..(269): Homolog of NCBI NO: 34904754 NR Description: putative transcription factor APFI
  misc_feature (1)..(259): Homolog of NCBI NO: 18425082 NR Description: ferripyochelin-binding protein-like
  misc_feature (1)..(264): Homolog of NCBI NO: 13507025 NR Description: transcription factor APFI [Arabidopsis thaliana]
  misc_feature (1)..(264): Homolog of NCBI NO: 15220153 NR Description: Unknown protein
  misc_feature (39)..(275): Homolog of NCBI NO: 8778427 NR Description: F18O14.34 [Arabidopsis thaliana]
  misc_feature (1)..(275): Homolog of NCBI NO: 18394761 NR Description: expressed protein
  misc_feature (1)..(275): Homolog of NCBI NO: 21537242 NR Description: unknown [Arabidopsis thaliana]

SEQ ID NO: 32537 - protein, 230 aa, Arabidopsis thaliana; identical to SEQ ID NO: 28947
  peptide (1)..(230): Ceres Seq. ID no. 12325074
  misc_feature (25)..(42): Pfam Name: Bacterial transferase hexapeptide (three repeats) Pfam Description: Bacterial transferase hexapeptide (three
  misc_feature (14)..(204): Homolog of NCBI NO: 40218049 NR Description: putative gamma carbonic anhydrase [Chlamydomonas
  misc_feature (1)..(214): Homolog of NCBI NO: 10177532 NR Description: ferripyochelin-binding protein-like [Arabidopsis
  misc_feature (1)..(211): Homolog of NCBI NO: 34902506 NR Description: P0581F09.11 [Oryza sativa (japonica
  misc_feature (1)..(224): Homolog of NCBI NO: 34904754 NR Description: putative transcription factor APFI
  misc_feature (1)..(214): Homolog of NCBI NO: 18425082 NR Description: ferripyochelin-binding protein-like
  misc_feature (1)..(219): Homolog of NCBI NO: 13507025 NR Description: transcription factor APFI [Arabidopsis thaliana]
  misc_feature (1)..(219): Homolog of NCBI NO: 15220153 NR Description: Unknown protein
  misc_feature (1)..(230): Homolog of NCBI NO: 8778427 NR Description: F18O14.34 [Arabidopsis thaliana]
  misc_feature (1)..(230): Homolog of NCBI NO: 18394761 NR Description: expressed protein
  misc_feature (1)..(230): Homolog of NCBI NO: 21537242 NR Description: unknown [Arabidopsis thaliana]

SEQ ID NO: 32538 - DNA, 1088 bp, Arabidopsis thaliana; identical to SEQ ID NO: 28948
  misc_feature (1)..(1088): Ceres Seq. ID no. 13490620
  misc_feature: MA Experiment ID: 108434 Result: Up-regulated in Transcription
  misc_feature: MA Experiment 108434 PARAMETER Experiment Name: At_Root_Tips_cDNA_P Parameter: Tissue Value: Root Tips
  misc_feature: MA Experiment ID: 108461 Result: Up-regulated in Transcription
  misc_feature: MA Experiment 108461 PARAMETER Experiment Name: At_Germinating_Seeds_cDNA_P Parameter: Age (day) Value: 1 vs. 0
  misc_feature: MA Experiment 108461 PARAMETER Experiment Name: At_Germinating_Seeds_cDNA_P Parameter: Tissue Value: Germinating Seeds
  misc_feature: MA Experiment ID: 108462 Result: Up-regulated in Transcription
  misc_feature: MA Experiment 108462 PARAMETER Experiment Name: At_Germinating_Seeds_cDNA_P Parameter: Age (day) Value: 2 vs. 0
  misc_feature: MA Experiment 108462 PARAMETER Experiment Name: At_Germinating_Seeds_cDNA_P Parameter: Tissue Value: Germinating Seeds
  misc_feature: MA Experiment ID: 108464 Result: Up-regulated in Transcription
  misc_feature: MA Experiment 108464 PARAMETER Experiment Name: At_Germinating_Seeds_cDNA_P Parameter: Age (day) Value: 4 vs. 0
  misc_feature: MA Experiment 108464 PARAMETER Experiment Name: At_Germinating_Seeds_cDNA_P Parameter: Tissue Value: Germinating Seeds
  misc_feature: MA Experiment ID: 108501 Result: Down-regulated in Transcription
  misc_feature: MA Experiment 108501 PARAMETER Experiment Name: At_ap2_floral_buds_cDNA_P Parameter: Plant Line Value: ap2 (Ler.)
  misc_feature: MA Experiment 108501 PARAMETER Experiment Name: At_ap2_floral_buds_cDNA_P Parameter: Tissue Value: Closed Flower
  misc_feature: MA Experiment ID: 108572 Result: Up-regulated in Transcription
  misc_feature: MA Experiment 108572 PARAMETER Experiment Name: At_Drought_cDNA_P Parameter: Timepoint (hr) Value: 1
  misc_feature: MA Experiment 108572 PARAMETER Experiment Name: At_Drought_cDNA_P Parameter: Tissue Value: Aerial
  misc_feature: MA Experiment 108572 PARAMETER Experiment Name: At_Drought_cDNA_P Parameter: Treatment Value: Drought vs. No Drought
  misc_feature: MA Experiment ID: 108573 Result: Up-regulated in Transcription
  misc_feature: MA Experiment 108573 PARAMETER Experiment Name: At_Drought_cDNA_P Parameter: Timepoint (hr) Value: 6
  misc_feature: MA Experiment 108573 PARAMETER Experiment Name: At_Drought_cDNA_P Parameter: Tissue Value: Aerial
  misc_feature: MA Experiment 108573 PARAMETER Experiment Name: At_Drought_cDNA_P Parameter: Treatment Value: Drought vs. No Drought
  misc_feature: MA Experiment ID: 108579 Result: Down-regulated in Transcription
  misc_feature: MA Experiment 108579 PARAMETER Experiment Name: At_4deg_Cold_cDNA_P Parameter: Temperature (deg C) Value: 4 vs. 22
  misc_feature: MA Experiment 108579 PARAMETER Experiment Name: At_4deg_Cold_cDNA_P Parameter: Timepoint (hr) Value: 6
  misc_feature: MA Experiment 108579 PARAMETER Experiment Name: At_4deg_Cold_cDNA_P Parameter: Tissue Value: Aerial
  misc_feature: MA Experiment ID: 108595 Result: Down-regulated in Transcription
  misc_feature: MA Experiment 108595 PARAMETER Experiment Name: At_Ler-pi_Ovule_cDNA_P Parameter: Plant Line Value: null
  misc_feature: MA Experiment ID: 108608 Result: Up-regulated in Transcription
  misc_feature: MA Experiment 108608 PARAMETER Experiment Name: At_100uM_ABA_cDNA_P Parameter: Timepoint (hr) Value: 1
  misc_feature: MA Experiment 108608 PARAMETER Experiment Name: At_100uM_ABA_cDNA_P Parameter: Tissue Value: Aerial
  misc_feature: MA Experiment 108608 PARAMETER Experiment Name: At_100uM_ABA_cDNA_P Parameter: Treatment Value: 100uM ABA vs. No Treatment
  misc_feature: MA Experiment ID: 20000166 Result: Up-regulated in Transcription
  misc_feature: MA Experiment 20000166 PARAMETER Experiment Name: At_100uM_ABA_P Parameter: Age (day) Value: 14
  misc_feature: MA Experiment 20000166 PARAMETER Experiment Name: At_100uM_ABA_P Parameter: Organism Value: A. thaliana
  misc_feature: MA Experiment 20000166 PARAMETER Experiment Name: At_100uM_ABA_P Parameter: Plant Line Value: WS
  misc_feature: MA Experiment 20000166 PARAMETER Experiment Name: At_100uM_ABA_P Parameter: Timepoint (hr) Value: 1
  misc_feature: MA Experiment 20000166 PARAMETER Experiment Name: At_100uM_ABA_P Parameter: Tissue Value: Aerial
  misc_feature: MA Experiment 20000166 PARAMETER Experiment Name: At_100uM_ABA_P Parameter: Treatment Value: 100uM ABA vs. No Treatment
  misc_feature: MA Experiment ID: 20000179 Result: Up-regulated in Transcription
  misc_feature: MA Experiment 20000179 PARAMETER Experiment Name: At_Germinating_Seeds_P Parameter: Age (hr) Value: 6 vs. 0
  misc_feature: MA Experiment 20000179 PARAMETER Experiment Name: At_Germinating_Seeds_P Parameter: Tissue Value: Germinating Seeds
  misc_feature: MA Experiment ID: 20000180 Result: Up-regulated in Transcription
  misc_feature: MA Experiment 20000180 PARAMETER Experiment Name: At_Germinating_Seeds_P Parameter: Age (hr) Value: 24 vs. 0
  misc_feature: MA Experiment 20000180 PARAMETER Experiment Name: At_Germinating_Seeds_P Parameter: Tissue Value: Germinating Seeds
  misc_feature: MA Experiment ID: 20000224 Result: Down-regulated in Transcription
  misc_feature: MA Experiment ID: 20000451 Result: Down-regulated in Transcription
  misc_feature: MA Experiment 20000451 PARAMETER Experiment Name: At_CS6879_Shoots-Roots_P Parameter: Age (day) Value: 14
  misc_feature: MA Experiment 20000451 PARAMETER Experiment Name: At_CS6879_Shoots-Roots_P Parameter: Organism Value: A. thaliana
  misc_feature: MA Experiment 20000451 PARAMETER Experiment Name: At_CS6879_Shoots-Roots_P Parameter: Plant Line Value: CS6879 vs. WS
  misc_feature: MA Experiment 20000451 PARAMETER Experiment Name: At_CS6879_Shoots-Roots_P Parameter: Tissue Value: Roots
  misc_feature: MA Experiment ID: 20000452 Result: Down-regulated in Transcription
  misc_feature: MA Experiment 20000452 PARAMETER Experiment Name: At_CS6879_Shoots-Roots_P Parameter: Age (day) Value: 14
  misc_feature: MA Experiment 20000452 PARAMETER Experiment Name: At_CS6879_Shoots-Roots_P Parameter: Organism Value: A. thaliana
  misc_feature: MA Experiment 20000452 PARAMETER Experiment Name: At_CS6879_Shoots-Roots_P Parameter: Plant Line Value: CS6879 vs. WS
  misc_feature: MA Experiment 20000452 PARAMETER Experiment Name: At_CS6879_Shoots-Roots_P Parameter: Tissue Value: Shoots
  misc_feature: MA Experiment ID: 20001557 Result: Down-regulated in Transcription
  misc_feature: MA Experiment 20001557 PARAMETER Experiment Name: At_Drought_Soil_Dry_P Parameter: Age (day) Value: 27
  misc_feature: MA Experiment 20001557 PARAMETER Experiment Name: At_Drought_Soil_Dry_P Parameter: Organism Value: A. thaliana
  misc_feature: MA Experiment 20001557 PARAMETER Experiment Name: At_Drought_Soil_Dry_P Parameter: Plant Line Value: WS
  misc_feature: MA Experiment 20001557 PARAMETER Experiment Name: At_Drought_Soil_Dry_P Parameter: Post Timepoint (hr) Value: 3
  misc_feature: MA Experiment 20001557 PARAMETER Experiment Name: At_Drought_Soil_Dry_P Parameter: Post-Treatment Value: Re-Water vs. No Drought
  misc_feature: MA Experiment 20001557 PARAMETER Experiment Name: At_Drought_Soil_Dry_P Parameter: Timepoint (day) Value: 13
  misc_feature: MA Experiment 20001557 PARAMETER Experiment Name: At_Drought_Soil_Dry_P Parameter: Treatment Value: Drought vs. No Drought
  misc_feature: MA Experiment ID: 20001558 Result: Down-regulated in Transcription
  misc_feature: MA Experiment 20001558 PARAMETER Experiment Name: At_Drought_Soil_Dry_P Parameter: Age (day) Value: 27
  misc_feature: MA Experiment 20001558 PARAMETER Experiment Name: At_Drought_Soil_Dry_P Parameter: Organism Value: A. thaliana
  misc_feature: MA Experiment 20001558 PARAMETER Experiment Name: At_Drought_Soil_Dry_P Parameter: Plant Line Value: WS
  misc_feature: MA Experiment 20001558 PARAMETER Experiment Name: At_Drought_Soil_Dry_P Parameter: Post Timepoint (hr) Value: 6
  misc_feature: MA Experiment 20001558 PARAMETER Experiment Name: At_Drought_Soil_Dry_P Parameter: Post-Treatment Value: Re-Water vs. No Drought
  misc_feature: MA Experiment 20001558 PARAMETER Experiment Name: At_Drought_Soil_Dry_P Parameter: Timepoint (day) Value: 13
  misc_feature: MA Experiment 20001558 PARAMETER Experiment Name: At_Drought_Soil_Dry_P Parameter: Treatment Value: Drought vs. No Drought

SEQ ID NO: 32539 - protein, 277 aa, Arabidopsis thaliana; identical to SEQ ID NO: 28949
  peptide (1)..(277): Ceres Seq. ID no. 13490621
  misc_feature (27)..(274): Homolog of NCBI NO: 18416995 NR Description: expressed protein [Arabidopsis thaliana]
  misc_feature (27)..(274): Homolog of NCBI NO: 18400774 NR Description: expressed protein [Arabidopsis thaliana]
  misc_feature (27)..(276): Homolog of NCBI NO: 32352176 NR Description: hypothetical protein [Oryza sativa (japonica
  misc_feature (26)..(276): Homolog of NCBI NO: 30017570 NR Description: unknown protein [Oryza sativa (japonica
  misc_feature (27)..(277): Homolog of NCBI NO: 15228883 NR Description: expressed protein [Arabidopsis thaliana]
  misc_feature (27)..(277): Homolog of NCBI NO: 20340249 NR Description: aluminum-induced protein-like protein
  misc_feature (27)..(277): Homolog of NCBI NO: 15239993 NR Description: aluminum-induced protein-related [Arabidopsis

SEQ ID NO: 32540 - protein, 251 aa, Arabidopsis thaliana; identical to SEQ ID NO: 28950
  peptide (1)..(251): Ceres Seq. ID no. 13490622
  misc_feature (1)..(248): Homolog of NCBI NO: 18416995 NR Description: expressed protein [Arabidopsis thaliana]
  misc_feature (1)..(248): Homolog of NCBI NO: 18400774 NR Description: expressed protein [Arabidopsis thaliana]
  misc_feature (1)..(250): Homolog of NCBI NO: 32352176 NR Description: hypothetical protein [Oryza sativa (japonica
  misc_feature (1)..(250): Homolog of NCBI NO: 30017570 NR Description: unknown protein [Oryza sativa (japonica
  misc_feature (1)..(251): Homolog of NCBI NO: 15228883 NR Description: expressed protein [Arabidopsis thaliana]
  misc_feature (1)..(251): Homolog of NCBI NO: 20340249 NR Description: aluminum-induced protein-like protein
  misc_feature (1)..(251): Homolog of NCBI NO: 15239993 NR Description: aluminum-induced protein-related [Arabidopsis

SEQ ID NO: 32541 - DNA, 944 bp, Arabidopsis thaliana; identical to SEQ ID NO: 28951
  misc_feature (1)..(944): Ceres Seq. ID no. 12334417
  misc_feature: MA Experiment ID: 108434 Result: Down-regulated in Transcription
  misc_feature: MA Experiment 108434 PARAMETER Experiment Name: At_Root_Tips_cDNA_P Parameter: Tissue Value: Root Tips
  misc_feature: MA Experiment ID: 108435 Result: Down-regulated in Transcription
  misc_feature: MA Experiment 108435 PARAMETER Experiment Name: At_stm_Mutants_cDNA_P Parameter: Plant Line Value: wt Landsburg vs stm
  misc_feature: MA Experiment 108435 PARAMETER Experiment Name: At_stm_Mutants_cDNA_P Parameter: Tissue Value: Shoot Apical Meristem Region
  misc_feature: MA Experiment ID: 108579 Result: Down-regulated in Transcription
  misc_feature: MA Experiment 108579 PARAMETER Experiment Name: At_4deg_Cold_cDNA_P Parameter: Temperature (deg C) Value: 4 vs. 22
  misc_feature: MA Experiment 108579 PARAMETER Experiment Name: At_4deg_Cold_cDNA_P Parameter: Timepoint (hr) Value: 6
  misc_feature: MA Experiment 108579 PARAMETER Experiment Name: At_4deg_Cold_cDNA_P Parameter: Tissue Value: Aerial
  misc_feature: MA Experiment ID: 108585 Result: Down-regulated in Transcription
  misc_feature: MA Experiment 108585 PARAMETER Experiment Name: At_5mM_NaNP_cDNA_P Parameter: Timepoint (hr) Value: 6
  misc_feature: MA Experiment 108585 PARAMETER Experiment Name: At_5mM_NaNP_cDNA_P Parameter: Tissue Value: Aerial
  misc_feature: MA Experiment 108585 PARAMETER Experiment Name: At_5mM_NaNP_cDNA_P Parameter: Treatment Value: null
  misc_feature: MA Experiment ID: 108595 Result: Down-regulated in Transcription
  misc_feature: MA Experiment 108595 PARAMETER Experiment Name: At_Ler-pi_Ovule_cDNA_P Parameter: Plant Line Value: null
  misc_feature: MA Experiment ID: 20000030 Result: Up-regulated in Transcription
  misc_feature: MA Experiment 20000030 PARAMETER Experiment Name: At_CS6630_Roots_cDNA_P Parameter: Plant Line Value: CS6630 vs. WS
  misc_feature: MA Experiment 20000030 PARAMETER Experiment Name: At_CS6630_Roots_cDNA_P Parameter: Tissue Value: Roots
  misc_feature: MA Experiment ID: 20000111 Result: Down-regulated in Transcription
  misc_feature: MA Experiment 20000111 PARAMETER Experiment Name: At_42deg_Heat_cDNA_P Parameter: Temperature (deg C) Value: 42 vs. 22
  misc_feature: MA Experiment 20000111 PARAMETER Experiment Name: At_42deg_Heat_cDNA_P Parameter: Timepoint (hr) Value: 6
  misc_feature: MA Experiment 20000111 PARAMETER Experiment Name: At_42deg_Heat_cDNA_P Parameter: Tissue Value: Aerial
  misc_feature: MA Experiment ID: 20000113 Result: Down-regulated in Transcription
  misc_feature: MA Experiment 20000113 PARAMETER Experiment Name: At_42deg_Heat_cDNA_P Parameter: Temperature (deg C) Value: 42 vs. 22
  misc_feature: MA Experiment 20000113 PARAMETER Experiment Name: At_42deg_Heat_cDNA_P Parameter: Timepoint (hr) Value: 8
  misc_feature: MA Experiment 20000113 PARAMETER Experiment Name: At_42deg_Heat_cDNA_P Parameter: Tissue Value: Aerial
  misc_feature: MA Experiment ID: 20000173 Result: Down-regulated in Transcription
  misc_feature: MA Experiment 20000173 PARAMETER Experiment Name: At_42deg_Heat_P Parameter: Age (day) Value: 14
  misc_feature: MA Experiment 20000173 PARAMETER Experiment Name: At_42deg_Heat_P Parameter: Organism Value: A. thaliana
  misc_feature: MA Experiment 20000173 PARAMETER Experiment Name: At_42deg_Heat_P Parameter: Plant Line Value: WS
  misc_feature: MA Experiment 20000173 PARAMETER Experiment Name: At_42deg_Heat_P Parameter: Temperature (deg C) Value: 42 vs. 22
  misc_feature: MA Experiment 20000173 PARAMETER Experiment Name: At_42deg_Heat_P Parameter: Timepoint (hr) Value: 6
  misc_feature: MA Experiment 20000173 PARAMETER Experiment Name: At_42deg_Heat_P Parameter: Tissue Value: Aerial
  misc_feature: MA Experiment ID: 20000179 Result: Up-regulated in Transcription
  misc_feature: MA Experiment 20000179 PARAMETER Experiment Name: At_Germinating_Seeds_P Parameter: Age (hr) Value: 6 vs. 0
  misc_feature: MA Experiment 20000179 PARAMETER Experiment Name: At_Germinating_Seeds_P Parameter: Tissue Value: Germinating Seeds
  misc_feature: MA Experiment ID: 20000184 Result: Down-regulated in Transcription
  misc_feature: MA Experiment 20000184 PARAMETER Experiment Name: At_Shoots__P Parameter: Age (day) Value: 7
  misc_feature: MA Experiment 20000184 PARAMETER Experiment Name: At_Shoots__P Parameter: Tissue Value: Shoots vs. Whole Plant
  misc_feature: MA Experiment ID: 20000185 Result: Down-regulated in Transcription
  misc_feature: MA Experiment 20000185 PARAMETER Experiment Name: At_Roots__P Parameter: Age (day) Value: 7 vs. 21
  misc_feature: MA Experiment 20000185 PARAMETER Experiment Name: At_Roots__P Parameter: Organism Value: A. thaliana
  misc_feature: MA Experiment 20000185 PARAMETER Experiment Name: At_Roots__P Parameter: Tissue Value: Roots vs. Whole Plant
  misc_feature: MA Experiment ID: 20000227 Result: Down-regulated in Transcription
  misc_feature: MA Experiment 20000227 PARAMETER Experiment Name: At_Root-Tips-vs-Tops_P Parameter: Tissue Value: Root Tips vs. Root Tops
  misc_feature: MA Experiment ID: 20000234 Result: Down-regulated in Transcription
  misc_feature: MA Experiment 20000234 PARAMETER Experiment Name: At_Siliques_P Parameter: Age (day) Value: 21
  misc_feature: MA Experiment 20000234 PARAMETER Experiment Name: At_Siliques_P Parameter: Organism Value: A. thaliana
  misc_feature: MA Experiment 20000234 PARAMETER Experiment Name: At_Siliques_P Parameter: Plant Line Value: WS
  misc_feature: MA Experiment 20000234 PARAMETER Experiment Name: At_Siliques_P Parameter: Tissue Value: Less Than 5mm Siliques vs. Whole Plant
  misc_feature: MA Experiment ID: 20000264 Result: Down-regulated in Transcription
  misc_feature: MA Experiment 20000264 PARAMETER Experiment Name: At_Open_Flower_P Parameter: Age (day) Value: 21
  misc_feature: MA Experiment 20000264 PARAMETER Experiment Name: At_Open_Flower_P Parameter: Plant Line Value: WS
  misc_feature: MA Experiment 20000264 PARAMETER Experiment Name: At_Open_Flower_P Parameter: Tissue Value: Open Flower vs. Whole Plant
  misc_feature: MA Experiment ID: 20000439 Result: Down-regulated in Transcription
  misc_feature: MA Experiment 20000439 PARAMETER Experiment Name: At_Roots__P Parameter: Age (day) Value: 14 vs. 21
  misc_feature: MA Experiment 20000439 PARAMETER Experiment Name: At_Roots__P Parameter: Organism Value: A. thaliana
  misc_feature: MA Experiment 20000439 PARAMETER Experiment Name: At_Roots__P Parameter: Tissue Value: Roots vs. Whole Plant
  misc_feature: MA Experiment ID: 20000495 Result: Down-regulated in Transcription
  misc_feature: MA Experiment 20000495 PARAMETER Experiment Name: At_Guard_Cells_P Parameter: Harvest Date Value: 8/2/2002
  misc_feature: MA Experiment 20000495 PARAMETER Experiment Name: At_Guard_Cells_P Parameter: Organism Value: A. thaliana
  misc_feature: MA Experiment 20000495 PARAMETER Experiment Name: At_Guard_Cells_P Parameter: Tissue Value: Guard Cells vs. Leaves

SEQ ID NO: 32542 - protein, 236 aa, Arabidopsis thaliana; identical to SEQ ID NO: 28883
  peptide (1)..(236): Ceres Seq. ID no. 12334418
  misc_feature (12)..(227): Pfam Name: Peroxisomal biogenesis factor 11 (PEX11) Pfam Description: Peroxisomal biogenesis factor 11 (PEX11)
  misc_feature (132)..(236): Homolog of NCBI NO: 14335058 NR Description: At2g45740/F4I18.28 [Arabidopsis thaliana]
  misc_feature (3)..(225): Homolog of NCBI NO: 34898026 NR Description: ESTs AU064537(E31904),AU082147(E31904) correspond a region of the predicted gene.~Similar to Arabidopsis thaliana
  misc_feature (3)..(234): Homolog of NCBI NO: 25553559 NR Description: OSJNBa0038F22.7 [Oryza sativa (japonica
  misc_feature (3)..(234): Homolog of NCBI NO: 8489788 NR Description: unknown [Lycopersicon esculentum]
  misc_feature (3)..(236): Homolog of NCBI NO: 11358250 NR Description: hypothetical protein T27I15_160 - Arabidopsis
  misc_feature (3)..(234): Homolog of NCBI NO: 18378887 NR Description: expressed protein
  misc_feature (3)..(236): Homolog of NCBI NO: 30695340 NR Description: expressed protein [Arabidopsis thaliana]
  misc_feature (1)..(231): Homolog of NCBI NO: 7486466 NR Description: hypothetical protein At2g45740 [imported] -
  misc_feature (1)..(236): Homolog of NCBI NO: 18406877 NR Description: expressed protein

SEQ ID NO: 32543 - protein, 220 aa, Arabidopsis thaliana; identical to SEQ ID NO: 28884
  peptide (1)..(220): Ceres Seq. ID no. 12334419
  misc_feature (1)..(211): Pfam Name: Peroxisomal biogenesis factor 11 (PEX11) Pfam Description: Peroxisomal biogenesis factor 11 (PEX11)
  misc_feature (116)..(220): Homolog of NCBI NO: 14335058 NR Description: At2g45740/F4I18.28 [Arabidopsis thaliana]
  misc_feature (1)..(209): Homolog of NCBI NO: 34898026 NR Description: ESTs AU064537(E31904),AU082147(E31904) correspond a region of the predicted gene.~Similar to Arabidopsis thaliana
  misc_feature (1)..(218): Homolog of NCBI NO: 25553559 NR Description: OSJNBa0038F22.7 [Oryza sativa (japonica
  misc_feature (1)..(218): Homolog of NCBI NO: 8489788 NR Description: unknown [Lycopersicon esculentum]
  misc_feature (1)..(220): Homolog of NCBI NO: 11358250 NR Description: hypothetical protein T27I15_160 - Arabidopsis
  misc_feature (1)..(218): Homolog of NCBI NO: 18378887 NR Description: expressed protein
  misc_feature (1)..(220): Homolog of NCBI NO: 30695340 NR Description: expressed protein [Arabidopsis thaliana]
  misc_feature (1)..(215): Homolog of NCBI NO: 7486466 NR Description: hypothetical protein At2g45740 [imported] -
  misc_feature (1)..(220): Homolog of NCBI NO: 18406877 NR Description: expressed protein

SEQ ID NO: 32544 - DNA, 1212 bp, Arabidopsis thaliana; identical to SEQ ID NO: 28954
  misc_feature (1)..(1212): Ceres Seq. ID no. 12422769
  misc_feature: MA Experiment ID: 108434 Result: Down-regulated in Transcription
  misc_feature: MA Experiment 108434 PARAMETER Experiment Name: At_Root_Tips_cDNA_P Parameter: Tissue Value: Root Tips
  misc_feature: MA Experiment ID: 108573 Result: Up-regulated in Transcription
  misc_feature: MA Experiment 108573 PARAMETER Experiment Name: At_Drought_cDNA_P Parameter: Timepoint (hr) Value: 6
  misc_feature: MA Experiment 108573 PARAMETER Experiment Name: At_Drought_cDNA_P Parameter: Tissue Value: Aerial
  misc_feature: MA Experiment 108573 PARAMETER Experiment Name: At_Drought_cDNA_P Parameter: Treatment Value: Drought vs. No Drought
  misc_feature: MA Experiment ID: 108595 Result: Down-regulated in Transcription
  misc_feature: MA Experiment 108595 PARAMETER Experiment Name: At_Ler-pi_Ovule_cDNA_P Parameter: Plant Line Value: null
  misc_feature: MA Experiment ID: 20000224 Result: Down-regulated in Transcription

SEQ ID NO: 32545 - protein, 271 aa, Arabidopsis thaliana; identical to SEQ ID NO: 28955
  peptide (1)..(271): Ceres Seq. ID no. 12422770
  misc_feature (7)..(250): Pfam Name: Conserved hypothetical ATP binding protein Pfam Description: Conserved hypothetical ATP binding protein
  misc_feature (1)..(256): Homolog of NCBI NO: 39587465 NR Description: Hypothetical protein CBG23047 [Caenorhabditis
  misc_feature (3)..(271): Homolog of NCBI NO: 21410245 NR Description: protein x 0004 [Homo sapiens]
  misc_feature (6)..(261): Homolog of NCBI NO: 6323272 NR Description: Protein required for cell viability; Ylr243wp
  misc_feature (3)..(255): Homolog of NCBI NO: 21312642 NR Description: RIKEN cDNA A930018B01 [Mus musculus]
  misc_feature (1)..(256): Homolog of NCBI NO: 17556506 NR Description: ATP-binding protein like (31.0 kD)
  misc_feature (3)..(255): Homolog of NCBI NO: 34872358 NR Description: similar to RIKEN cDNA A930018B01 [Rattus
  misc_feature (3)..(256): Homolog of NCBI NO: 37606123 NR Description: SI:zK83D9.3 (novel protein similar to human x
  misc_feature (59)..(271): Homolog of NCBI NO: 7487264 NR Description: hypothetical protein T20K18.140 - Arabidopsis
  misc_feature (1)..(266): Homolog of NCBI NO: 18071342 NR Description: putative ATP(GTP)-binding protein
  misc_feature (1)..(271): Homolog of NCBI NO: 18413871 NR Description: putative protein

SEQ ID NO: 32546 - protein, 239 aa, Arabidopsis thaliana; identical to SEQ ID NO: 28956
  peptide (1)..(239): Ceres Seq. ID no. 12422771
  misc_feature (1)..(218): Pfam Name: Conserved hypothetical ATP binding protein Pfam Description: Conserved hypothetical ATP binding protein
  misc_feature (1)..(224): Homolog of NCBI NO: 39587465 NR Description: Hypothetical protein CBG23047 [Caenorhabditis
  misc_feature (1)..(239): Homolog of NCBI NO: 21410245 NR Description: protein x 0004 [Homo sapiens]
  misc_feature (1)..(229): Homolog of NCBI NO: 6323272 NR Description: Protein required for cell viability; Ylr243wp
  misc_feature (1)..(223): Homolog of NCBI NO: 21312642 NR Description: RIKEN cDNA A930018B01 [Mus musculus]
  misc_feature (1)..(224): Homolog of NCBI NO: 17556506 NR Description: ATP-binding protein like (31.0 kD)
  misc_feature (1)..(223): Homolog of NCBI NO: 34872358 NR Description: similar to RIKEN cDNA A930018B01 [Rattus
  misc_feature (1)..(224): Homolog of NCBI NO: 37606123 NR Description: SI:zK83D9.3 (novel protein similar to human x
  misc_feature (27)..(239): Homolog of NCBI NO: 7487264 NR Description: hypothetical protein T20K18.140 - Arabidopsis
  misc_feature (1)..(234): Homolog of NCBI NO: 18071342 NR Description: putative ATP(GTP)-binding protein
  misc_feature (1)..(239): Homolog of NCBI NO: 18413871 NR Description: putative protein

SEQ ID NO: 32547 - protein, 221 aa, Arabidopsis thaliana; identical to SEQ ID NO: 28957
  peptide (1)..(221): Ceres Seq. ID no. 12422772
  misc_feature (1)..(200): Pfam Name: Conserved hypothetical ATP binding protein Pfam Description: Conserved hypothetical ATP binding protein
  misc_feature (1)..(206): Homolog of NCBI NO: 39587465 NR Description: Hypothetical protein CBG23047 [Caenorhabditis
  misc_feature (1)..(221): Homolog of NCBI NO: 21410245 NR Description: protein x 0004 [Homo sapiens]
  misc_feature (1)..(211): Homolog of NCBI NO: 6323272 NR Description: Protein required for cell viability; Ylr243wp
  misc_feature (1)..(205): Homolog of NCBI NO: 21312642 NR Description: RIKEN cDNA A930018B01 [Mus musculus]
  misc_feature (1)..(206): Homolog of NCBI NO: 17556506 NR Description: ATP-binding protein like (31.0 kD)
  misc_feature (1)..(205): Homolog of NCBI NO: 34872358 NR Description: similar to RIKEN cDNA A930018B01 [Rattus
  misc_feature (1)..(206): Homolog of NCBI NO: 37606123 NR Description: SI:zK83D9.3 (novel protein similar to human x
  misc_feature (9)..(221): Homolog of NCBI NO: 7487264 NR Description: hypothetical protein T20K18.140 - Arabidopsis
  misc_feature (1)..(216): Homolog of NCBI NO: 18071342 NR Description: putative ATP(GTP)-binding protein
  misc_feature (1)..(221): Homolog of NCBI NO: 18413871 NR Description: putative protein

SEQ ID NO: 32548 - DNA, 1363 bp, Arabidopsis thaliana; identical to SEQ ID NO: 28958
  misc_feature (1)..(1363): Ceres Seq. ID no. 13486775
  misc_feature: MA Experiment ID: 108434 Result: Down-regulated in Transcription
  misc_feature: MA Experiment 108434 PARAMETER Experiment Name: At_Root_Tips_cDNA_P Parameter: Tissue Value: Root Tips
  misc_feature: MA Experiment ID: 108435 Result: Down-regulated in Transcription
  misc_feature: MA Experiment 108435 PARAMETER Experiment Name: At_stm_Mutants_cDNA_P Parameter: Plant Line Value: wt Landsburg vs stm
  misc_feature: MA Experiment 108435 PARAMETER Experiment Name: At_stm_Mutants_cDNA_P Parameter: Tissue Value: Shoot Apical Meristem Region
  misc_feature: MA Experiment ID: 108462 Result: Up-regulated in Transcription
  misc_feature: MA Experiment 108462 PARAMETER Experiment Name: At_Germinating_Seeds_cDNA_P Parameter: Age (day) Value: 2 vs. 0
  misc_feature: MA Experiment 108462 PARAMETER Experiment Name: At_Germinating_Seeds_cDNA_P Parameter: Tissue Value: Germinating Seeds
  misc_feature: MA Experiment ID: 108463 Result: Up-regulated in Transcription
  misc_feature: MA Experiment 108463 PARAMETER Experiment Name: At_Germinating_Seeds_cDNA_P Parameter: Age (day) Value: 3 vs. 0
  misc_feature: MA Experiment 108463 PARAMETER Experiment Name: At_Germinating_Seeds_cDNA_P Parameter: Tissue Value: Germinating Seeds
  misc_feature: MA Experiment ID: 108469 Result: Down-regulated in Transcription
  misc_feature: MA Experiment ID: 108573 Result: Up-regulated in Transcription
  misc_feature: MA Experiment 108573 PARAMETER Experiment Name: At_Drought_cDNA_P Parameter: Timepoint (hr) Value: 6
  misc_feature: MA Experiment 108573 PARAMETER Experiment Name: At_Drought_cDNA_P Parameter: Tissue Value: Aerial
  misc_feature: MA Experiment 108573 PARAMETER Experiment Name: At_Drought_cDNA_P Parameter: Treatment Value: Drought vs. No Drought
  misc_feature: MA Experiment ID: 108585 Result: Up-regulated in Transcription
  misc_feature: MA Experiment 108585 PARAMETER Experiment Name: At_5mM_NaNP_cDNA_P Parameter: Timepoint (hr) Value: 6
  misc_feature: MA Experiment 108585 PARAMETER Experiment Name: At_5mM_NaNP_cDNA_P Parameter: Tissue Value: Aerial
  misc_feature: MA Experiment 108585 PARAMETER Experiment Name: At_5mM_NaNP_cDNA_P Parameter: Treatment Value: null
  misc_feature: MA Experiment ID: 108595 Result: Down-regulated in Transcription
  misc_feature: MA Experiment 108595 PARAMETER Experiment Name: At_Ler-pi_Ovule_cDNA_P Parameter: Plant Line Value: null
  misc_feature: MA Experiment ID: 20000071 Result: Up-regulated in Transcription
  misc_feature: MA Experiment 20000071 PARAMETER Experiment Name: At_100uM_ABA_Mutants_cDNA_P Parameter: Plant Line Value: CS8104
  misc_feature: MA Experiment 20000071 PARAMETER Experiment Name: At_100uM_ABA_Mutants_cDNA_P Parameter: Timepoint (hr) Value: 6
  misc_feature: MA Experiment 20000071 PARAMETER Experiment Name: At_100uM_ABA_Mutants_cDNA_P Parameter: Tissue Value: Aerial
  misc_feature: MA Experiment 20000071 PARAMETER Experiment Name: At_100uM_ABA_Mutants_cDNA_P Parameter: Treatment Value: 100uM ABA vs. No Treatment
  misc_feature: MA Experiment ID: 20000185 Result: Down-regulated in Transcription
  misc_feature: MA Experiment 20000185 PARAMETER Experiment Name: At_Roots__P Parameter: Age (day) Value: 7 vs. 21
  misc_feature: MA Experiment 20000185 PARAMETER Experiment Name: At_Roots__P Parameter: Organism Value: A. thaliana
  misc_feature: MA Experiment 20000185 PARAMETER Experiment Name: At_Roots__P Parameter: Tissue Value: Roots vs. Whole Plant
  misc_feature: MA Experiment ID: 20000224 Result: Up-regulated in Transcription
  misc_feature: MA Experiment ID: 20000437 Result: Up-regulated in Transcription
  misc_feature: MA Experiment 20000437 PARAMETER Experiment Name: At_Drought_P Parameter: Age (day) Value: 8
  misc_feature: MA Experiment 20000437 PARAMETER Experiment Name: At_Drought_P Parameter: Organism Value: A. thaliana
  misc_feature: MA Experiment 20000437 PARAMETER Experiment Name: At_Drought_P Parameter: Plant Line Value: WS
  misc_feature: MA Experiment 20000437 PARAMETER Experiment Name: At_Drought_P Parameter: Timepoint (hr) Value: 24
  misc_feature: MA Experiment 20000437 PARAMETER Experiment Name: At_Drought_P Parameter: Tissue Value: Whole Plant
  misc_feature: MA Experiment 20000437 PARAMETER Experiment Name: At_Drought_P Parameter: Treatment Value: Drought vs. No Drought
  misc_feature: MA Experiment ID: 20000439 Result: Down-regulated in Transcription
  misc_feature: MA Experiment 20000439 PARAMETER Experiment Name: At_Roots__P Parameter: Age (day) Value: 14 vs. 21
  misc_feature: MA Experiment 20000439 PARAMETER Experiment Name: At_Roots__P Parameter: Organism Value: A. thaliana
  misc_feature: MA Experiment 20000439 PARAMETER Experiment Name: At_Roots__P Parameter: Tissue Value: Roots vs. Whole Plant
  misc_feature: MA Experiment ID: 20000445 Result: Up-regulated in Transcription
  misc_feature: MA Experiment 20000445 PARAMETER Experiment Name: At_100uM_NAA__P Parameter: Age (day) Value: 14
  misc_feature: MA Experiment 20000445 PARAMETER Experiment Name: At_100uM_NAA__P Parameter: Organism Value: A. thaliana
  misc_feature: MA Experiment 20000445 PARAMETER Experiment Name: At_100uM_NAA__P Parameter: Plant Line Value: WS
  misc_feature: MA Experiment 20000445 PARAMETER Experiment Name: At_100uM_NAA__P Parameter: Timepoint (hr) Value: 6
  misc_feature: MA Experiment 20000445 PARAMETER Experiment Name: At_100uM_NAA__P Parameter: Tissue Value: Aerial
  misc_feature: MA Experiment 20000445 PARAMETER Experiment Name: At_100uM_NAA__P Parameter: Treatment Value: 100uM NAA vs. No Treatment
  misc_feature: MA Experiment ID: 20000451 Result: Down-regulated in Transcription
  misc_feature: MA Experiment 20000451 PARAMETER Experiment Name: At_CS6879_Shoots-Roots_P Parameter: Age (day) Value: 14
  misc_feature: MA Experiment 20000451 PARAMETER Experiment Name: At_CS6879_Shoots-Roots_P Parameter: Organism Value: A. thaliana
  misc_feature: MA Experiment 20000451 PARAMETER Experiment Name: At_CS6879_Shoots-Roots_P Parameter: Plant Line Value: CS6879 vs. WS
  misc_feature: MA Experiment 20000451 PARAMETER Experiment Name: At_CS6879_Shoots-Roots_P Parameter: Tissue Value: Roots
  misc_feature: MA Experiment ID: 20000452 Result: Up-regulated in Transcription
  misc_feature: MA Experiment 20000452 PARAMETER Experiment Name: At_CS6879_Shoots-Roots_P Parameter: Age (day) Value: 14
  misc_feature: MA Experiment 20000452 PARAMETER Experiment Name: At_CS6879_Shoots-Roots_P Parameter: Organism Value: A. thaliana
  misc_feature: MA Experiment 20000452 PARAMETER Experiment Name: At_CS6879_Shoots-Roots_P Parameter: Plant Line Value: CS6879 vs. WS
  misc_feature: MA Experiment 20000452 PARAMETER Experiment Name: At_CS6879_Shoots-Roots_P Parameter: Tissue Value: Shoots
  misc_feature: MA Experiment ID: 20000456 Result: Up-regulated in Transcription
  misc_feature: MA Experiment 20000456 PARAMETER Experiment Name: At_100uM_BA_P Parameter: Age (day) Value: 14
  misc_feature: MA Experiment 20000456 PARAMETER Experiment Name: At_100uM_BA_P Parameter: Organism Value: A. thaliana
  misc_feature: MA Experiment 20000456 PARAMETER Experiment Name: At_100uM_BA_P Parameter: Plant Line Value: WS
  misc_feature: MA Experiment 20000456 PARAMETER Experiment Name: At_100uM_BA_P Parameter: Timepoint (hr) Value: 6
  misc_feature: MA Experiment 20000456 PARAMETER Experiment Name: At_100uM_BA_P Parameter: Tissue Value: Aerial
  misc_feature: MA Experiment 20000456 PARAMETER Experiment Name: At_100uM_BA_P Parameter: Treatment Value: 100uM BA vs. No Treatment
  misc_feature: MA Experiment ID: 20001911 Result: Up-regulated in Transcription
  misc_feature: MA Experiment 20001911 PARAMETER Experiment Name: At_Drought_Reproduction_P Parameter: Age (day) Value: 40
  misc_feature: MA Experiment 20001911 PARAMETER Experiment Name: At_Drought_Reproduction_P Parameter: Organism Value: A. thaliana
  misc_feature: MA Experiment 20001911 PARAMETER Experiment Name: At_Drought_Reproduction_P Parameter: Plant Line Value: WS
  misc_feature: MA Experiment 20001911 PARAMETER Experiment Name: At_Drought_Reproduction_P Parameter: Timepoint (day) Value: 10
  misc_feature: MA Experiment 20001911 PARAMETER Experiment Name: At_Drought_Reproduction_P Parameter: Tissue Value: Flowers
  misc_feature: MA Experiment 20001911 PARAMETER Experiment Name: At_Drought_Reproduction_P Parameter: Treatment Value: Drought vs. No Drought

SEQ ID NO: 32549 - protein, 362 aa, Arabidopsis thaliana; identical to SEQ ID NO: 28959
  peptide (1)..(362): Ceres Seq. ID no. 13486776
  misc_feature (211)..(310): Pfam Name: 2OG-Fe(II) oxygenase superfamily Pfam Description: 2OG-Fe(II) oxygenase superfamily
  misc_feature (2)..(346): Homolog of NCBI NO: 15221544 NR Description: 2-oxoglutarate-dependent dioxygenase, putative
  misc_feature (9)..(362): Homolog of NCBI NO: 15221545 NR Description: 2-oxoglutarate-dependent dioxygenase, putative
  misc_feature (8)..(357): Homolog of NCBI NO: 30679748 NR Description: 2-oxoglutarate-dependent dioxygenase, putative
  misc_feature (31)..(362): Homolog of NCBI NO: 15219718 NR Description: 2-oxoglutarate-dependent dioxygenase, putative
  misc_feature (5)..(362): Homolog of NCBI NO: 15219715 NR Description: 2-oxoglutarate-dependent dioxygenase, putative
  misc_feature (1)..(362): Homolog of NCBI NO: 15238458 NR Description: 2-oxoglutarate-dependent dioxygenase, putative
  misc_feature (1)..(362): Homolog of NCBI NO: 15238459 NR Description: oxidoreductase, 2OG-Fe(II) oxygenase family
  misc_feature (1)..(362): Homolog of NCBI NO: 15239868 NR Description: 2-oxoglutarate-dependent dioxygenase, putative
  misc_feature (1)..(362): Homolog of NCBI NO: 15239870 NR Description: 2-oxoglutarate-dependent dioxygenase, putative
  misc_feature (1)..(362): Homolog of NCBI NO: 14596165 NR Description: 1-aminocyclopropane-1-carboxylate oxidase

SEQ ID NO: 32550 - protein, 325 aa, Arabidopsis thaliana; identical to SEQ ID NO: 28960
  peptide (1)..(325): Ceres Seq. ID no. 13486777
  misc_feature (174)..(273): Pfam Name: 2OG-Fe(II) oxygenase superfamily Pfam Description: 2OG-Fe(II) oxygenase superfamily
  misc_feature (1)..(309): Homolog of NCBI NO: 15221544 NR Description: 2-oxoglutarate-dependent dioxygenase, putative
  misc_feature (1)..(325): Homolog of NCBI NO: 15221545 NR Description: 2-oxoglutarate-dependent dioxygenase, putative
  misc_feature (1)..(320): Homolog of NCBI NO: 30679748 NR Description: 2-oxoglutarate-dependent dioxygenase, putative
  misc_feature (1)..(325): Homolog of NCBI NO: 15219718 NR Description: 2-oxoglutarate-dependent dioxygenase, putative
  misc_feature (1)..(325): Homolog of NCBI NO: 15219715 NR Description: 2-oxoglutarate-dependent dioxygenase, putative
  misc_feature (1)..(325): Homolog of NCBI NO: 15238458 NR Description: 2-oxoglutarate-dependent dioxygenase, putative
  misc_feature (1)..(325): Homolog of NCBI NO: 15238459 NR Description: oxidoreductase, 2OG-Fe(II) oxygenase family
  misc_feature (1)..(325): Homolog of NCBI NO: 15239868 NR Description: 2-oxoglutarate-dependent dioxygenase, putative
  misc_feature (1)..(325): Homolog of NCBI NO: 15239870 NR Description: 2-oxoglutarate-dependent dioxygenase, putative
  misc_feature (1)..(325): Homolog of NCBI NO: 14596165 NR Description: 1-aminocyclopropane-1-carboxylate oxidase

SEQ ID NO: 32551 - DNA, 747 bp, Arabidopsis thaliana; identical to SEQ ID NO: 28961
  misc_feature (1)..(747): Ceres Seq. ID no. 12738788
  misc_feature: MA Experiment ID: 108434 Result: Down-regulated in Transcription
  misc_feature: MA Experiment 108434 PARAMETER Experiment Name: At_Root_Tips_cDNA_P Parameter: Tissue Value: Root Tips
  misc_feature: MA Experiment ID: 108488 Result: Down-regulated in Transcription
  misc_feature: MA Experiment ID: 108573 Result: Up-regulated in Transcription
  misc_feature: MA Experiment 108573 PARAMETER Experiment Name: At_Drought_cDNA_P Parameter: Timepoint (hr) Value: 6
  misc_feature: MA Experiment 108573 PARAMETER Experiment Name: At_Drought_cDNA_P Parameter: Tissue Value: Aerial
  misc_feature: MA Experiment 108573 PARAMETER Experiment Name: At_Drought_cDNA_P Parameter: Treatment Value: Drought vs. No Drought
  misc_feature: MA Experiment ID: 108585 Result: Up-regulated in Transcription
  misc_feature: MA Experiment 108585 PARAMETER Experiment Name: At_5mM_NaNP_cDNA_P Parameter: Timepoint (hr) Value: 6
  misc_feature: MA Experiment 108585 PARAMETER Experiment Name: At_5mM_NaNP_cDNA_P Parameter: Tissue Value: Aerial
  misc_feature: MA Experiment 108585 PARAMETER Experiment Name: At_5mM_NaNP_cDNA_P Parameter: Treatment Value: null
  misc_feature: MA Experiment ID: 108605 Result: Up-regulated in Transcription
  misc_feature: MA Experiment 108605 PARAMETER Experiment Name: At_100uM_ABA_cDNA_P Parameter: Timepoint (hr) Value: 6
  misc_feature: MA Experiment 108605 PARAMETER Experiment Name: At_100uM_ABA_cDNA_P Parameter: Tissue Value: Aerial
  misc_feature: MA Experiment 108605 PARAMETER Experiment Name: At_100uM_ABA_cDNA_P Parameter: Treatment Value: 100uM ABA vs. No Treatment
  misc_feature: MA Experiment ID: 108607 Result: Up-regulated in Transcription
  misc_feature: MA Experiment 108607 PARAMETER Experiment Name: At_100uM_ABA_cDNA_P Parameter: Timepoint (hr) Value: 4
  misc_feature: MA Experiment 108607 PARAMETER Experiment Name: At_100uM_ABA_cDNA_P Parameter: Tissue Value: Aerial
  misc_feature: MA Experiment 108607 PARAMETER Experiment Name: At_100uM_ABA_cDNA_P Parameter: Treatment Value: 100uM ABA vs. No Treatment
  misc_feature: MA Experiment ID: 20000069 Result: Up-regulated in Transcription
  misc_feature: MA Experiment 20000069 PARAMETER Experiment Name: At_100uM_ABA_Mutants_cDNA_P Parameter: Plant Line Value: CS23
  misc_feature: MA Experiment 20000069 PARAMETER Experiment Name: At_100uM_ABA_Mutants_cDNA_P Parameter: Timepoint (hr) Value: 6
  misc_feature: MA Experiment 20000069 PARAMETER Experiment Name: At_100uM_ABA_Mutants_cDNA_P Parameter: Tissue Value: Aerial
  misc_feature: MA Experiment 20000069 PARAMETER Experiment Name: At_100uM_ABA_Mutants_cDNA_P Parameter: Treatment Value: 100uM ABA vs. No Treatment
  misc_feature: MA Experiment ID: 20000070 Result: Up-regulated in Transcription
  misc_feature: MA Experiment 20000070 PARAMETER Experiment Name: At_100uM_ABA_Mutants_cDNA_P Parameter: Plant Line Value: CS24
  misc_feature: MA Experiment 20000070 PARAMETER Experiment Name: At_100uM_ABA_Mutants_cDNA_P Parameter: Timepoint (hr) Value: 6
  misc_feature: MA Experiment 20000070 PARAMETER Experiment Name: At_100uM_ABA_Mutants_cDNA_P Parameter: Tissue Value: Aerial
  misc_feature: MA Experiment 20000070 PARAMETER Experiment Name: At_100uM_ABA_Mutants_cDNA_P Parameter: Treatment Value: 100uM ABA vs. No Treatment
  misc_feature: MA Experiment ID: 20000071 Result: Up-regulated in Transcription
  misc_feature: MA Experiment 20000071 PARAMETER Experiment Name: At_100uM_ABA_Mutants_cDNA_P Parameter: Plant Line Value: CS8104
  misc_feature: MA Experiment 20000071 PARAMETER Experiment Name: At_100uM_ABA_Mutants_cDNA_P Parameter: Timepoint (hr) Value: 6
  misc_feature: MA Experiment 20000071 PARAMETER Experiment Name: At_100uM_ABA_Mutants_cDNA_P Parameter: Tissue Value: Aerial
  misc_feature: MA Experiment 20000071 PARAMETER Experiment Name: At_100uM_ABA_Mutants_cDNA_P Parameter: Treatment Value: 100uM ABA vs. No Treatment
  misc_feature: MA Experiment ID: 20000087 Result: Up-regulated in Transcription
  misc_feature: MA Experiment 20000087 PARAMETER Experiment Name: At_100uM_ABA_Mutants_cDNA_P Parameter: Plant Line Value: WS
  misc_feature: MA Experiment 20000087 PARAMETER Experiment Name: At_100uM_ABA_Mutants_cDNA_P Parameter: Timepoint (hr) Value: 6
  misc_feature: MA Experiment 20000087 PARAMETER Experiment Name: At_100uM_ABA_Mutants_cDNA_P Parameter: Tissue Value: Aerial
  misc_feature: MA Experiment 20000087 PARAMETER Experiment Name: At_100uM_ABA_Mutants_cDNA_P Parameter: Treatment Value: 100uM ABA vs. No Treatment
  misc_feature: MA Experiment ID: 20000088 Result: Up-regulated in Transcription
  misc_feature: MA Experiment 20000088 PARAMETER Experiment Name: At_100uM_ABA_Mutants_cDNA_P Parameter: Plant Line Value: Landsberg
  misc_feature: MA Experiment 20000088 PARAMETER Experiment Name: At_100uM_ABA_Mutants_cDNA_P Parameter: Timepoint (hr) Value: 6
  misc_feature: MA Experiment 20000088 PARAMETER Experiment Name: At_100uM_ABA_Mutants_cDNA_P Parameter: Tissue Value: Aerial
  misc_feature: MA Experiment 20000088 PARAMETER Experiment Name: At_100uM_ABA_Mutants_cDNA_P Parameter: Treatment Value: 100uM ABA vs. No Treatment
  misc_feature: MA Experiment ID: 20000117 Result: Up-regulated in Transcription
  misc_feature: MA Experiment 20000117 PARAMETER Experiment Name: At_100uM_ABA_Mutants_cDNA_P Parameter: Plant Line Value: Columbia
  misc_feature: MA Experiment 20000117 PARAMETER Experiment Name: At_100uM_ABA_Mutants_cDNA_P Parameter: Timepoint (hr) Value: 6
  misc_feature: MA Experiment 20000117 PARAMETER Experiment Name: At_100uM_ABA_Mutants_cDNA_P Parameter: Tissue Value: Aerial
  misc_feature: MA Experiment 20000117 PARAMETER Experiment Name: At_100uM_ABA_Mutants_cDNA_P Parameter: Treatment Value: 100uM ABA vs. No Treatment
  misc_feature: MA Experiment ID: 20000437 Result: Up-regulated in Transcription
  misc_feature: MA Experiment 20000437 PARAMETER Experiment Name: At_Drought_P Parameter: Age (day) Value: 8
  misc_feature: MA Experiment 20000437 PARAMETER Experiment Name: At_Drought_P Parameter: Organism Value: A. thaliana
  misc_feature: MA Experiment 20000437 PARAMETER Experiment Name: At_Drought_P Parameter: Plant Line Value: WS
  misc_feature: MA Experiment 20000437 PARAMETER Experiment Name: At_Drought_P Parameter: Timepoint (hr) Value: 24
  misc_feature: MA Experiment 20000437 PARAMETER Experiment Name: At_Drought_P Parameter: Tissue Value: Whole Plant
  misc_feature: MA Experiment 20000437 PARAMETER Experiment Name: At_Drought_P Parameter: Treatment Value: Drought vs. No Drought
  misc_feature: MA Experiment ID: 20000496 Result: Up-regulated in Transcription
  misc_feature: MA Experiment 20000496 PARAMETER Experiment Name: At_Guard_Cells_P Parameter: Harvest Date Value: 7/19/2002
  misc_feature: MA Experiment 20000496 PARAMETER Experiment Name: At_Guard_Cells_P Parameter: Organism Value: Canola
  misc_feature: MA Experiment 20000496 PARAMETER Experiment Name: At_Guard_Cells_P Parameter: Tissue Value: Guard Cells vs. Leaves
  misc_feature: MA Experiment ID: 20001906 Result: Up-regulated in Transcription
  misc_feature: MA Experiment 20001906 PARAMETER Experiment Name: At_Drought_Reproduction_P Parameter: Age (day) Value: 35
  misc_feature: MA Experiment 20001906 PARAMETER Experiment Name: At_Drought_Reproduction_P Parameter: Organism Value: A. thaliana
  misc_feature: MA Experiment 20001906 PARAMETER Experiment Name: At_Drought_Reproduction_P Parameter: Plant Line Value: WS
  misc_feature: MA Experiment 20001906 PARAMETER Experiment Name: At_Drought_Reproduction_P Parameter: Timepoint (day) Value: 5
  misc_feature: MA Experiment 20001906 PARAMETER Experiment Name: At_Drought_Reproduction_P Parameter: Tissue Value: Siliques
  misc_feature: MA Experiment 20001906 PARAMETER Experiment Name: At_Drought_Reproduction_P Parameter: Treatment Value: Drought vs. No Drought

SEQ ID NO: 32552 - protein, 148 aa, Arabidopsis thaliana; identical to SEQ ID NO: 28390
  peptide (1)..(148): Ceres Seq. ID no. 12738789
  misc_feature (1)..(148): Homolog of NCBI NO: 18408001 NR Description: E2, ubiquitin-conjugating enzyme, putative
  misc_feature (1)..(148): Homolog of NCBI NO: 456568 NR Description: ubiquitin conjugating enzyme
  misc_feature (1)..(148): Homolog of NCBI NO: 5762457 NR Description: ubiquitin-conjugating enzyme UBC2
  misc_feature (1)..(148): Homolog of NCBI NO: 18423829 NR Description: E2, ubiquitin-conjugating enzyme, putative

SEQ ID NO: 32553 - protein, 119 aa, Arabidopsis thaliana; identical to SEQ ID NO: 28391
  peptide (1)..(119): Ceres Seq. ID no. 12738790
  misc_feature (1)..(119): Homolog of NCBI NO: 18408001 NR Description: E2, ubiquitin-conjugating enzyme, putative
  misc_feature (1)..(119): Homolog of NCBI NO: 456568 NR Description: ubiquitin conjugating enzyme
  misc_feature (1)..(119): Homolog of NCBI NO: 5762457 NR Description: ubiquitin-conjugating enzyme UBC2
  misc_feature (1)..(119): Homolog of NCBI NO: 18423829 NR Description: E2, ubiquitin-conjugating enzyme, putative

SEQ ID NO: 32554 - protein, 114 aa, Arabidopsis thaliana; identical to SEQ ID NO: 28964
  peptide (1)..(114): Ceres Seq. ID no. 12738791

SEQ ID NO: 32555 - DNA, 1653 bp, Arabidopsis thaliana; identical to SEQ ID NO: 28965
  misc_feature (1)..(1653): Ceres Seq. ID no. 12422791
  misc_feature: MA Experiment ID: 108434 Result: Up-regulated in Transcription
  misc_feature: MA Experiment 108434 PARAMETER Experiment Name: At_Root_Tips_cDNA_P Parameter: Tissue Value: Root Tips
  misc_feature: MA Experiment ID: 108462 Result: Down-regulated in Transcription
  misc_feature: MA Experiment 108462 PARAMETER Experiment Name: At_Germinating_Seeds_cDNA_P Parameter: Age (day) Value: 2 vs. 0
  misc_feature: MA Experiment 108462 PARAMETER Experiment Name: At_Germinating_Seeds_cDNA_P Parameter: Tissue Value: Germinating Seeds
  misc_feature: MA Experiment ID: 108463 Result: Down-regulated in Transcription
  misc_feature: MA Experiment 108463 PARAMETER Experiment Name: At_Germinating_Seeds_cDNA_P Parameter: Age (day) Value: 3 vs. 0
  misc_feature: MA Experiment 108463 PARAMETER Experiment Name: At_Germinating_Seeds_cDNA_P Parameter: Tissue Value: Germinating Seeds
  misc_feature: MA Experiment ID: 108464 Result: Down-regulated in Transcription
  misc_feature: MA Experiment 108464 PARAMETER Experiment Name: At_Germinating_Seeds_cDNA_P Parameter: Age (day) Value: 4 vs. 0
  misc_feature: MA Experiment 108464 PARAMETER Experiment Name: At_Germinating_Seeds_cDNA_P Parameter: Tissue Value: Germinating Seeds
  misc_feature: MA Experiment ID: 20000093 Result: Up-regulated in Transcription
  misc_feature: MA Experiment 20000093 PARAMETER Experiment Name: At_42deg_Heat_cDNA_P Parameter: Temperature (deg C) Value: 42 vs. 22
  misc_feature: MA Experiment 20000093 PARAMETER Experiment Name: At_42deg_Heat_cDNA_P Parameter: Timepoint (hr) Value: 0.5
  misc_feature: MA Experiment 20000093 PARAMETER Experiment Name: At_42deg_Heat_cDNA_P Parameter: Tissue Value: Aerial
  misc_feature: MA Experiment ID: 20000437 Result: Down-regulated in Transcription
  misc_feature: MA Experiment 20000437 PARAMETER Experiment Name: At_Drought_P Parameter: Age (day) Value: 8
  misc_feature: MA Experiment 20000437 PARAMETER Experiment Name: At_Drought_P Parameter: Organism Value: A. thaliana
  misc_feature: MA Experiment 20000437 PARAMETER Experiment Name: At_Drought_P Parameter: Plant Line Value: WS
  misc_feature: MA Experiment 20000437 PARAMETER Experiment Name: At_Drought_P Parameter: Timepoint (hr) Value: 24
  misc_feature: MA Experiment 20000437 PARAMETER Experiment Name: At_Drought_P Parameter: Tissue Value: Whole Plant
  misc_feature: MA Experiment 20000437 PARAMETER Experiment Name: At_Drought_P Parameter: Treatment Value: Drought vs. No Drought
  misc_feature: MA Experiment ID: 20001557 Result: Up-regulated in Transcription
  misc_feature: MA Experiment 20001557 PARAMETER Experiment Name: At_Drought_Soil_Dry_P Parameter: Age (day) Value: 27
  misc_feature: MA Experiment 20001557 PARAMETER Experiment Name: At_Drought_Soil_Dry_P Parameter: Organism Value: A. thaliana
  misc_feature: MA Experiment 20001557 PARAMETER Experiment Name: At_Drought_Soil_Dry_P Parameter: Plant Line Value: WS
  misc_feature: MA Experiment 20001557 PARAMETER Experiment Name: At_Drought_Soil_Dry_P Parameter: Post Timepoint (hr) Value: 3
  misc_feature: MA Experiment 20001557 PARAMETER Experiment Name: At_Drought_Soil_Dry_P Parameter: Post-Treatment Value: Re-Water vs. No Drought
  misc_feature: MA Experiment 20001557 PARAMETER Experiment Name: At_Drought_Soil_Dry_P Parameter: Timepoint (day) Value: 13
  misc_feature: MA Experiment 20001557 PARAMETER Experiment Name: At_Drought_Soil_Dry_P Parameter: Treatment Value: Drought vs. No Drought

SEQ ID NO: 32556 - protein, 469 aa, Arabidopsis thaliana; identical to SEQ ID NO: 28966
  peptide (1)..(469): Ceres Seq. ID no. 12422792
  misc_feature (172)..(466): Pfam Name: Enolase, C-terminal TIM barrel domain Pfam Description: Enolase, C-terminal TIM barrel domain
  misc_feature (28)..(469): Homolog of NCBI NO: 1169534 NR Description: Enolase (2-phosphoglycerate dehydratase)
  misc_feature (26)..(469): Homolog of NCBI NO: 3023714 NR Description: Enolase (2-phosphoglycerate dehydratase)
  misc_feature (28)..(469): Homolog of NCBI NO: 14423687 NR Description: Enolase 2 (2-phosphoglycerate dehydratase 2)
  misc_feature (26)..(469): Homolog of NCBI NO: 7436883 NR Description: phosphopyruvate hydratase (EC 4.2.1.11) - common
  misc_feature (28)..(469): Homolog of NCBI NO: 14423688 NR Description: Enolase 1 (2-phosphoglycerate dehydratase 1)
  misc_feature (26)..(469): Homolog of NCBI NO: 119354 NR Description: Enolase (2-phosphoglycerate dehydratase)
  misc_feature (26)..(469): Homolog of NCBI NO: 20260174 NR Description: enolase (2-phospho-D-glycerate hydroylase)
  misc_feature (26)..(469): Homolog of NCBI NO: 18175728 NR Description: putative enolase (2-phospho-D-glycerate
  misc_feature (26)..(469): Homolog of NCBI NO: 15809970 NR Description: At2g36530/F1O11.16 [Arabidopsis thaliana]
  misc_feature (26)..(469): Homolog of NCBI NO: 15227987 NR Description: enolase (2-phospho-D-glycerate hydroylase)

SEQ ID NO: 32557 - protein, 444 aa, Arabidopsis thaliana; identical to SEQ ID NO: 28967
  peptide (1)..(444): Ceres Seq. ID no. 12422793
  misc_feature (147)..(441): Pfam Name: Enolase, C-terminal TIM barrel domain Pfam Description: Enolase, C-terminal TIM barrel domain
  misc_feature (3)..(444): Homolog of NCBI NO: 1169534 NR Description: Enolase (2-phosphoglycerate dehydratase)
  misc_feature (1)..(444): Homolog of NCBI NO: 3023714 NR Description: Enolase (2-phosphoglycerate dehydratase)
  misc_feature (3)..(444): Homolog of NCBI NO: 14423687 NR Description: Enolase 2 (2-phosphoglycerate dehydratase 2)
  misc_feature (1)..(444): Homolog of NCBI NO: 7436883 NR Description: phosphopyruvate hydratase (EC 4.2.1.11) - common
  misc_feature (3)..(444): Homolog of NCBI NO: 14423688 NR Description: Enolase 1 (2-phosphoglycerate dehydratase 1)
  misc_feature (1)..(444): Homolog of NCBI NO: 119354 NR Description: Enolase (2-phosphoglycerate dehydratase)
  misc_feature (1)..(444): Homolog of NCBI NO: 20260174 NR Description: enolase (2-phospho-D-glycerate hydroylase)
  misc_feature (1)..(444): Homolog of NCBI NO: 18175728 NR Description: putative enolase (2-phospho-D-glycerate
  misc_feature (1)..(444): Homolog of NCBI NO: 15809970 NR Description: At2g36530/F1O11.16 [Arabidopsis thaliana]
  misc_feature (1)..(444): Homolog of NCBI NO: 15227987 NR Description: enolase (2-phospho-D-glycerate hydroylase)

SEQ ID NO: 32558 - protein, 352 aa, Arabidopsis thaliana; identical to SEQ ID NO: 15479
  peptide (1)..(352): Ceres Seq. ID no. 12422794
  misc_feature (55)..(349): Pfam Name: Enolase, C-terminal TIM barrel domain Pfam Description: Enolase, C-terminal TIM barrel domain
  misc_feature (1)..(352): Homolog of NCBI NO: 1169534 NR Description: Enolase (2-phosphoglycerate dehydratase)
  misc_feature (1)..(352): Homolog of NCBI NO: 3023714 NR Description: Enolase (2-phosphoglycerate dehydratase)
  misc_feature (1)..(352): Homolog of NCBI NO: 14423687 NR Description: Enolase 2 (2-phosphoglycerate dehydratase 2)
  misc_feature (1)..(352): Homolog of NCBI NO: 7436883 NR Description: phosphopyruvate hydratase (EC 4.2.1.11) - common
  misc_feature (1)..(352): Homolog of NCBI NO: 14423688 NR Description: Enolase 1 (2-phosphoglycerate dehydratase 1)
  misc_feature (1)..(352): Homolog of NCBI NO: 119354 NR Description: Enolase (2-phosphoglycerate dehydratase)
  misc_feature (1)..(352): Homolog of NCBI NO: 20260174 NR Description: enolase (2-phospho-D-glycerate hydroylase)
  misc_feature (1)..(352): Homolog of NCBI NO: 18175728 NR Description: putative enolase (2-phospho-D-glycerate
  misc_feature (1)..(352): Homolog of NCBI NO: 15809970 NR Description: At2g36530/F1O11.16 [Arabidopsis thaliana]
  misc_feature (1)..(352): Homolog of NCBI NO: 15227987 NR Description: enolase (2-phospho-D-glycerate hydroylase)

SEQ ID NO: 32559 - DNA, 4277 bp, Arabidopsis thaliana; identical to SEQ ID NO: 28888
  misc_feature (1)..(4277): Ceres Seq. ID no. 13491805
  misc_feature: MA Experiment ID: 108474 Result: Up-regulated in Transcription
  misc_feature: MA Experiment 108474 PARAMETER Experiment Name: At_Drought_Flowers_cDNA_P Parameter: Timepoint (hr) Value: null
  misc_feature: MA Experiment 108474 PARAMETER Experiment Name: At_Drought_Flowers_cDNA_P Parameter: Treatment Value: Drought vs. No Drought
  misc_feature: MA Experiment ID: 108488 Result: Up-regulated in Transcription

SEQ ID NO: 32560 - protein, 1286 aa, Arabidopsis thaliana; identical to SEQ ID NO: 28889
  peptide (1)..(1286): Ceres Seq. ID no. 13491806
  misc_feature (44)..(324): Pfam Name: ABC transporter transmembrane region Pfam Description: ABC transporter transmembrane region
  misc_feature (44)..(324): Pfam Name: ABC transporter transmembrane region Pfam Description: ABC transporter transmembrane region
  misc_feature (1)..(956): Homolog of NCBI NO: 18496818 NR Description: ABC transporter AbcB3 [Dictyostelium discoideum]
  misc_feature (801)..(1247): Homolog of NCBI NO: 25407562 NR Description: hypothetical protein AT4g18050 [imported] -
  misc_feature (27)..(797): Homolog of NCBI NO: 25407562 NR Description: hypothetical protein AT4g18050 [imported] -
  misc_feature (18)..(645): Homolog of NCBI NO: 15233244 NR Description: multidrug resistance P-glycoprotein, putative
  misc_feature (625)..(1261): Homolog of NCBI NO: 15233244 NR Description: multidrug resistance P-glycoprotein, putative
  misc_feature (1)..(956): Homolog of NCBI NO: 18496818 NR Description: ABC transporter AbcB3 [Dictyostelium discoideum]
  misc_feature (27)..(797): Homolog of NCBI NO: 25407562 NR Description: hypothetical protein AT4g18050 [imported] -
  misc_feature (625)..(1261): Homolog of NCBI NO: 15233244 NR Description: multidrug resistance P-glycoprotein, putative
  misc_feature (1)..(1262): Homolog of NCBI NO: 14715462 NR Description: CjMDR1 [Coptis japonica]
  misc_feature (528)..(1262): Homolog of NCBI NO: 15234323 NR Description: multidrug resistance P-glycoprotein, putative
  misc_feature (21)..(634): Homolog of NCBI NO: 15234323 NR Description: multidrug resistance P-glycoprotein, putative
  misc_feature (1)..(642): Homolog of NCBI NO: 27368853 NR Description: MDR-like ABC transporter [Oryza sativa (japonica
  misc_feature (605)..(1266): Homolog of NCBI NO: 27368853 NR Description: MDR-like ABC transporter [Oryza sativa (japonica
  misc_feature (18)..(645): Homolog of NCBI NO: 15233244 NR Description: multidrug resistance P-glycoprotein, putative
  misc_feature (801)..(1247): Homolog of NCBI NO: 25407562 NR Description: hypothetical protein AT4g18050 [imported] -
  misc_feature (605)..(1266): Homolog of NCBI NO: 27368853 NR Description: MDR-like ABC transporter [Oryza sativa (japonica
  misc_feature (1)..(642): Homolog of NCBI NO: 27368853 NR Description: MDR-like ABC transporter [Oryza sativa (japonica
  misc_feature (21)..(634): Homolog of NCBI NO: 15234323 NR Description: multidrug resistance P-glycoprotein, putative
  misc_feature (528)..(1262): Homolog of NCBI NO: 15234323 NR Description: multidrug resistance P-glycoprotein, putative
  misc_feature (1)..(1262): Homolog of NCBI NO: 14715462 NR Description: CjMDR1 [Coptis japonica]

SEQ ID NO: 32561 - protein, 1243 aa, Arabidopsis thaliana; identical to SEQ ID NO: 28890
  peptide (1)..(1243): Ceres Seq. ID no. 13491807
  misc_feature (1)..(281): Pfam Name: ABC transporter transmembrane region Pfam Description: ABC transporter transmembrane region
  misc_feature (1)..(281): Pfam Name: ABC transporter transmembrane region Pfam Description: ABC transporter transmembrane region
  misc_feature (1)..(913): Homolog of NCBI NO: 18496818 NR Description: ABC transporter AbcB3 [Dictyostelium discoideum]
  misc_feature (758)..(1204): Homolog of NCBI NO: 25407562 NR Description: hypothetical protein AT4g18050 [imported] -
  misc_feature (1)..(754): Homolog of NCBI NO: 25407562 NR Description: hypothetical protein AT4g18050 [imported] -
  misc_feature (1)..(602): Homolog of NCBI NO: 15233244 NR Description: multidrug resistance P-glycoprotein, putative
  misc_feature (582)..(1218): Homolog of NCBI NO: 15233244 NR Description: multidrug resistance P-glycoprotein, putative
  misc_feature (1)..(913): Homolog of NCBI NO: 18496818 NR Description: ABC transporter AbcB3 [Dictyostelium discoideum]
  misc_feature (1)..(754): Homolog of NCBI NO: 25407562 NR Description: hypothetical protein AT4g18050 [imported] -
  misc_feature (582)..(1218): Homolog of NCBI NO: 15233244 NR Description: multidrug resistance P-glycoprotein, putative
  misc_feature (1)..(1219): Homolog of NCBI NO: 14715462 NR Description: CjMDR1 [Coptis japonica]
  misc_feature (485)..(1219): Homolog of NCBI NO: 15234323 NR Description: multidrug resistance P-glycoprotein, putative
  misc_feature (1)..(591): Homolog of NCBI NO: 15234323 NR Description: multidrug resistance P-glycoprotein, putative
  misc_feature (1)..(599): Homolog of NCBI NO: 27368853 NR Description: MDR-like ABC transporter [Oryza sativa (japonica
  misc_feature (562)..(1223): Homolog of NCBI NO: 27368853 NR Description: MDR-like ABC transporter [Oryza sativa (japonica
  misc_feature (1)..(602): Homolog of NCBI NO: 15233244 NR Description: multidrug resistance P-glycoprotein, putative
  misc_feature (758)..(1204): Homolog of NCBI NO: 25407562 NR Description: hypothetical protein AT4g18050 [imported] -
  misc_feature (562)..(1223): Homolog of NCBI NO: 27368853 NR Description: MDR-like ABC transporter [Oryza sativa (japonica
  misc_feature (1)..(599): Homolog of NCBI NO: 27368853 NR Description: MDR-like ABC transporter [Oryza sativa (japonica
  misc_feature (1)..(591): Homolog of NCBI NO: 15234323 NR Description: multidrug resistance P-glycoprotein, putative
  misc_feature (485)..(1219): Homolog of NCBI NO: 15234323 NR Description: multidrug resistance P-glycoprotein, putative
  misc_feature (1)..(1219): Homolog of NCBI NO: 14715462 NR Description: CjMDR1 [Coptis japonica]

SEQ ID NO: 32562 - protein, 1205 aa, Arabidopsis thaliana; identical to SEQ ID NO: 28891
  peptide (1)..(1205): Ceres Seq. ID no. 13491808
  misc_feature (1)..(243): Pfam Name: ABC transporter transmembrane region Pfam Description: ABC transporter transmembrane region
  misc_feature (1)..(243): Pfam Name: ABC transporter transmembrane region Pfam Description: ABC transporter transmembrane region
  misc_feature (1)..(875): Homolog of NCBI NO: 18496818 NR Description: ABC transporter AbcB3 [Dictyostelium discoideum]
  misc_feature (720)..(1166): Homolog of NCBI NO: 25407562 NR Description: hypothetical protein AT4g18050 [imported] -
  misc_feature (1)..(716): Homolog of NCBI NO: 25407562 NR Description: hypothetical protein AT4g18050 [imported] -
  misc_feature (1)..(564): Homolog of NCBI NO: 15233244 NR Description: multidrug resistance P-glycoprotein, putative
  misc_feature (544)..(1180): Homolog of NCBI NO: 15233244 NR Description: multidrug resistance P-glycoprotein, putative
  misc_feature (1)..(875): Homolog of NCBI NO: 18496818 NR Description: ABC transporter AbcB3 [Dictyostelium discoideum]
  misc_feature (1)..(716): Homolog of NCBI NO: 25407562 NR Description: hypothetical protein AT4g18050 [imported] -
  misc_feature (544)..(1180): Homolog of NCBI NO: 15233244 NR Description: multidrug resistance P-glycoprotein, putative
  misc_feature (1)..(1181): Homolog of NCBI NO: 14715462 NR Description: CjMDR1 [Coptis japonica]
  misc_feature (447)..(1181): Homolog of NCBI NO: 15234323 NR Description: multidrug resistance P-glycoprotein, putative
  misc_feature (1)..(553): Homolog of NCBI NO: 15234323 NR Description: multidrug resistance P-glycoprotein, putative
  misc_feature (1)..(561): Homolog of NCBI NO: 27368853 NR Description: MDR-like ABC transporter [Oryza sativa (japonica
  misc_feature (524)..(1185): Homolog of NCBI NO: 27368853 NR Description: MDR-like ABC transporter [Oryza sativa (japonica
  misc_feature (1)..(564): Homolog of NCBI NO: 15233244 NR Description: multidrug resistance P-glycoprotein, putative
  misc_feature (720)..(1166): Homolog of NCBI NO: 25407562 NR Description: hypothetical protein AT4g18050 [imported] -
  misc_feature (524)..(1185): Homolog of NCBI NO: 27368853 NR Description: MDR-like ABC transporter [Oryza sativa (japonica
  misc_feature (1)..(561): Homolog of NCBI NO: 27368853 NR Description: MDR-like ABC transporter [Oryza sativa (japonica
  misc_feature (1)..(553): Homolog of NCBI NO: 15234323 NR Description: multidrug resistance P-glycoprotein, putative
  misc_feature (447)..(1181): Homolog of NCBI NO: 15234323 NR Description: multidrug resistance P-glycoprotein, putative
  misc_feature (1)..(1181): Homolog of NCBI NO: 14715462 NR Description: CjMDR1 [Coptis japonica]

SEQ ID NO: 32563 - DNA, 1416 bp, Arabidopsis thaliana; identical to SEQ ID NO: 28973
  misc_feature (1)..(1416): Ceres Seq. ID no. 12322287
  misc_feature: MA Experiment ID: 108573 Result: Up-regulated in Transcription
  misc_feature: MA Experiment 108573 PARAMETER Experiment Name: At_Drought_cDNA_P Parameter: Timepoint (hr) Value: 6
  misc_feature: MA Experiment 108573 PARAMETER Experiment Name: At_Drought_cDNA_P Parameter: Tissue Value: Aerial
  misc_feature: MA Experiment 108573 PARAMETER Experiment Name: At_Drought_cDNA_P Parameter: Treatment Value: Drought vs. No Drought
  misc_feature: MA Experiment ID: 108595 Result: Down-regulated in Transcription
  misc_feature: MA Experiment 108595 PARAMETER Experiment Name: At_Ler-pi_Ovule_cDNA_P Parameter: Plant Line Value: null
  misc_feature: MA Experiment ID: 20000111 Result: Down-regulated in Transcription
  misc_feature: MA Experiment 20000111 PARAMETER Experiment Name: At_42deg_Heat_cDNA_P Parameter: Temperature (deg C) Value: 42 vs. 22
  misc_feature: MA Experiment 20000111 PARAMETER Experiment Name: At_42deg_Heat_cDNA_P Parameter: Timepoint (hr) Value: 6
  misc_feature: MA Experiment 20000111 PARAMETER Experiment Name: At_42deg_Heat_cDNA_P Parameter: Tissue Value: Aerial
  misc_feature: MA Experiment ID: 20000113 Result: Down-regulated in Transcription
  misc_feature: MA Experiment 20000113 PARAMETER Experiment Name: At_42deg_Heat_cDNA_P Parameter: Temperature (deg C) Value: 42 vs. 22
  misc_feature: MA Experiment 20000113 PARAMETER Experiment Name: At_42deg_Heat_cDNA_P Parameter: Timepoint (hr) Value: 8
  misc_feature: MA Experiment 20000113 PARAMETER Experiment Name: At_42deg_Heat_cDNA_P Parameter: Tissue Value: Aerial

SEQ ID NO: 32564 - protein, 431 aa, Arabidopsis thaliana; identical to SEQ ID NO: 28974
  peptide (1)..(431): Ceres Seq. ID no. 12322288
  misc_feature (98)..(182): Homolog of NCBI NO: 20161872 NR Description: B1139B11.13 [Oryza sativa (japonica
  misc_feature (155)..(431): Homolog of NCBI NO: 15239887 NR Description: putative protein; protein id: At5g12170.1
  misc_feature (94)..(431): Homolog of NCBI NO: 21536591 NR Description: unknown [Arabidopsis thaliana]
  misc_feature (94)..(431): Homolog of NCBI NO: 20260240 NR Description: unknown protein [Arabidopsis thaliana]
  misc_feature (94)..(424): Homolog of NCBI NO: 21553716 NR Description: unknown [Arabidopsis thaliana]
  misc_feature (94)..(424): Homolog of NCBI NO: 18419900 NR Description: putative protein
  misc_feature (1)..(232): Homolog of NCBI NO: 28973717 NR Description: unknown protein [Arabidopsis thaliana]
  misc_feature (209)..(380): Homolog of NCBI NO: 7487326 NR Description: hypothetical protein T22A6.290 - Arabidopsis
  misc_feature (1)..(181): Homolog of NCBI NO: 7487326 NR Description: hypothetical protein T22A6.290 - Arabidopsis
  misc_feature (1)..(431): Homolog of NCBI NO: 30686536 NR Description: expressed protein [Arabidopsis thaliana]

SEQ ID NO: 32565 - protein, 426 aa, Arabidopsis thaliana; identical to SEQ ID NO: 28975
  peptide (1)..(426): Ceres Seq. ID no. 12322289
  misc_feature (93)..(177): Homolog of NCBI NO: 20161872 NR Description: B1139B11.13 [Oryza sativa (japonica
  misc_feature (150)..(426): Homolog of NCBI NO: 15239887 NR Description: putative protein; protein id: At5g12170.1
  misc_feature (89)..(426): Homolog of NCBI NO: 21536591 NR Description: unknown [Arabidopsis thaliana]
  misc_feature (89)..(426): Homolog of NCBI NO: 20260240 NR Description: unknown protein [Arabidopsis thaliana]
  misc_feature (89)..(419): Homolog of NCBI NO: 21553716 NR Description: unknown [Arabidopsis thaliana]
  misc_feature (89)..(419): Homolog of NCBI NO: 18419900 NR Description: putative protein
  misc_feature (1)..(227): Homolog of NCBI NO: 28973717 NR Description: unknown protein [Arabidopsis thaliana]
  misc_feature (204)..(375): Homolog of NCBI NO: 7487326 NR Description: hypothetical protein T22A6.290 - Arabidopsis
  misc_feature (1)..(176): Homolog of NCBI NO: 7487326 NR Description: hypothetical protein T22A6.290 - Arabidopsis
  misc_feature (1)..(426): Homolog of NCBI NO: 30686536 NR Description: expressed protein [Arabidopsis thaliana]

SEQ ID NO: 32566 - protein, 386 aa, Arabidopsis thaliana; identical to SEQ ID NO: 28976
  peptide (1)..(386): Ceres Seq. ID no. 12322290
  misc_feature (53)..(137): Homolog of NCBI NO: 20161872 NR Description: B1139B11.13 [Oryza sativa (japonica
  misc_feature (110)..(386): Homolog of NCBI NO: 15239887 NR Description: putative protein; protein id: At5g12170.1
  misc_feature (49)..(386): Homolog of NCBI NO: 21536591 NR Description: unknown [Arabidopsis thaliana]
  misc_feature (49)..(386): Homolog of NCBI NO: 20260240 NR Description: unknown protein [Arabidopsis thaliana]
  misc_feature (49)..(379): Homolog of NCBI NO: 21553716 NR Description: unknown [Arabidopsis thaliana]
  misc_feature (49)..(379): Homolog of NCBI NO: 18419900 NR Description: putative protein
  misc_feature (1)..(187): Homolog of NCBI NO: 28973717 NR Description: unknown protein [Arabidopsis thaliana]
  misc_feature (164)..(335): Homolog of NCBI NO: 7487326 NR Description: hypothetical protein T22A6.290 - Arabidopsis
  misc_feature (1)..(136): Homolog of NCBI NO: 7487326 NR Description: hypothetical protein T22A6.290 - Arabidopsis
  misc_feature (1)..(386): Homolog of NCBI NO: 30686536 NR Description: expressed protein [Arabidopsis thaliana]

SEQ ID NO: 32567 - DNA, 1199 bp, Arabidopsis thaliana; identical to SEQ ID NO: 28977
  misc_feature (1)..(1199): Ceres Seq. ID no. 12396266
  misc_feature: MA Experiment ID: 108461 Result: Up-regulated in Transcription
  misc_feature: MA Experiment 108461 PARAMETER Experiment Name: At_Germinating_Seeds_cDNA_P Parameter: Age (day) Value: 1 vs. 0
  misc_feature: MA Experiment 108461 PARAMETER Experiment Name: At_Germinating_Seeds_cDNA_P Parameter: Tissue Value: Germinating Seeds
  misc_feature: MA Experiment ID: 108501 Result: Down-regulated in Transcription
  misc_feature: MA Experiment 108501 PARAMETER Experiment Name: At_ap2_floral_buds_cDNA_P Parameter: Plant Line Value: ap2 (Ler.)
  misc_feature: MA Experiment 108501 PARAMETER Experiment Name: At_ap2_floral_buds_cDNA_P Parameter: Tissue Value: Closed Flower
  misc_feature: MA Experiment ID: 108573 Result: Up-regulated in Transcription
  misc_feature: MA Experiment 108573 PARAMETER Experiment Name: At_Drought_cDNA_P Parameter: Timepoint (hr) Value: 6
  misc_feature: MA Experiment 108573 PARAMETER Experiment Name: At_Drought_cDNA_P Parameter: Tissue Value: Aerial
  misc_feature: MA Experiment 108573 PARAMETER Experiment Name: At_Drought_cDNA_P Parameter: Treatment Value: Drought vs. No Drought
  misc_feature: MA Experiment ID: 108668 Result: Up-regulated in Transcription
  misc_feature: MA Experiment 108668 PARAMETER Experiment Name: At_2mM_SA_cDNA_P Parameter: Plant Line Value: WS
  misc_feature: MA Experiment 108668 PARAMETER Experiment Name: At_2mM_SA_cDNA_P Parameter: Timepoint (hr) Value: 6
  misc_feature: MA Experiment 108668 PARAMETER Experiment Name: At_2mM_SA_cDNA_P Parameter: Treatment Value: 2mM SA vs. No Treatment
  misc_feature: MA Experiment ID: 20000090 Result: Up-regulated in Transcription
  misc_feature: MA Experiment ID: 20000171 Result: Up-regulated in Transcription
  misc_feature: MA Experiment 20000171 PARAMETER Experiment Name: At_42deg_Heat_P Parameter: Age (day) Value: 14
  misc_feature: MA Experiment 20000171 PARAMETER Experiment Name: At_42deg_Heat_P Parameter: Organism Value: A. thaliana
  misc_feature: MA Experiment 20000171 PARAMETER Experiment Name: At_42deg_Heat_P Parameter: Plant Line Value: WS
  misc_feature: MA Experiment 20000171 PARAMETER Experiment Name: At_42deg_Heat_P Parameter: Temperature (deg C) Value: 42 vs. 22
  misc_feature: MA Experiment 20000171 PARAMETER Experiment Name: At_42deg_Heat_P Parameter: Timepoint (hr) Value: 1
  misc_feature: MA Experiment 20000171 PARAMETER Experiment Name: At_42deg_Heat_P Parameter: Tissue Value: Aerial
  misc_feature: MA Experiment ID: 20000224 Result: Down-regulated in Transcription

SEQ ID NO: 32568 - protein, 302 aa, Arabidopsis thaliana; identical to SEQ ID NO: 28978
  peptide (1)..(302): Ceres Seq. ID no. 12396267
  misc_feature (15)..(302): Pfam Name: Integral membrane protein DUF92 Pfam Description: Integral membrane protein DUF92
  misc_feature (9)..(290): Homolog of NCBI NO: 24663759 NR Description: CG10171-PA [Drosophila melanogaster]
  misc_feature (18)..(298): Homolog of NCBI NO: 26329849 NR Description: unnamed protein product [Mus musculus]
  misc_feature (18)..(298): Homolog of NCBI NO: 26335111 NR Description: unnamed protein product [Mus musculus]
  misc_feature (18)..(298): Homolog of NCBI NO: 19526846 NR Description: RIKEN cDNA 2810428F02 [Mus musculus]
  misc_feature (18)..(297): Homolog of NCBI NO: 21361720 NR Description: hypothetical protein FLJ10936 [Homo sapiens]
  misc_feature (18)..(298): Homolog of NCBI NO: 40018572 NR Description: Unknown (protein for MGC:72591) [Rattus
  misc_feature (22)..(261): Homolog of NCBI NO: 34914530 NR Description: OSJNBa0094H06.11 [Oryza sativa (japonica
  misc_feature (22)..(297): Homolog of NCBI NO: 34906132 NR Description: P0509B06.3 [Oryza sativa (japonica
  misc_feature (15)..(302): Homolog of NCBI NO: 18420075 NR Description: putative protein
  misc_feature (15)..(302): Homolog of NCBI NO: 21537262 NR Description: unknown [Arabidopsis thaliana]

SEQ ID NO: 32569 - protein, 288 aa, Arabidopsis thaliana; identical to SEQ ID NO: 28979
  peptide (1)..(288): Ceres Seq. ID no. 12396268
  misc_feature (1)..(288): Pfam Name: Integral membrane protein DUF92 Pfam Description: Integral membrane protein DUF92
  misc_feature (1)..(276): Homolog of NCBI NO: 24663759 NR Description: CG10171-PA [Drosophila melanogaster]
  misc_feature (4)..(284): Homolog of NCBI NO: 26329849 NR Description: unnamed protein product [Mus musculus]
  misc_feature (4)..(284): Homolog of NCBI NO: 26335111 NR Description: unnamed protein product [Mus musculus]
  misc_feature (4)..(284): Homolog of NCBI NO: 19526846 NR Description: RIKEN cDNA 2810428F02 [Mus musculus]
  misc_feature (4)..(283): Homolog of NCBI NO: 21361720 NR Description: hypothetical protein FLJ10936 [Homo sapiens]
  misc_feature (4)..(284): Homolog of NCBI NO: 40018572 NR Description: Unknown (protein for MGC:72591) [Rattus
  misc_feature (8)..(247): Homolog of NCBI NO: 34914530 NR Description: OSJNBa0094H06.11 [Oryza sativa (japonica
  misc_feature (8)..(283): Homolog of NCBI NO: 34906132 NR Description: P0509B06.3 [Oryza sativa (japonica
  misc_feature (1)..(288): Homolog of NCBI NO: 18420075 NR Description: putative protein
  misc_feature (1)..(288): Homolog of NCBI NO: 21537262 NR Description: unknown [Arabidopsis thaliana]

SEQ ID NO: 32570 - protein, 248 aa, Arabidopsis thaliana; identical to SEQ ID NO: 28980
  peptide (1)..(248): Ceres Seq. ID no. 12396269
  misc_feature (1)..(248): Pfam Name: Integral membrane protein DUF92 Pfam Description: Integral membrane protein DUF92
  misc_feature (1)..(236): Homolog of NCBI NO: 24663759 NR Description: CG10171-PA [Drosophila melanogaster]
  misc_feature (1)..(244): Homolog of NCBI NO: 26329849 NR Description: unnamed protein product [Mus musculus]
  misc_feature (1)..(244): Homolog of NCBI NO: 26335111 NR Description: unnamed protein product [Mus musculus]
  misc_feature (1)..(244): Homolog of NCBI NO: 19526846 NR Description: RIKEN cDNA 2810428F02 [Mus musculus]
  misc_feature (1)..(243): Homolog of NCBI NO: 21361720 NR Description: hypothetical protein FLJ10936 [Homo sapiens]
  misc_feature (1)..(244): Homolog of NCBI NO: 40018572 NR Description: Unknown (protein for MGC:72591) [Rattus
  misc_feature (1)..(207): Homolog of NCBI NO: 34914530 NR Description: OSJNBa0094H06.11 [Oryza sativa (japonica
  misc_feature (1)..(243): Homolog of NCBI NO: 34906132 NR Description: P0509B06.3 [Oryza sativa (japonica
  misc_feature (1)..(248): Homolog of NCBI NO: 18420075 NR Description: putative protein
  misc_feature (1)..(248): Homolog of NCBI NO: 21537262 NR Description: unknown [Arabidopsis thaliana]

SEQ ID NO: 32571 - DNA, 1322 bp, Arabidopsis thaliana; identical to SEQ ID NO: 28981
  misc_feature (1)..(1322): Ceres Seq. ID no. 12324249
  misc_feature: MA Experiment ID: 108434 Result: Down-regulated in Transcription
  misc_feature: MA Experiment 108434 PARAMETER Experiment Name: At_Root_Tips_cDNA_P Parameter: Tissue Value: Root Tips
  misc_feature: MA Experiment ID: 108464 Result: Up-regulated in Transcription
  misc_feature: MA Experiment 108464 PARAMETER Experiment Name: At_Germinating_Seeds_cDNA_P Parameter: Age (day) Value: 4 vs. 0
  misc_feature: MA Experiment 108464 PARAMETER Experiment Name: At_Germinating_Seeds_cDNA_P Parameter: Tissue Value: Germinating Seeds
  misc_feature: MA Experiment ID: 108573 Result: Up-regulated in Transcription
  misc_feature: MA Experiment 108573 PARAMETER Experiment Name: At_Drought_cDNA_P Parameter: Timepoint (hr) Value: 6
  misc_feature: MA Experiment 108573 PARAMETER Experiment Name: At_Drought_cDNA_P Parameter: Tissue Value: Aerial
  misc_feature: MA Experiment 108573 PARAMETER Experiment Name: At_Drought_cDNA_P Parameter: Treatment Value: Drought vs. No Drought
  misc_feature: MA Experiment ID: 108585 Result: Up-regulated in Transcription
  misc_feature: MA Experiment 108585 PARAMETER Experiment Name: At_5mM_NaNP_cDNA_P Parameter: Timepoint (hr) Value: 6
  misc_feature: MA Experiment 108585 PARAMETER Experiment Name: At_5mM_NaNP_cDNA_P Parameter: Tissue Value: Aerial
  misc_feature: MA Experiment 108585 PARAMETER Experiment Name: At_5mM_NaNP_cDNA_P Parameter: Treatment Value: null
  misc_feature: MA Experiment ID: 108595 Result: Down-regulated in Transcription
  misc_feature: MA Experiment 108595 PARAMETER Experiment Name: At_Ler-pi_Ovule_cDNA_P Parameter: Plant Line Value: null
  misc_feature: MA Experiment ID: 20000234 Result: Down-regulated in Transcription
  misc_feature: MA Experiment 20000234 PARAMETER Experiment Name: At_Siliques_P Parameter: Age (day) Value: 21
  misc_feature: MA Experiment 20000234 PARAMETER Experiment Name: At_Siliques_P Parameter: Organism Value: A. thaliana
  misc_feature: MA Experiment 20000234 PARAMETER Experiment Name: At_Siliques_P Parameter: Plant Line Value: WS
  misc_feature: MA Experiment 20000234 PARAMETER Experiment Name: At_Siliques_P Parameter: Tissue Value: Less Than 5mm Siliques vs. Whole Plant
  misc_feature: MA Experiment ID: 20000235 Result: Down-regulated in Transcription
  misc_feature: MA Experiment 20000235 PARAMETER Experiment Name: At_Siliques_P Parameter: Age (day) Value: 21
  misc_feature: MA Experiment 20000235 PARAMETER Experiment Name: At_Siliques_P Parameter: Organism Value: A. thaliana
  misc_feature: MA Experiment 20000235 PARAMETER Experiment Name: At_Siliques_P Parameter: Plant Line Value: WS
  misc_feature: MA Experiment 20000235 PARAMETER Experiment Name: At_Siliques_P Parameter: Tissue Value: 5-10mm Siliques vs. Whole Plant
  misc_feature: MA Experiment ID: 20000437 Result: Up-regulated in Transcription
  misc_feature: MA Experiment 20000437 PARAMETER Experiment Name: At_Drought_P Parameter: Age (day) Value: 8
  misc_feature: MA Experiment 20000437 PARAMETER Experiment Name: At_Drought_P Parameter: Organism Value: A. thaliana
  misc_feature: MA Experiment 20000437 PARAMETER Experiment Name: At_Drought_P Parameter: Plant Line Value: WS
  misc_feature: MA Experiment 20000437 PARAMETER Experiment Name: At_Drought_P Parameter: Timepoint (hr) Value: 24
  misc_feature: MA Experiment 20000437 PARAMETER Experiment Name: At_Drought_P Parameter: Tissue Value: Whole Plant
  misc_feature: MA Experiment 20000437 PARAMETER Experiment Name: At_Drought_P Parameter: Treatment Value: Drought vs. No Drought
  misc_feature: MA Experiment ID: 20001247 Result: Up-regulated in Transcription
  misc_feature: MA Experiment 20001247 PARAMETER Experiment Name: At_Far-red-induction_P Parameter: Age (day) Value: 7
  misc_feature: MA Experiment 20001247 PARAMETER Experiment Name: At_Far-red-induction_P Parameter: Light Value: Far-red vs. White
  misc_feature: MA Experiment 20001247 PARAMETER Experiment Name: At_Far-red-induction_P Parameter: Organism Value: A. thaliana
  misc_feature: MA Experiment 20001247 PARAMETER Experiment Name: At_Far-red-induction_P Parameter: Plant Line Value: Columbia
  misc_feature: MA Experiment 20001247 PARAMETER Experiment Name: At_Far-red-induction_P Parameter: Timepoint (hr) Value: 1
  misc_feature: MA Experiment 20001247 PARAMETER Experiment Name: At_Far-red-induction_P Parameter: Tissue Value: Whole Plant
  misc_feature: MA Experiment ID: 20001248 Result: Up-regulated in Transcription
  misc_feature: MA Experiment 20001248 PARAMETER Experiment Name: At_Far-red-induction_P Parameter: Age (day) Value: 7
  misc_feature: MA Experiment 20001248 PARAMETER Experiment Name: At_Far-red-induction_P Parameter: Light Value: Far-red vs. White
  misc_feature: MA Experiment 20001248 PARAMETER Experiment Name: At_Far-red-induction_P Parameter: Organism Value: A. thaliana
  misc_feature: MA Experiment 20001248 PARAMETER Experiment Name: At_Far-red-induction_P Parameter: Plant Line Value: Columbia
  misc_feature: MA Experiment 20001248 PARAMETER Experiment Name: At_Far-red-induction_P Parameter: Timepoint (hr) Value: 4
  misc_feature: MA Experiment 20001248 PARAMETER Experiment Name: At_Far-red-induction_P Parameter: Tissue Value: Whole Plant
  misc_feature: MA Experiment ID: 20001450 Result: Up-regulated in Transcription
  misc_feature: MA Experiment 20001450 PARAMETER Experiment Name: At_Far-red-induction_P Parameter: Age (day) Value: 7
  misc_feature: MA Experiment 20001450 PARAMETER Experiment Name: At_Far-red-induction_P Parameter: Light Value: Far-red vs. White
  misc_feature: MA Experiment 20001450 PARAMETER Experiment Name: At_Far-red-induction_P Parameter: Organism Value: A. thaliana
  misc_feature: MA Experiment 20001450 PARAMETER Experiment Name: At_Far-red-induction_P Parameter: Plant Line Value: Columbia
  misc_feature: MA Experiment 20001450 PARAMETER Experiment Name: At_Far-red-induction_P Parameter: Timepoint (hr) Value: 8
  misc_feature: MA Experiment 20001450 PARAMETER Experiment Name: At_Far-red-induction_P Parameter: Tissue Value: Whole Plant
  misc_feature: MA Experiment ID: 20001560 Result: Down-regulated in Transcription
  misc_feature: MA Experiment 20001560 PARAMETER Experiment Name: At_Drought_Soil_Dry_P Parameter: Age (day) Value: 28
  misc_feature: MA Experiment 20001560 PARAMETER Experiment Name: At_Drought_Soil_Dry_P Parameter: Organism Value: A. thaliana
  misc_feature: MA Experiment 20001560 PARAMETER Experiment Name: At_Drought_Soil_Dry_P Parameter: Plant Line Value: WS
  misc_feature: MA Experiment 20001560 PARAMETER Experiment Name: At_Drought_Soil_Dry_P Parameter: Post Timepoint (hr) Value: None
  misc_feature: MA Experiment 20001560 PARAMETER Experiment Name: At_Drought_Soil_Dry_P Parameter: Post-Treatment Value: None
  misc_feature: MA Experiment 20001560 PARAMETER Experiment Name: At_Drought_Soil_Dry_P Parameter: Timepoint (day) Value: 14
  misc_feature: MA Experiment 20001560 PARAMETER Experiment Name: At_Drought_Soil_Dry_P Parameter: Treatment Value: Drought vs. No Drought

SEQ ID NO: 32572 - protein, 303 aa, Arabidopsis thaliana; identical to SEQ ID NO: 28982
  peptide (1)..(303): Ceres Seq. ID no. 12324250
  misc_feature (35)..(302): Homolog of NCBI NO: 34394174 NR Description: putative transmembrane protein(TOM3)
  misc_feature (33)..(303): Homolog of NCBI NO: 18415765 NR Description: putative protein
  misc_feature (16)..(302): Homolog of NCBI NO: 34902220 NR Description: Putative transmembrane protein
  misc_feature (18)..(302): Homolog of NCBI NO: 37536460 NR Description: putative transmembrane protein
  misc_feature (14)..(303): Homolog of NCBI NO: 27754346 NR Description: unknown protein [Arabidopsis thaliana]
  misc_feature (20)..(303): Homolog of NCBI NO: 21537116 NR Description: unknown [Arabidopsis thaliana]
  misc_feature (14)..(303): Homolog of NCBI NO: 18394129 NR Description: expressed protein
  misc_feature (14)..(303): Homolog of NCBI NO: 7262697 NR Description: Contains similarity to an unknown protein from
  misc_feature (16)..(303): Homolog of NCBI NO: 21537264 NR Description: unknown [Arabidopsis thaliana]
  misc_feature (1)..(303): Homolog of NCBI NO: 18395323 NR Description: expressed protein

SEQ ID NO: 32573 - protein, 289 aa, Arabidopsis thaliana; identical to SEQ ID NO: 28983
  peptide (1)..(289): Ceres Seq. ID no. 12324251
  misc_feature (21)..(288): Homolog of NCBI NO: 34394174 NR Description: putative transmembrane protein(TOM3)
  misc_feature (19)..(289): Homolog of NCBI NO: 18415765 NR Description: putative protein
  misc_feature (2)..(288): Homolog of NCBI NO: 34902220 NR Description: Putative transmembrane protein
  misc_feature (4)..(288): Homolog of NCBI NO: 37536460 NR Description: putative transmembrane protein
  misc_feature (1)..(289): Homolog of NCBI NO: 27754346 NR Description: unknown protein [Arabidopsis thaliana]
  misc_feature (6)..(289): Homolog of NCBI NO: 21537116 NR Description: unknown [Arabidopsis thaliana]
  misc_feature (1)..(289): Homolog of NCBI NO: 18394129 NR Description: expressed protein
  misc_feature (1)..(289): Homolog of NCBI NO: 7262697 NR Description: Contains similarity to an unknown protein from
  misc_feature (2)..(289): Homolog of NCBI NO: 21537264 NR Description: unknown [Arabidopsis thaliana]
  misc_feature (1)..(289): Homolog of NCBI NO: 18395323 NR Description: expressed protein

SEQ ID NO: 32574 - protein, 288 aa, Arabidopsis thaliana; identical to SEQ ID NO: 28984
  peptide (1)..(288): Ceres Seq. ID no. 12324252
  misc_feature (20)..(287): Homolog of NCBI NO: 34394174 NR Description: putative transmembrane protein(TOM3)
  misc_feature (18)..(288): Homolog of NCBI NO: 18415765 NR Description: putative protein
  misc_feature (1)..(287): Homolog of NCBI NO: 34902220 NR Description: Putative transmembrane protein
  misc_feature (3)..(287): Homolog of NCBI NO: 37536460 NR Description: putative transmembrane protein
  misc_feature (1)..(288): Homolog of NCBI NO: 27754346 NR Description: unknown protein [Arabidopsis thaliana]
  misc_feature (5)..(288): Homolog of NCBI NO: 21537116 NR Description: unknown [Arabidopsis thaliana]
  misc_feature (1)..(288): Homolog of NCBI NO: 18394129 NR Description: expressed protein
  misc_feature (1)..(288): Homolog of NCBI NO: 7262697 NR Description: Contains similarity to an unknown protein from
  misc_feature (1)..(288): Homolog of NCBI NO: 21537264 NR Description: unknown [Arabidopsis thaliana]
  misc_feature (1)..(288): Homolog of NCBI NO: 18395323 NR Description: expressed protein

SEQ ID NO: 32575 - DNA, 665 bp, Arabidopsis thaliana; identical to SEQ ID NO: 28985
  misc_feature (1)..(665): Ceres Seq. ID no. 12329989
  misc_feature: MA Experiment ID: 20000179 Result: Up-regulated in Transcription
  misc_feature: MA Experiment 20000179 PARAMETER Experiment Name: At_Germinating_Seeds_P Parameter: Age (hr) Value: 6 vs. 0
  misc_feature: MA Experiment 20000179 PARAMETER Experiment Name: At_Germinating_Seeds_P Parameter: Tissue Value: Germinating Seeds

SEQ ID NO: 32576 - protein, 162 aa, Arabidopsis thaliana; identical to SEQ ID NO: 28986
  peptide (1)..(162): Ceres Seq. ID no. 12329990
  misc_feature (58)..(162): Homolog of NCBI NO: 16799587 NR Description: lin0512 [Listeria innocua]
  misc_feature (58)..(162): Homolog of NCBI NO: 16802555 NR Description: lmo0512 [Listeria monocytogenes EGD-e]
  misc_feature (41)..(119): Homolog of NCBI NO: 34912624 NR Description: P0410E01.16 [Oryza sativa (japonica
  misc_feature (58)..(162): Homolog of NCBI NO: 23098421 NR Description: hypothetical protein [Oceanobacillus iheyensis
  misc_feature (59)..(162): Homolog of NCBI NO: 23098097 NR Description: hypothetical protein [Oceanobacillus iheyensis
  misc_feature (57)..(162): Homolog of NCBI NO: 37520060 NR Description: hypothetical protein glr0491 [Gloeobacter
  misc_feature (1)..(120): Homolog of NCBI NO: 25373109 NR Description: F28N24.25 protein - Arabidopsis thaliana
  misc_feature (1)..(162): Homolog of NCBI NO: 21954066 NR Description: unknown protein [Arabidopsis thaliana]
  misc_feature (1)..(162): Homolog of NCBI NO: 18396927 NR Description: expressed protein
  misc_feature (1)..(162): Homolog of NCBI NO: 30690579 NR Description: expressed protein [Arabidopsis thaliana]

SEQ ID NO: 32577 - protein, 122 aa, Arabidopsis thaliana; identical to SEQ ID NO: 28987
  peptide (1)..(122): Ceres Seq. ID no. 12329991
  misc_feature (18)..(122): Homolog of NCBI NO: 16799587 NR Description: lin0512 [Listeria innocua]
  misc_feature (18)..(122): Homolog of NCBI NO: 16802555 NR Description: lmo0512 [Listeria monocytogenes EGD-e]
  misc_feature (1)..(79): Homolog of NCBI NO: 34912624 NR Description: P0410E01.16 [Oryza sativa (japonica
  misc_feature (18)..(122): Homolog of NCBI NO: 23098421 NR Description: hypothetical protein [Oceanobacillus iheyensis
  misc_feature (19)..(122): Homolog of NCBI NO: 23098097 NR Description: hypothetical protein [Oceanobacillus iheyensis
  misc_feature (17)..(122): Homolog of NCBI NO: 37520060 NR Description: hypothetical protein glr0491 [Gloeobacter
  misc_feature (1)..(80): Homolog of NCBI NO: 25373109 NR Description: F28N24.25 protein - Arabidopsis thaliana
  misc_feature (1)..(122): Homolog of NCBI NO: 21954066 NR Description: unknown protein [Arabidopsis thaliana]
  misc_feature (1)..(122): Homolog of NCBI NO: 18396927 NR Description: expressed protein
  misc_feature (1)..(122): Homolog of NCBI NO: 30690579 NR Description: expressed protein [Arabidopsis thaliana]

SEQ ID NO: 32578 - protein, 106 aa, Arabidopsis thaliana; identical to SEQ ID NO: 28988
  peptide (1)..(106): Ceres Seq. ID no. 12329992
  misc_feature (2)..(106): Homolog of NCBI NO: 16799587 NR Description: lin0512 [Listeria innocua]
  misc_feature (2)..(106): Homolog of NCBI NO: 16802555 NR Description: lmo0512 [Listeria monocytogenes EGD-e]
  misc_feature (1)..(63): Homolog of NCBI NO: 34912624 NR Description: P0410E01.16 [Oryza sativa (japonica
  misc_feature (2)..(106): Homolog of NCBI NO: 23098421 NR Description: hypothetical protein [Oceanobacillus iheyensis
  misc_feature (3)..(106): Homolog of NCBI NO: 23098097 NR Description: hypothetical protein [Oceanobacillus iheyensis
  misc_feature (1)..(106): Homolog of NCBI NO: 37520060 NR Description: hypothetical protein glr0491 [Gloeobacter
  misc_feature (1)..(64): Homolog of NCBI NO: 25373109 NR Description: F28N24.25 protein - Arabidopsis thaliana
  misc_feature (1)..(106): Homolog of NCBI NO: 21954066 NR Description: unknown protein [Arabidopsis thaliana]
  misc_feature (1)..(106): Homolog of NCBI NO: 18396927 NR Description: expressed protein
  misc_feature (1)..(106): Homolog of NCBI NO: 30690579 NR Description: expressed protein [Arabidopsis thaliana]

SEQ ID NO: 32579 - DNA, 697 bp, Arabidopsis thaliana; identical to SEQ ID NO: 28989
  misc_feature (1)..(697): Ceres Seq. ID no. 13499469
  misc_feature: MA Experiment ID: 108461 Result: Up-regulated in Transcription
  misc_feature: MA Experiment 108461 PARAMETER Experiment Name: At_Germinating_Seeds_cDNA_P Parameter: Age (day) Value: 1 vs. 0
  misc_feature: MA Experiment 108461 PARAMETER Experiment Name: At_Germinating_Seeds_cDNA_P Parameter: Tissue Value: Germinating Seeds
  misc_feature: MA Experiment ID: 20000113 Result: Up-regulated in Transcription
  misc_feature: MA Experiment 20000113 PARAMETER Experiment Name: At_42deg_Heat_cDNA_P Parameter: Temperature (deg C) Value: 42 vs. 22
  misc_feature: MA Experiment 20000113 PARAMETER Experiment Name: At_42deg_Heat_cDNA_P Parameter: Timepoint (hr) Value: 8
  misc_feature: MA Experiment 20000113 PARAMETER Experiment Name: At_42deg_Heat_cDNA_P Parameter: Tissue Value: Aerial
  misc_feature: MA Experiment ID: 20000180 Result: Up-regulated in Transcription
  misc_feature: MA Experiment 20000180 PARAMETER Experiment Name: At_Germinating_Seeds_P Parameter: Age (hr) Value: 24 vs. 0
  misc_feature: MA Experiment 20000180 PARAMETER Experiment Name: At_Germinating_Seeds_P Parameter: Tissue Value: Germinating Seeds
  misc_feature: MA Experiment ID: 20000185 Result: Down-regulated in Transcription
  misc_feature: MA Experiment 20000185 PARAMETER Experiment Name: At_Roots__P Parameter: Age (day) Value: 7 vs. 21
  misc_feature: MA Experiment 20000185 PARAMETER Experiment Name: At_Roots__P Parameter: Organism Value: A. thaliana
  misc_feature: MA Experiment 20000185 PARAMETER Experiment Name: At_Roots__P Parameter: Tissue Value: Roots vs. Whole Plant
  misc_feature: MA Experiment ID: 20000264 Result: Down-regulated in Transcription
  misc_feature: MA Experiment 20000264 PARAMETER Experiment Name: At_Open_Flower_P Parameter: Age (day) Value: 21
  misc_feature: MA Experiment 20000264 PARAMETER Experiment Name: At_Open_Flower_P Parameter: Plant Line Value: WS
  misc_feature: MA Experiment 20000264 PARAMETER Experiment Name: At_Open_Flower_P Parameter: Tissue Value: Open Flower vs. Whole Plant
  misc_feature: MA Experiment ID: 20000439 Result: Down-regulated in Transcription
  misc_feature: MA Experiment 20000439 PARAMETER Experiment Name: At_Roots__P Parameter: Age (day) Value: 14 vs. 21
  misc_feature: MA Experiment 20000439 PARAMETER Experiment Name: At_Roots__P Parameter: Organism Value: A. thaliana
  misc_feature: MA Experiment 20000439 PARAMETER Experiment Name: At_Roots__P Parameter: Tissue Value: Roots vs. Whole Plant
  misc_feature: MA Experiment ID: 20000794 Result: Down-regulated in Transcription
  misc_feature: MA Experiment 20000794 PARAMETER Experiment Name: At_Petals_P Parameter: Age (day) Value: 23-25 days
  misc_feature: MA Experiment 20000794 PARAMETER Experiment Name: At_Petals_P Parameter: Plant Line Value: WS
  misc_feature: MA Experiment 20000794 PARAMETER Experiment Name: At_Petals_P Parameter: Tissue Value: Petals vs. Whole plant
  misc_feature: MA Experiment ID: 20001248 Result: Down-regulated in Transcription
  misc_feature: MA Experiment 20001248 PARAMETER Experiment Name: At_Far-red-induction_P Parameter: Age (day) Value: 7
  misc_feature: MA Experiment 20001248 PARAMETER Experiment Name: At_Far-red-induction_P Parameter: Light Value: Far-red vs. White
  misc_feature: MA Experiment 20001248 PARAMETER Experiment Name: At_Far-red-induction_P Parameter: Organism Value: A. thaliana
  misc_feature: MA Experiment 20001248 PARAMETER Experiment Name: At_Far-red-induction_P Parameter: Plant Line Value: Columbia
  misc_feature: MA Experiment 20001248 PARAMETER Experiment Name: At_Far-red-induction_P Parameter: Timepoint (hr) Value: 4
  misc_feature: MA Experiment 20001248 PARAMETER Experiment Name: At_Far-red-induction_P Parameter: Tissue Value: Whole Plant
  misc_feature: MA Experiment ID: 20001451 Result: Down-regulated in Transcription
  misc_feature: MA Experiment 20001451 PARAMETER Experiment Name: At_Far-red-induction_P Parameter: Age (day) Value: 7
  misc_feature: MA Experiment 20001451 PARAMETER Experiment Name: At_Far-red-induction_P Parameter: Light Value: Far-red vs. White
  misc_feature: MA Experiment 20001451 PARAMETER Experiment Name: At_Far-red-induction_P Parameter: Organism Value: A. thaliana
  misc_feature: MA Experiment 20001451 PARAMETER Experiment Name: At_Far-red-induction_P Parameter: Plant Line Value: Columbia
  misc_feature: MA Experiment 20001451 PARAMETER Experiment Name: At_Far-red-induction_P Parameter: Timepoint (hr) Value: 24
  misc_feature: MA Experiment 20001451 PARAMETER Experiment Name: At_Far-red-induction_P Parameter: Tissue Value: Whole Plant
  misc_feature: MA Experiment ID: 20001557 Result: Down-regulated in Transcription
  misc_feature: MA Experiment 20001557 PARAMETER Experiment Name: At_Drought_Soil_Dry_P Parameter: Age (day) Value: 27
  misc_feature: MA Experiment 20001557 PARAMETER Experiment Name: At_Drought_Soil_Dry_P Parameter: Organism Value: A. thaliana
  misc_feature: MA Experiment 20001557 PARAMETER Experiment Name: At_Drought_Soil_Dry_P Parameter: Plant Line Value: WS
  misc_feature: MA Experiment 20001557 PARAMETER Experiment Name: At_Drought_Soil_Dry_P Parameter: Post Timepoint (hr) Value: 3
  misc_feature: MA Experiment 20001557 PARAMETER Experiment Name: At_Drought_Soil_Dry_P Parameter: Post-Treatment Value: Re-Water vs. No Drought
  misc_feature: MA Experiment 20001557 PARAMETER Experiment Name: At_Drought_Soil_Dry_P Parameter: Timepoint (day) Value: 13
  misc_feature: MA Experiment 20001557 PARAMETER Experiment Name: At_Drought_Soil_Dry_P Parameter: Treatment Value: Drought vs. No Drought
  misc_feature: MA Experiment ID: 20001558 Result: Down-regulated in Transcription
  misc_feature: MA Experiment 20001558 PARAMETER Experiment Name: At_Drought_Soil_Dry_P Parameter: Age (day) Value: 27
  misc_feature: MA Experiment 20001558 PARAMETER Experiment Name: At_Drought_Soil_Dry_P Parameter: Organism Value: A. thaliana
  misc_feature: MA Experiment 20001558 PARAMETER Experiment Name: At_Drought_Soil_Dry_P Parameter: Plant Line Value: WS
  misc_feature: MA Experiment 20001558 PARAMETER Experiment Name: At_Drought_Soil_Dry_P Parameter: Post Timepoint (hr) Value: 6
  misc_feature: MA Experiment 20001558 PARAMETER Experiment Name: At_Drought_Soil_Dry_P Parameter: Post-Treatment Value: Re-Water vs. No Drought
  misc_feature: MA Experiment 20001558 PARAMETER Experiment Name: At_Drought_Soil_Dry_P Parameter: Timepoint (day) Value: 13
  misc_feature: MA Experiment 20001558 PARAMETER Experiment Name: At_Drought_Soil_Dry_P Parameter: Treatment Value: Drought vs. No Drought
  misc_feature: MA Experiment ID: 20001757 Result: Up-regulated in Transcription
  misc_feature: MA Experiment 20001757 PARAMETER Experiment Name: At_50mM_NH4NO3_L-to-H_P Parameter: Timepoint (hr) Value: 6
  misc_feature: MA Experiment 20001757 PARAMETER Experiment Name: At_50mM_NH4NO3_L-to-H_P Parameter: Tissue Value: Leaf
  misc_feature: MA Experiment 20001757 PARAMETER Experiment Name: At_50mM_NH4NO3_L-to-H_P Parameter: Treatment Value: 50mM NH4NO3 vs 100mM Mannitol
  misc_feature: MA Experiment ID: 20001904 Result: Down-regulated in Transcription
  misc_feature: MA Experiment 20001904 PARAMETER Experiment Name: At_Drought_Reproduction_P Parameter: Age (day) Value: 37
  misc_feature: MA Experiment 20001904 PARAMETER Experiment Name: At_Drought_Reproduction_P Parameter: Organism Value: A. thaliana
  misc_feature: MA Experiment 20001904 PARAMETER Experiment Name: At_Drought_Reproduction_P Parameter: Plant Line Value: WS
  misc_feature: MA Experiment 20001904 PARAMETER Experiment Name: At_Drought_Reproduction_P Parameter: Timepoint (day) Value: 7
  misc_feature: MA Experiment 20001904 PARAMETER Experiment Name: At_Drought_Reproduction_P Parameter: Tissue Value: Rosettes
  misc_feature: MA Experiment 20001904 PARAMETER Experiment Name: At_Drought_Reproduction_P Parameter: Treatment Value: Drought vs. No Drought
  misc_feature: MA Experiment ID: 20001905 Result: Down-regulated in Transcription
  misc_feature: MA Experiment 20001905 PARAMETER Experiment Name: At_Drought_Reproduction_P Parameter: Age (day) Value: 40
  misc_feature: MA Experiment 20001905 PARAMETER Experiment Name: At_Drought_Reproduction_P Parameter: Organism Value: A. thaliana
  misc_feature: MA Experiment 20001905 PARAMETER Experiment Name: At_Drought_Reproduction_P Parameter: Plant Line Value: WS
  misc_feature: MA Experiment 20001905 PARAMETER Experiment Name: At_Drought_Reproduction_P Parameter: Timepoint (day) Value: 10
  misc_feature: MA Experiment 20001905 PARAMETER Experiment Name: At_Drought_Reproduction_P Parameter: Tissue Value: Rosettes
  misc_feature: MA Experiment 20001905 PARAMETER Experiment Name: At_Drought_Reproduction_P Parameter: Treatment Value: Drought vs. No Drought
  misc_feature: MA Experiment ID: 20001906 Result: Down-regulated in Transcription
  misc_feature: MA Experiment 20001906 PARAMETER Experiment Name: At_Drought_Reproduction_P Parameter: Age (day) Value: 35
  misc_feature: MA Experiment 20001906 PARAMETER Experiment Name: At_Drought_Reproduction_P Parameter: Organism Value: A. thaliana
  misc_feature: MA Experiment 20001906 PARAMETER Experiment Name: At_Drought_Reproduction_P Parameter: Plant Line Value: WS
  misc_feature: MA Experiment 20001906 PARAMETER Experiment Name: At_Drought_Reproduction_P Parameter: Timepoint (day) Value: 5
  misc_feature: MA Experiment 20001906 PARAMETER Experiment Name: At_Drought_Reproduction_P Parameter: Tissue Value: Siliques
  misc_feature: MA Experiment 20001906 PARAMETER Experiment Name: At_Drought_Reproduction_P Parameter: Treatment Value: Drought vs. No Drought
  misc_feature: MA Experiment ID: 20001908 Result: Down-regulated in Transcription
  misc_feature: MA Experiment 20001908 PARAMETER Experiment Name: At_Drought_Reproduction_P Parameter: Age (day) Value: 40
  misc_feature: MA Experiment 20001908 PARAMETER Experiment Name: At_Drought_Reproduction_P Parameter: Organism Value: A. thaliana
  misc_feature: MA Experiment 20001908 PARAMETER Experiment Name: At_Drought_Reproduction_P Parameter: Plant Line Value: WS
  misc_feature: MA Experiment 20001908 PARAMETER Experiment Name: At_Drought_Reproduction_P Parameter: Timepoint (day) Value: 10
  misc_feature: MA Experiment 20001908 PARAMETER Experiment Name: At_Drought_Reproduction_P Parameter: Tissue Value: Siliques
  misc_feature: MA Experiment 20001908 PARAMETER Experiment Name: At_Drought_Reproduction_P Parameter: Treatment Value: Drought vs. No Drought

SEQ ID NO: 32580 - protein, 71 aa, Arabidopsis thaliana; identical to SEQ ID NO: 28990
  peptide (1)..(71): Ceres Seq. ID no. 13499470

SEQ ID NO: 32581 - protein, 60 aa, Arabidopsis thaliana; identical to SEQ ID NO: 28991
  peptide (1)..(60): Ceres Seq. ID no. 13499471

SEQ ID NO: 32582 - protein, 58 aa, Arabidopsis thaliana; identical to SEQ ID NO: 28992
  peptide (1)..(58): Ceres Seq. ID no. 13499472
  misc_feature (4)..(58): Homolog of NCBI NO: 18403896 NR Description: expressed protein [Arabidopsis thaliana]
  misc_feature (6)..(58): Homolog of NCBI NO: 37536446 NR Description: hypothetical protein [Oryza sativa (japonica
  misc_feature (20)..(58): Homolog of NCBI NO: 34393236 NR Description: unknown protein [Oryza sativa (japonica
  misc_feature (4)..(58): Homolog of NCBI NO: 21555057 NR Description: unknown [Arabidopsis thaliana]
  misc_feature (4)..(58): Homolog of NCBI NO: 18407178 NR Description: expressed protein [Arabidopsis thaliana]
  misc_feature (11)..(58): Homolog of NCBI NO: 38175474 NR Description: unknown protein [Oryza sativa (japonica
  misc_feature (1)..(58): Homolog of NCBI NO: 687677 NR Description: unknown
  misc_feature (1)..(58): Homolog of NCBI NO: 18411555 NR Description: expressed protein [Arabidopsis thaliana]

SEQ ID NO: 32583 - DNA, 2148 bp, Arabidopsis thaliana; identical to SEQ ID NO: 28993
  misc_feature (1)..(2148): Ceres Seq. ID no. 12325293
  misc_feature: MA Experiment ID: 108462 Result: Down-regulated in Transcription
  misc_feature: MA Experiment 108462 PARAMETER Experiment Name: At_Germinating_Seeds_cDNA_P Parameter: Age (day) Value: 2 vs. 0
  misc_feature: MA Experiment 108462 PARAMETER Experiment Name: At_Germinating_Seeds_cDNA_P Parameter: Tissue Value: Germinating Seeds
  misc_feature: MA Experiment ID: 108463 Result: Down-regulated in Transcription
  misc_feature: MA Experiment 108463 PARAMETER Experiment Name: At_Germinating_Seeds_cDNA_P Parameter: Age (day) Value: 3 vs. 0
  misc_feature: MA Experiment 108463 PARAMETER Experiment Name: At_Germinating_Seeds_cDNA_P Parameter: Tissue Value: Germinating Seeds
  misc_feature: MA Experiment ID: 108464 Result: Down-regulated in Transcription
  misc_feature: MA Experiment 108464 PARAMETER Experiment Name: At_Germinating_Seeds_cDNA_P Parameter: Age (day) Value: 4 vs. 0
  misc_feature: MA Experiment 108464 PARAMETER Experiment Name: At_Germinating_Seeds_cDNA_P Parameter: Tissue Value: Germinating Seeds
  misc_feature: MA Experiment ID: 108595 Result: Down-regulated in Transcription
  misc_feature: MA Experiment 108595 PARAMETER Experiment Name: At_Ler-pi_Ovule_cDNA_P Parameter: Plant Line Value: null
  misc_feature: MA Experiment ID: 20000087 Result: Down-regulated in Transcription
  misc_feature: MA Experiment 20000087 PARAMETER Experiment Name: At_100uM_ABA_Mutants_cDNA_P Parameter: Plant Line Value: WS
  misc_feature: MA Experiment 20000087 PARAMETER Experiment Name: At_100uM_ABA_Mutants_cDNA_P Parameter: Timepoint (hr) Value: 6
  misc_feature: MA Experiment 20000087 PARAMETER Experiment Name: At_100uM_ABA_Mutants_cDNA_P Parameter: Tissue Value: Aerial
  misc_feature: MA Experiment 20000087 PARAMETER Experiment Name: At_100uM_ABA_Mutants_cDNA_P Parameter: Treatment Value: 100uM ABA vs. No Treatment
  misc_feature: MA Experiment ID: 20000171 Result: Up-regulated in Transcription
  misc_feature: MA Experiment 20000171 PARAMETER Experiment Name: At_42deg_Heat_P Parameter: Age (day) Value: 14
  misc_feature: MA Experiment 20000171 PARAMETER Experiment Name: At_42deg_Heat_P Parameter: Organism Value: A. thaliana
  misc_feature: MA Experiment 20000171 PARAMETER Experiment Name: At_42deg_Heat_P Parameter: Plant Line Value: WS
  misc_feature: MA Experiment 20000171 PARAMETER Experiment Name: At_42deg_Heat_P Parameter: Temperature (deg C) Value: 42 vs. 22
  misc_feature: MA Experiment 20000171 PARAMETER Experiment Name: At_42deg_Heat_P Parameter: Timepoint (hr) Value: 1
  misc_feature: MA Experiment 20000171 PARAMETER Experiment Name: At_42deg_Heat_P Parameter: Tissue Value: Aerial
  misc_feature: MA Experiment ID: 20000173 Result: Up-regulated in Transcription
  misc_feature: MA Experiment 20000173 PARAMETER Experiment Name: At_42deg_Heat_P Parameter: Age (day) Value: 14
  misc_feature: MA Experiment 20000173 PARAMETER Experiment Name: At_42deg_Heat_P Parameter: Organism Value: A. thaliana
  misc_feature: MA Experiment 20000173 PARAMETER Experiment Name: At_42deg_Heat_P Parameter: Plant Line Value: WS
  misc_feature: MA Experiment 20000173 PARAMETER Experiment Name: At_42deg_Heat_P Parameter: Temperature (deg C) Value: 42 vs. 22
  misc_feature: MA Experiment 20000173 PARAMETER Experiment Name: At_42deg_Heat_P Parameter: Timepoint (hr) Value: 6
  misc_feature: MA Experiment 20000173 PARAMETER Experiment Name: At_42deg_Heat_P Parameter: Tissue Value: Aerial
  misc_feature: MA Experiment ID: 20000180 Result: Down-regulated in Transcription
  misc_feature: MA Experiment 20000180 PARAMETER Experiment Name: At_Germinating_Seeds_P Parameter: Age (hr) Value: 24 vs. 0
  misc_feature: MA Experiment 20000180 PARAMETER Experiment Name: At_Germinating_Seeds_P Parameter: Tissue Value: Germinating Seeds
  misc_feature: MA Experiment ID: 20001557 Result: Up-regulated in Transcription
  misc_feature: MA Experiment 20001557 PARAMETER Experiment Name: At_Drought_Soil_Dry_P Parameter: Age (day) Value: 27
  misc_feature: MA Experiment 20001557 PARAMETER Experiment Name: At_Drought_Soil_Dry_P Parameter: Organism Value: A. thaliana
  misc_feature: MA Experiment 20001557 PARAMETER Experiment Name: At_Drought_Soil_Dry_P Parameter: Plant Line Value: WS
  misc_feature: MA Experiment 20001557 PARAMETER Experiment Name: At_Drought_Soil_Dry_P Parameter: Post Timepoint (hr) Value: 3
  misc_feature: MA Experiment 20001557 PARAMETER Experiment Name: At_Drought_Soil_Dry_P Parameter: Post-Treatment Value: Re-Water vs. No Drought
  misc_feature: MA Experiment 20001557 PARAMETER Experiment Name: At_Drought_Soil_Dry_P Parameter: Timepoint (day) Value: 13
  misc_feature: MA Experiment 20001557 PARAMETER Experiment Name: At_Drought_Soil_Dry_P Parameter: Treatment Value: Drought vs. No Drought

SEQ ID NO: 32584 - protein, 535 aa, Arabidopsis thaliana; identical to SEQ ID NO: 28994
  peptide (1)..(535): Ceres Seq. ID no. 12325294
  misc_feature (4)..(100): Pfam Name: Importin beta binding domain Pfam Description: Importin beta binding domain
  misc_feature (1)..(535): Homolog of NCBI NO: 34895044 NR Description: putative impotin alpha 1b
  misc_feature (1)..(526): Homolog of NCBI NO: 34902832 NR Description: unnamed protein product [Oryza sativa (japonica
  misc_feature (1)..(438): Homolog of NCBI NO: 18414597 NR Description: Expressed protein; protein id: At4g16143.1
  misc_feature (1)..(534): Homolog of NCBI NO: 13699777 NR Description: AtKAP alpha [Arabidopsis thaliana]
  misc_feature (1)..(534): Homolog of NCBI NO: 15809794 NR Description: AT3g06720/F3E22_14 [Arabidopsis thaliana]
  misc_feature (1)..(534): Homolog of NCBI NO: 25314876 NR Description: probable nuclear transport factor importin
  misc_feature (1)..(534): Homolog of NCBI NO: 15230778 NR Description: importin alpha
  misc_feature (1)..(534): Homolog of NCBI NO: 13752562 NR Description: importin alpha 2 [Capsicum annuum]
  misc_feature (1)..(535): Homolog of NCBI NO: 25314870 NR Description: probable nuclear transport factor importin alpha
  misc_feature (1)..(535): Homolog of NCBI NO: 13605661 NR Description: AT3g06720/F3E22_14 [Arabidopsis thaliana]

SEQ ID NO: 32585 - protein, 503 aa, Arabidopsis thaliana; identical to SEQ ID NO: 28995
  peptide (1)..(503): Ceres Seq. ID no. 12325295
  misc_feature (1)..(68): Pfam Name: Importin beta binding domain Pfam Description: Importin beta binding domain
  misc_feature (1)..(503): Homolog of NCBI NO: 34895044 NR Description: putative impotin alpha 1b
  misc_feature (1)..(494): Homolog of NCBI NO: 34902832 NR Description: unnamed protein product [Oryza sativa (japonica
  misc_feature (1)..(406): Homolog of NCBI NO: 18414597 NR Description: Expressed protein; protein id: At4g16143.1
  misc_feature (1)..(502): Homolog of NCBI NO: 13699777 NR Description: AtKAP alpha [Arabidopsis thaliana]
  misc_feature (1)..(502): Homolog of NCBI NO: 15809794 NR Description: AT3g06720/F3E22_14 [Arabidopsis thaliana]
  misc_feature (1)..(502): Homolog of NCBI NO: 25314876 NR Description: probable nuclear transport factor importin
  misc_feature (1)..(502): Homolog of NCBI NO: 15230778 NR Description: importin alpha
  misc_feature (1)..(502): Homolog of NCBI NO: 13752562 NR Description: importin alpha 2 [Capsicum annuum]
  misc_feature (1)..(503): Homolog of NCBI NO: 25314870 NR Description: probable nuclear transport factor importin alpha
  misc_feature (1)..(503): Homolog of NCBI NO: 13605661 NR Description: AT3g06720/F3E22_14 [Arabidopsis thaliana]

SEQ ID NO: 32586 - protein, 454 aa, Arabidopsis thaliana; identical to SEQ ID NO: 28996
  peptide (1)..(454): Ceres Seq. ID no. 12325296
  misc_feature (113)..(154): Pfam Name: Armadillo/beta-catenin-like repeat Pfam Description: Armadillo/beta-catenin-like repeat
  misc_feature (1)..(454): Homolog of NCBI NO: 34895044 NR Description: putative impotin alpha 1b
  misc_feature (1)..(445): Homolog of NCBI NO: 34902832 NR Description: unnamed protein product [Oryza sativa (japonica
  misc_feature (1)..(357): Homolog of NCBI NO: 18414597 NR Description: Expressed protein; protein id: At4g16143.1
  misc_feature (1)..(453): Homolog of NCBI NO: 13699777 NR Description: AtKAP alpha [Arabidopsis thaliana]
  misc_feature (1)..(453): Homolog of NCBI NO: 15809794 NR Description: AT3g06720/F3E22_14 [Arabidopsis thaliana]
  misc_feature (1)..(453): Homolog of NCBI NO: 25314876 NR Description: probable nuclear transport factor importin
  misc_feature (1)..(453): Homolog of NCBI NO: 15230778 NR Description: importin alpha
  misc_feature (1)..(453): Homolog of NCBI NO: 13752562 NR Description: importin alpha 2 [Capsicum annuum]
  misc_feature (1)..(454): Homolog of NCBI NO: 25314870 NR Description: probable nuclear transport factor importin alpha
  misc_feature (1)..(454): Homolog of NCBI NO: 13605661 NR Description: AT3g06720/F3E22_14 [Arabidopsis thaliana]

SEQ ID NO: 32587 - DNA, 1292 bp, Arabidopsis thaliana; identical to SEQ ID NO: 28997
  misc_feature (1)..(1292): Ceres Seq. ID no. 12348332
  misc_feature: MA Experiment ID: 108462 Result: Down-regulated in Transcription
  misc_feature: MA Experiment 108462 PARAMETER Experiment Name: At_Germinating_Seeds_cDNA_P Parameter: Age (day) Value: 2 vs. 0
  misc_feature: MA Experiment 108462 PARAMETER Experiment Name: At_Germinating_Seeds_cDNA_P Parameter: Tissue Value: Germinating Seeds
  misc_feature: MA Experiment ID: 108463 Result: Down-regulated in Transcription
  misc_feature: MA Experiment 108463 PARAMETER Experiment Name: At_Germinating_Seeds_cDNA_P Parameter: Age (day) Value: 3 vs. 0
  misc_feature: MA Experiment 108463 PARAMETER Experiment Name: At_Germinating_Seeds_cDNA_P Parameter: Tissue Value: Germinating Seeds
  misc_feature: MA Experiment ID: 108464 Result: Down-regulated in Transcription
  misc_feature: MA Experiment 108464 PARAMETER Experiment Name: At_Germinating_Seeds_cDNA_P Parameter: Age (day) Value: 4 vs. 0
  misc_feature: MA Experiment 108464 PARAMETER Experiment Name: At_Germinating_Seeds_cDNA_P Parameter: Tissue Value: Germinating Seeds
  misc_feature: MA Experiment ID: 108579 Result: Up-regulated in Transcription
  misc_feature: MA Experiment 108579 PARAMETER Experiment Name: At_4deg_Cold_cDNA_P Parameter: Temperature (deg C) Value: 4 vs. 22
  misc_feature: MA Experiment 108579 PARAMETER Experiment Name: At_4deg_Cold_cDNA_P Parameter: Timepoint (hr) Value: 6
  misc_feature: MA Experiment 108579 PARAMETER Experiment Name: At_4deg_Cold_cDNA_P Parameter: Tissue Value: Aerial
  misc_feature: MA Experiment ID: 108668 Result: Down-regulated in Transcription
  misc_feature: MA Experiment 108668 PARAMETER Experiment Name: At_2mM_SA_cDNA_P Parameter: Plant Line Value: WS
  misc_feature: MA Experiment 108668 PARAMETER Experiment Name: At_2mM_SA_cDNA_P Parameter: Timepoint (hr) Value: 6
  misc_feature: MA Experiment 108668 PARAMETER Experiment Name: At_2mM_SA_cDNA_P Parameter: Treatment Value: 2mM SA vs. No Treatment
  misc_feature: MA Experiment ID: 20000093 Result: Down-regulated in Transcription
  misc_feature: MA Experiment 20000093 PARAMETER Experiment Name: At_42deg_Heat_cDNA_P Parameter: Temperature (deg C) Value: 42 vs. 22
  misc_feature: MA Experiment 20000093 PARAMETER Experiment Name: At_42deg_Heat_cDNA_P Parameter: Timepoint (hr) Value: 0.5
  misc_feature: MA Experiment 20000093 PARAMETER Experiment Name: At_42deg_Heat_cDNA_P Parameter: Tissue Value: Aerial

SEQ ID NO: 32588 - protein, 394 aa, Arabidopsis thaliana; identical to SEQ ID NO: 28998
  peptide (1)..(394): Ceres Seq. ID no. 12348333
  misc_feature (122)..(173): Pfam Name: Carboxylesterase Pfam Description: Carboxylesterase
  misc_feature (79)..(392): Homolog of NCBI NO: 15221975 NR Description: hypothetical protein; protein id: At1g19190.1
  misc_feature (79)..(394): Homolog of NCBI NO: 15228426 NR Description: putative protein; protein id: At3g48700.1
  misc_feature (79)..(394): Homolog of NCBI NO: 18086341 NR Description: AT3g48690/T8P19_200 [Arabidopsis thaliana]
  misc_feature (79)..(394): Homolog of NCBI NO: 15228425 NR Description: putative protein
  misc_feature (81)..(392): Homolog of NCBI NO: 28393060 NR Description: putative esterase [Arabidopsis thaliana]
  misc_feature (79)..(392): Homolog of NCBI NO: 15227669 NR Description: putative esterase; protein id: At2g03550.1
  misc_feature (79)..(392): Homolog of NCBI NO: 15222791 NR Description: hypothetical protein; protein id: At1g49640.1
  misc_feature (79)..(394): Homolog of NCBI NO: 15222795 NR Description: unknown protein; protein id: At1g49660.1
  misc_feature (21)..(394): Homolog of NCBI NO: 18402731 NR Description: expressed protein
  misc_feature (21)..(394): Homolog of NCBI NO: 21537287 NR Description: putative esterase [Arabidopsis thaliana]

SEQ ID NO: 32589 - protein, 374 aa, Arabidopsis thaliana; identical to SEQ ID NO: 28999
  peptide (1)..(374): Ceres Seq. ID no. 12348334
  misc_feature (102)..(153): Pfam Name: Carboxylesterase Pfam Description: Carboxylesterase
  misc_feature (59)..(372): Homolog of NCBI NO: 15221975 NR Description: hypothetical protein; protein id: At1g19190.1
  misc_feature (59)..(374): Homolog of NCBI NO: 15228426 NR Description: putative protein; protein id: At3g48700.1
  misc_feature (59)..(374): Homolog of NCBI NO: 18086341 NR Description: AT3g48690/T8P19_200 [Arabidopsis thaliana]
  misc_feature (59)..(374): Homolog of NCBI NO: 15228425 NR Description: putative protein
  misc_feature (61)..(372): Homolog of NCBI NO: 28393060 NR Description: putative esterase [Arabidopsis thaliana]
  misc_feature (59)..(372): Homolog of NCBI NO: 15227669 NR Description: putative esterase; protein id: At2g03550.1
  misc_feature (59)..(372): Homolog of NCBI NO: 15222791 NR Description: hypothetical protein; protein id: At1g49640.1
  misc_feature (59)..(374): Homolog of NCBI NO: 15222795 NR Description: unknown protein; protein id: At1g49660.1
  misc_feature (1)..(374): Homolog of NCBI NO: 18402731 NR Description: expressed protein
  misc_feature (1)..(374): Homolog of NCBI NO: 21537287 NR Description: putative esterase [Arabidopsis thaliana]

SEQ ID NO: 32590 - DNA, 1324 bp, Arabidopsis thaliana; identical to SEQ ID NO: 29000
  misc_feature (1)..(1324): Ceres Seq. ID no. 12324502
  misc_feature: MA Experiment ID: 108462 Result: Down-regulated in Transcription
  misc_feature: MA Experiment 108462 PARAMETER Experiment Name: At_Germinating_Seeds_cDNA_P Parameter: Age (day) Value: 2 vs. 0
  misc_feature: MA Experiment 108462 PARAMETER Experiment Name: At_Germinating_Seeds_cDNA_P Parameter: Tissue Value: Germinating Seeds
  misc_feature: MA Experiment ID: 108463 Result: Down-regulated in Transcription
  misc_feature: MA Experiment 108463 PARAMETER Experiment Name: At_Germinating_Seeds_cDNA_P Parameter: Age (day) Value: 3 vs. 0
  misc_feature: MA Experiment 108463 PARAMETER Experiment Name: At_Germinating_Seeds_cDNA_P Parameter: Tissue Value: Germinating Seeds

SEQ ID NO: 32591 - protein, 282 aa, Arabidopsis thaliana; identical to SEQ ID NO: 29001
  peptide (1)..(282): Ceres Seq. ID no. 12324503
  misc_feature (123)..(228): Pfam Name: Guanylate kinase Pfam Description: Guanylate kinase
  misc_feature (89)..(281): Homolog of NCBI NO: 23098957 NR Description: guanylate kinase [Oceanobacillus iheyensis
  misc_feature (89)..(279): Homolog of NCBI NO: 27467803 NR Description: guanylate kinase [Staphylococcus epidermidis ATCC
  misc_feature (89)..(275): Homolog of NCBI NO: 20807954 NR Description: Guanylate kinase [Thermoanaerobacter
  misc_feature (89)..(281): Homolog of NCBI NO: 15673881 NR Description: guanylate kinase (EC 2.7.4.8) [Lactococcus lactis
  misc_feature (90)..(275): Homolog of NCBI NO: 15644437 NR Description: guanylate kinase [Thermotoga maritima]
  misc_feature (89)..(280): Homolog of NCBI NO: 15615075 NR Description: guanylate kinase [Bacillus halodurans]
  misc_feature (89)..(275): Homolog of NCBI NO: 28210904 NR Description: guanylate kinase [Clostridium tetani E88]
  misc_feature (85)..(282): Homolog of NCBI NO: 22969911 NR Description: hypothetical protein [Chloroflexus aurantiacus]
  misc_feature (43)..(282): Homolog of NCBI NO: 6862924 NR Description: putative guanylate kinase [Arabidopsis thaliana]
  misc_feature (1)..(282): Homolog of NCBI NO: 18397500 NR Description: putative guanylate kinase

SEQ ID NO: 32592 - protein, 240 aa, Arabidopsis thaliana; identical to SEQ ID NO: 29002
  peptide (1)..(240): Ceres Seq. ID no. 12324504
  misc_feature (81)..(186): Pfam Name: Guanylate kinase Pfam Description: Guanylate kinase
  misc_feature (47)..(239): Homolog of NCBI NO: 23098957 NR Description: guanylate kinase [Oceanobacillus iheyensis
  misc_feature (47)..(237): Homolog of NCBI NO: 27467803 NR Description: guanylate kinase [Staphylococcus epidermidis ATCC
  misc_feature (47)..(233): Homolog of NCBI NO: 20807954 NR Description: Guanylate kinase [Thermoanaerobacter
  misc_feature (47)..(239): Homolog of NCBI NO: 15673881 NR Description: guanylate kinase (EC 2.7.4.8) [Lactococcus lactis
  misc_feature (48)..(233): Homolog of NCBI NO: 15644437 NR Description: guanylate kinase [Thermotoga maritima]
  misc_feature (47)..(238): Homolog of NCBI NO: 15615075 NR Description: guanylate kinase [Bacillus halodurans]
  misc_feature (47)..(233): Homolog of NCBI NO: 28210904 NR Description: guanylate kinase [Clostridium tetani E88]
  misc_feature (43)..(240): Homolog of NCBI NO: 22969911 NR Description: hypothetical protein [Chloroflexus aurantiacus]
  misc_feature (1)..(240): Homolog of NCBI NO: 6862924 NR Description: putative guanylate kinase [Arabidopsis thaliana]
  misc_feature (1)..(240): Homolog of NCBI NO: 18397500 NR Description: putative guanylate kinase

SEQ ID NO: 32593 - protein, 157 aa, Arabidopsis thaliana; identical to SEQ ID NO: 29003
  peptide (1)..(157): Ceres Seq. ID no. 12324505
  misc_feature (1)..(103): Pfam Name: Guanylate kinase Pfam Description: Guanylate kinase
  misc_feature (1)..(156): Homolog of NCBI NO: 23098957 NR Description: guanylate kinase [Oceanobacillus iheyensis
  misc_feature (1)..(154): Homolog of NCBI NO: 27467803 NR Description: guanylate kinase [Staphylococcus epidermidis ATCC
  misc_feature (1)..(150): Homolog of NCBI NO: 20807954 NR Description: Guanylate kinase [Thermoanaerobacter
  misc_feature (1)..(156): Homolog of NCBI NO: 15673881 NR Description: guanylate kinase (EC 2.7.4.8) [Lactococcus lactis
  misc_feature (1)..(150): Homolog of NCBI NO: 15644437 NR Description: guanylate kinase [Thermotoga maritima]
  misc_feature (1)..(155): Homolog of NCBI NO: 15615075 NR Description: guanylate kinase [Bacillus halodurans]
  misc_feature (1)..(150): Homolog of NCBI NO: 28210904 NR Description: guanylate kinase [Clostridium tetani E88]
  misc_feature (1)..(157): Homolog of NCBI NO: 22969911 NR Description: hypothetical protein [Chloroflexus aurantiacus]
  misc_feature (1)..(157): Homolog of NCBI NO: 6862924 NR Description: putative guanylate kinase [Arabidopsis thaliana]
  misc_feature (1)..(157): Homolog of NCBI NO: 18397500 NR Description: putative guanylate kinase

SEQ ID NO: 32594 - DNA, 1127 bp, Arabidopsis thaliana; identical to SEQ ID NO: 29004
  misc_feature (1)..(1127): Ceres Seq. ID no. 13593807
  misc_feature: MA Experiment ID: 20000169 Result: Up-regulated in Transcription
  misc_feature: MA Experiment 20000169 PARAMETER Experiment Name: At_100uM_ABA_P Parameter: Age (day) Value: 14
  misc_feature: MA Experiment 20000169 PARAMETER Experiment Name: At_100uM_ABA_P Parameter: Organism Value: A. thaliana
  misc_feature: MA Experiment 20000169 PARAMETER Experiment Name: At_100uM_ABA_P Parameter: Plant Line Value: WS
  misc_feature: MA Experiment 20000169 PARAMETER Experiment Name: At_100uM_ABA_P Parameter: Timepoint (hr) Value: 6
  misc_feature: MA Experiment 20000169 PARAMETER Experiment Name: At_100uM_ABA_P Parameter: Tissue Value: Aerial
  misc_feature: MA Experiment 20000169 PARAMETER Experiment Name: At_100uM_ABA_P Parameter: Treatment Value: 100uM ABA vs. No Treatment
  misc_feature: MA Experiment ID: 20000171 Result: Up-regulated in Transcription
  misc_feature: MA Experiment 20000171 PARAMETER Experiment Name: At_42deg_Heat_P Parameter: Age (day) Value: 14
  misc_feature: MA Experiment 20000171 PARAMETER Experiment Name: At_42deg_Heat_P Parameter: Organism Value: A. thaliana
  misc_feature: MA Experiment 20000171 PARAMETER Experiment Name: At_42deg_Heat_P Parameter: Plant Line Value: WS
  misc_feature: MA Experiment 20000171 PARAMETER Experiment Name: At_42deg_Heat_P Parameter: Temperature (deg C) Value: 42 vs. 22
  misc_feature: MA Experiment 20000171 PARAMETER Experiment Name: At_42deg_Heat_P Parameter: Timepoint (hr) Value: 1
  misc_feature: MA Experiment 20000171 PARAMETER Experiment Name: At_42deg_Heat_P Parameter: Tissue Value: Aerial
  misc_feature: MA Experiment ID: 20000173 Result: Up-regulated in Transcription
  misc_feature: MA Experiment 20000173 PARAMETER Experiment Name: At_42deg_Heat_P Parameter: Age (day) Value: 14
  misc_feature: MA Experiment 20000173 PARAMETER Experiment Name: At_42deg_Heat_P Parameter: Organism Value: A. thaliana
  misc_feature: MA Experiment 20000173 PARAMETER Experiment Name: At_42deg_Heat_P Parameter: Plant Line Value: WS
  misc_feature: MA Experiment 20000173 PARAMETER Experiment Name: At_42deg_Heat_P Parameter: Temperature (deg C) Value: 42 vs. 22
  misc_feature: MA Experiment 20000173 PARAMETER Experiment Name: At_42deg_Heat_P Parameter: Timepoint (hr) Value: 6
  misc_feature: MA Experiment 20000173 PARAMETER Experiment Name: At_42deg_Heat_P Parameter: Tissue Value: Aerial
  misc_feature: MA Experiment ID: 20000184 Result: Up-regulated in Transcription
  misc_feature: MA Experiment 20000184 PARAMETER Experiment Name: At_Shoots__P Parameter: Age (day) Value: 7
  misc_feature: MA Experiment 20000184 PARAMETER Experiment Name: At_Shoots__P Parameter: Tissue Value: Shoots vs. Whole Plant
  misc_feature: MA Experiment ID: 20000436 Result: Up-regulated in Transcription
  misc_feature: MA Experiment 20000436 PARAMETER Experiment Name: At_Drought_P Parameter: Age (day) Value: 7
  misc_feature: MA Experiment 20000436 PARAMETER Experiment Name: At_Drought_P Parameter: Organism Value: A. thaliana
  misc_feature: MA Experiment 20000436 PARAMETER Experiment Name: At_Drought_P Parameter: Plant Line Value: WS
  misc_feature: MA Experiment 20000436 PARAMETER Experiment Name: At_Drought_P Parameter: Timepoint (hr) Value: 12
  misc_feature: MA Experiment 20000436 PARAMETER Experiment Name: At_Drought_P Parameter: Tissue Value: Whole Plant
  misc_feature: MA Experiment 20000436 PARAMETER Experiment Name: At_Drought_P Parameter: Treatment Value: Drought vs. No Drought
  misc_feature: MA Experiment ID: 20000794 Result: Up-regulated in Transcription
  misc_feature: MA Experiment 20000794 PARAMETER Experiment Name: At_Petals_P Parameter: Age (day) Value: 23-25 days
  misc_feature: MA Experiment 20000794 PARAMETER Experiment Name: At_Petals_P Parameter: Plant Line Value: WS
  misc_feature: MA Experiment 20000794 PARAMETER Experiment Name: At_Petals_P Parameter: Tissue Value: Petals vs. Whole plant
  misc_feature: MA Experiment ID: 20001248 Result: Down-regulated in Transcription
  misc_feature: MA Experiment 20001248 PARAMETER Experiment Name: At_Far-red-induction_P Parameter: Age (day) Value: 7
  misc_feature: MA Experiment 20001248 PARAMETER Experiment Name: At_Far-red-induction_P Parameter: Light Value: Far-red vs. White
  misc_feature: MA Experiment 20001248 PARAMETER Experiment Name: At_Far-red-induction_P Parameter: Organism Value: A. thaliana
  misc_feature: MA Experiment 20001248 PARAMETER Experiment Name: At_Far-red-induction_P Parameter: Plant Line Value: Columbia
  misc_feature: MA Experiment 20001248 PARAMETER Experiment Name: At_Far-red-induction_P Parameter: Timepoint (hr) Value: 4
  misc_feature: MA Experiment 20001248 PARAMETER Experiment Name: At_Far-red-induction_P Parameter: Tissue Value: Whole Plant
  misc_feature: MA Experiment ID: 20001557 Result: Up-regulated in Transcription
  misc_feature: MA Experiment 20001557 PARAMETER Experiment Name: At_Drought_Soil_Dry_P Parameter: Age (day) Value: 27
  misc_feature: MA Experiment 20001557 PARAMETER Experiment Name: At_Drought_Soil_Dry_P Parameter: Organism Value: A. thaliana
  misc_feature: MA Experiment 20001557 PARAMETER Experiment Name: At_Drought_Soil_Dry_P Parameter: Plant Line Value: WS
  misc_feature: MA Experiment 20001557 PARAMETER Experiment Name: At_Drought_Soil_Dry_P Parameter: Post Timepoint (hr) Value: 3
  misc_feature: MA Experiment 20001557 PARAMETER Experiment Name: At_Drought_Soil_Dry_P Parameter: Post-Treatment Value: Re-Water vs. No Drought
  misc_feature: MA Experiment 20001557 PARAMETER Experiment Name: At_Drought_Soil_Dry_P Parameter: Timepoint (day) Value: 13
  misc_feature: MA Experiment 20001557 PARAMETER Experiment Name: At_Drought_Soil_Dry_P Parameter: Treatment Value: Drought vs. No Drought
  misc_feature: MA Experiment ID: 20001558 Result: Up-regulated in Transcription
  misc_feature: MA Experiment 20001558 PARAMETER Experiment Name: At_Drought_Soil_Dry_P Parameter: Age (day) Value: 27
  misc_feature: MA Experiment 20001558 PARAMETER Experiment Name: At_Drought_Soil_Dry_P Parameter: Organism Value: A. thaliana
  misc_feature: MA Experiment 20001558 PARAMETER Experiment Name: At_Drought_Soil_Dry_P Parameter: Plant Line Value: WS
  misc_feature: MA Experiment 20001558 PARAMETER Experiment Name: At_Drought_Soil_Dry_P Parameter: Post Timepoint (hr) Value: 6
  misc_feature: MA Experiment 20001558 PARAMETER Experiment Name: At_Drought_Soil_Dry_P Parameter: Post-Treatment Value: Re-Water vs. No Drought
  misc_feature: MA Experiment 20001558 PARAMETER Experiment Name: At_Drought_Soil_Dry_P Parameter: Timepoint (day) Value: 13
  misc_feature: MA Experiment 20001558 PARAMETER Experiment Name: At_Drought_Soil_Dry_P Parameter: Treatment Value: Drought vs. No Drought
  misc_feature: MA Experiment ID: 20001905 Result: Up-regulated in Transcription
  misc_feature: MA Experiment 20001905 PARAMETER Experiment Name: At_Drought_Reproduction_P Parameter: Age (day) Value: 40
  misc_feature: MA Experiment 20001905 PARAMETER Experiment Name: At_Drought_Reproduction_P Parameter: Organism Value: A. thaliana
  misc_feature: MA Experiment 20001905 PARAMETER Experiment Name: At_Drought_Reproduction_P Parameter: Plant Line Value: WS
  misc_feature: MA Experiment 20001905 PARAMETER Experiment Name: At_Drought_Reproduction_P Parameter: Timepoint (day) Value: 10
  misc_feature: MA Experiment 20001905 PARAMETER Experiment Name: At_Drought_Reproduction_P Parameter: Tissue Value: Rosettes
  misc_feature: MA Experiment 20001905 PARAMETER Experiment Name: At_Drought_Reproduction_P Parameter: Treatment Value: Drought vs. No Drought

SEQ ID NO: 32595 - protein, 287 aa, Arabidopsis thaliana; identical to SEQ ID NO: 29005
  peptide (1)..(287): Ceres Seq. ID no. 13593808
  misc_feature (45)..(274): Pfam Name: Major intrinsic protein Pfam Description: Major intrinsic protein
  misc_feature (1)..(287): Homolog of NCBI NO: 10799095 NR Description: aquaporin PIP1b2 [Brassica oleracea]
  misc_feature (1)..(287): Homolog of NCBI NO: 15236485 NR Description: major intrinsic protein (MIP) family [Arabidopsis
  misc_feature (1)..(287): Homolog of NCBI NO: 3551131 NR Description: plasma membrane aquaporin (PAQ1) [Raphanus
  misc_feature (1)..(287): Homolog of NCBI NO: 15233109 NR Description: plasma membrane intrinsic protein 1A [Arabidopsis
  misc_feature (1)..(287): Homolog of NCBI NO: 472875 NR Description: plasma membrane intrinsic protein 1c [Arabidopsis
  misc_feature (1)..(287): Homolog of NCBI NO: 17065068 NR Description: plasma membrane intrinsic protein 1C
  misc_feature (1)..(287): Homolog of NCBI NO: 15223438 NR Description: plasma membrane intrinsic protein 1c [Arabidopsis
  misc_feature (1)..(287): Homolog of NCBI NO: 2373401 NR Description: transmembrane protein [Arabidopsis thaliana]
  misc_feature (1)..(287): Homolog of NCBI NO: 7441247 NR Description: probable plasma membrane intrinsic protein 1c -
  misc_feature (1)..(287): Homolog of NCBI NO: 18411332 NR Description: transmembrane protein (MIP family) [Arabidopsis

SEQ ID NO: 32596 - protein, 214 aa, Arabidopsis thaliana; identical to SEQ ID NO: 29006
  peptide (1)..(214): Ceres Seq. ID no. 13593809
  misc_feature (1)..(201): Pfam Name: Major intrinsic protein Pfam Description: Major intrinsic protein
  misc_feature (1)..(214): Homolog of NCBI NO: 10799095 NR Description: aquaporin PIP1b2 [Brassica oleracea]
  misc_feature (1)..(214): Homolog of NCBI NO: 15236485 NR Description: major intrinsic protein (MIP) family [Arabidopsis
  misc_feature (1)..(214): Homolog of NCBI NO: 3551131 NR Description: plasma membrane aquaporin (PAQ1) [Raphanus
  misc_feature (1)..(214): Homolog of NCBI NO: 15233109 NR Description: plasma membrane intrinsic protein 1A [Arabidopsis
  misc_feature (1)..(214): Homolog of NCBI NO: 472875 NR Description: plasma membrane intrinsic protein 1c [Arabidopsis
  misc_feature (1)..(214): Homolog of NCBI NO: 17065068 NR Description: plasma membrane intrinsic protein 1C
  misc_feature (1)..(214): Homolog of NCBI NO: 15223438 NR Description: plasma membrane intrinsic protein 1c [Arabidopsis
  misc_feature (1)..(214): Homolog of NCBI NO: 2373401 NR Description: transmembrane protein [Arabidopsis thaliana]
  misc_feature (1)..(214): Homolog of NCBI NO: 7441247 NR Description: probable plasma membrane intrinsic protein 1c -
  misc_feature (1)..(214): Homolog of NCBI NO: 18411332 NR Description: transmembrane protein (MIP family) [Arabidopsis

SEQ ID NO: 32597 - protein, 206 aa, Arabidopsis thaliana; identical to SEQ ID NO: 29007
  peptide (1)..(206): Ceres Seq. ID no. 13593810
  misc_feature (1)..(193): Pfam Name: Major intrinsic protein Pfam Description: Major intrinsic protein
  misc_feature (1)..(206): Homolog of NCBI NO: 10799095 NR Description: aquaporin PIP1b2 [Brassica oleracea]
  misc_feature (1)..(206): Homolog of NCBI NO: 15236485 NR Description: major intrinsic protein (MIP) family [Arabidopsis
  misc_feature (1)..(206): Homolog of NCBI NO: 3551131 NR Description: plasma membrane aquaporin (PAQ1) [Raphanus
  misc_feature (1)..(206): Homolog of NCBI NO: 15233109 NR Description: plasma membrane intrinsic protein 1A [Arabidopsis
  misc_feature (1)..(206): Homolog of NCBI NO: 472875 NR Description: plasma membrane intrinsic protein 1c [Arabidopsis
  misc_feature (1)..(206): Homolog of NCBI NO: 17065068 NR Description: plasma membrane intrinsic protein 1C
  misc_feature (1)..(206): Homolog of NCBI NO: 15223438 NR Description: plasma membrane intrinsic protein 1c [Arabidopsis
  misc_feature (1)..(206): Homolog of NCBI NO: 2373401 NR Description: transmembrane protein [Arabidopsis thaliana]
  misc_feature (1)..(206): Homolog of NCBI NO: 7441247 NR Description: probable plasma membrane intrinsic protein 1c -
  misc_feature (1)..(206): Homolog of NCBI NO: 18411332 NR Description: transmembrane protein (MIP family) [Arabidopsis

SEQ ID NO: 32598 - DNA, 1422 bp, Arabidopsis thaliana; identical to SEQ ID NO: 29008
  misc_feature (1)..(1422): Ceres Seq. ID no. 12395753
  misc_feature: MA Experiment ID: 108461 Result: Up-regulated in Transcription
  misc_feature: MA Experiment 108461 PARAMETER Experiment Name: At_Germinating_Seeds_cDNA_P Parameter: Age (day) Value: 1 vs. 0
  misc_feature: MA Experiment 108461 PARAMETER Experiment Name: At_Germinating_Seeds_cDNA_P Parameter: Tissue Value: Germinating Seeds
  misc_feature: MA Experiment ID: 108462 Result: Up-regulated in Transcription
  misc_feature: MA Experiment 108462 PARAMETER Experiment Name: At_Germinating_Seeds_cDNA_P Parameter: Age (day) Value: 2 vs. 0
  misc_feature: MA Experiment 108462 PARAMETER Experiment Name: At_Germinating_Seeds_cDNA_P Parameter: Tissue Value: Germinating Seeds
  misc_feature: MA Experiment ID: 108463 Result: Up-regulated in Transcription
  misc_feature: MA Experiment 108463 PARAMETER Experiment Name: At_Germinating_Seeds_cDNA_P Parameter: Age (day) Value: 3 vs. 0
  misc_feature: MA Experiment 108463 PARAMETER Experiment Name: At_Germinating_Seeds_cDNA_P Parameter: Tissue Value: Germinating Seeds
  misc_feature: MA Experiment ID: 108464 Result: Up-regulated in Transcription
  misc_feature: MA Experiment 108464 PARAMETER Experiment Name: At_Germinating_Seeds_cDNA_P Parameter: Age (day) Value: 4 vs. 0
  misc_feature: MA Experiment 108464 PARAMETER Experiment Name: At_Germinating_Seeds_cDNA_P Parameter: Tissue Value: Germinating Seeds
  misc_feature: MA Experiment ID: 108488 Result: Up-regulated in Transcription
  misc_feature: MA Experiment ID: 108574 Result: Down-regulated in Transcription
  misc_feature: MA Experiment 108574 PARAMETER Experiment Name: At_Wounding__cDNA_P Parameter: Timepoint (hr) Value: 1
  misc_feature: MA Experiment 108574 PARAMETER Experiment Name: At_Wounding__cDNA_P Parameter: Tissue Value: Aerial
  misc_feature: MA Experiment 108574 PARAMETER Experiment Name: At_Wounding__cDNA_P Parameter: Treatment Value: Wounding vs. No Wounding
  misc_feature: MA Experiment ID: 108576 Result: Down-regulated in Transcription
  misc_feature: MA Experiment 108576 PARAMETER Experiment Name: At_42deg_Heat_cDNA_P Parameter: Temperature (deg C) Value: 42 vs. 22
  misc_feature: MA Experiment 108576 PARAMETER Experiment Name: At_42deg_Heat_cDNA_P Parameter: Timepoint (hr) Value: 1
  misc_feature: MA Experiment 108576 PARAMETER Experiment Name: At_42deg_Heat_cDNA_P Parameter: Tissue Value: Aerial
  misc_feature: MA Experiment ID: 108577 Result: Down-regulated in Transcription
  misc_feature: MA Experiment 108577 PARAMETER Experiment Name: At_42deg_Heat_cDNA_P Parameter: Temperature (deg C) Value: 42 vs. 22
  misc_feature: MA Experiment 108577 PARAMETER Experiment Name: At_42deg_Heat_cDNA_P Parameter: Timepoint (hr) Value: 6
  misc_feature: MA Experiment 108577 PARAMETER Experiment Name: At_42deg_Heat_cDNA_P Parameter: Tissue Value: Aerial
  misc_feature: MA Experiment ID: 108579 Result: Down-regulated in Transcription
  misc_feature: MA Experiment 108579 PARAMETER Experiment Name: At_4deg_Cold_cDNA_P Parameter: Temperature (deg C) Value: 4 vs. 22
  misc_feature: MA Experiment 108579 PARAMETER Experiment Name: At_4deg_Cold_cDNA_P Parameter: Timepoint (hr) Value: 6
  misc_feature: MA Experiment 108579 PARAMETER Experiment Name: At_4deg_Cold_cDNA_P Parameter: Tissue Value: Aerial
  misc_feature: MA Experiment ID: 108585 Result: Down-regulated in Transcription
  misc_feature: MA Experiment 108585 PARAMETER Experiment Name: At_5mM_NaNP_cDNA_P Parameter: Timepoint (hr) Value: 6
  misc_feature: MA Experiment 108585 PARAMETER Experiment Name: At_5mM_NaNP_cDNA_P Parameter: Tissue Value: Aerial
  misc_feature: MA Experiment 108585 PARAMETER Experiment Name: At_5mM_NaNP_cDNA_P Parameter: Treatment Value: null
  misc_feature: MA Experiment ID: 108594 Result: Down-regulated in Transcription
  misc_feature: MA Experiment 108594 PARAMETER Experiment Name: At_Ler-rhl_Root_cDNA_P Parameter: Plant Line Value: null
  misc_feature: MA Experiment ID: 108595 Result: Down-regulated in Transcription
  misc_feature: MA Experiment 108595 PARAMETER Experiment Name: At_Ler-pi_Ovule_cDNA_P Parameter: Plant Line Value: null
  misc_feature: MA Experiment ID: 108668 Result: Down-regulated in Transcription
  misc_feature: MA Experiment 108668 PARAMETER Experiment Name: At_2mM_SA_cDNA_P Parameter: Plant Line Value: WS
  misc_feature: MA Experiment 108668 PARAMETER Experiment Name: At_2mM_SA_cDNA_P Parameter: Timepoint (hr) Value: 6
  misc_feature: MA Experiment 108668 PARAMETER Experiment Name: At_2mM_SA_cDNA_P Parameter: Treatment Value: 2mM SA vs. No Treatment
  misc_feature: MA Experiment ID: 20000068 Result: Down-regulated in Transcription
  misc_feature: MA Experiment ID: 20000069 Result: Up-regulated in Transcription
  misc_feature: MA Experiment 20000069 PARAMETER Experiment Name: At_100uM_ABA_Mutants_cDNA_P Parameter: Plant Line Value: CS23
  misc_feature: MA Experiment 20000069 PARAMETER Experiment Name: At_100uM_ABA_Mutants_cDNA_P Parameter: Timepoint (hr) Value: 6
  misc_feature: MA Experiment 20000069 PARAMETER Experiment Name: At_100uM_ABA_Mutants_cDNA_P Parameter: Tissue Value: Aerial
  misc_feature: MA Experiment 20000069 PARAMETER Experiment Name: At_100uM_ABA_Mutants_cDNA_P Parameter: Treatment Value: 100uM ABA vs. No Treatment
  misc_feature: MA Experiment ID: 20000070 Result: Up-regulated in Transcription
  misc_feature: MA Experiment 20000070 PARAMETER Experiment Name: At_100uM_ABA_Mutants_cDNA_P Parameter: Plant Line Value: CS24
  misc_feature: MA Experiment 20000070 PARAMETER Experiment Name: At_100uM_ABA_Mutants_cDNA_P Parameter: Timepoint (hr) Value: 6
  misc_feature: MA Experiment 20000070 PARAMETER Experiment Name: At_100uM_ABA_Mutants_cDNA_P Parameter: Tissue Value: Aerial
  misc_feature: MA Experiment 20000070 PARAMETER Experiment Name: At_100uM_ABA_Mutants_cDNA_P Parameter: Treatment Value: 100uM ABA vs. No Treatment
  misc_feature: MA Experiment ID: 20000087 Result: Down-regulated in Transcription
  misc_feature: MA Experiment 20000087 PARAMETER Experiment Name: At_100uM_ABA_Mutants_cDNA_P Parameter: Plant Line Value: WS
  misc_feature: MA Experiment 20000087 PARAMETER Experiment Name: At_100uM_ABA_Mutants_cDNA_P Parameter: Timepoint (hr) Value: 6
  misc_feature: MA Experiment 20000087 PARAMETER Experiment Name: At_100uM_ABA_Mutants_cDNA_P Parameter: Tissue Value: Aerial
  misc_feature: MA Experiment 20000087 PARAMETER Experiment Name: At_100uM_ABA_Mutants_cDNA_P Parameter: Treatment Value: 100uM ABA vs. No Treatment
  misc_feature: MA Experiment ID: 20000111 Result: Down-regulated in Transcription
  misc_feature: MA Experiment 20000111 PARAMETER Experiment Name: At_42deg_Heat_cDNA_P Parameter: Temperature (deg C) Value: 42 vs. 22
  misc_feature: MA Experiment 20000111 PARAMETER Experiment Name: At_42deg_Heat_cDNA_P Parameter: Timepoint (hr) Value: 6
  misc_feature: MA Experiment 20000111 PARAMETER Experiment Name: At_42deg_Heat_cDNA_P Parameter: Tissue Value: Aerial
  misc_feature: MA Experiment ID: 20000112 Result: Down-regulated in Transcription
  misc_feature: MA Experiment 20000112 PARAMETER Experiment Name: At_42deg_Heat_cDNA_P Parameter: Temperature (deg C) Value: 42 vs. 22
  misc_feature: MA Experiment 20000112 PARAMETER Experiment Name: At_42deg_Heat_cDNA_P Parameter: Timepoint (hr) Value: 2
  misc_feature: MA Experiment 20000112 PARAMETER Experiment Name: At_42deg_Heat_cDNA_P Parameter: Tissue Value: Aerial
  misc_feature: MA Experiment ID: 20000113 Result: Down-regulated in Transcription
  misc_feature: MA Experiment 20000113 PARAMETER Experiment Name: At_42deg_Heat_cDNA_P Parameter: Temperature (deg C) Value: 42 vs. 22
  misc_feature: MA Experiment 20000113 PARAMETER Experiment Name: At_42deg_Heat_cDNA_P Parameter: Timepoint (hr) Value: 8
  misc_feature: MA Experiment 20000113 PARAMETER Experiment Name: At_42deg_Heat_cDNA_P Parameter: Tissue Value: Aerial
  misc_feature: MA Experiment ID: 20000173 Result: Down-regulated in Transcription
  misc_feature: MA Experiment 20000173 PARAMETER Experiment Name: At_42deg_Heat_P Parameter: Age (day) Value: 14
  misc_feature: MA Experiment 20000173 PARAMETER Experiment Name: At_42deg_Heat_P Parameter: Organism Value: A. thaliana
  misc_feature: MA Experiment 20000173 PARAMETER Experiment Name: At_42deg_Heat_P Parameter: Plant Line Value: WS
  misc_feature: MA Experiment 20000173 PARAMETER Experiment Name: At_42deg_Heat_P Parameter: Temperature (deg C) Value: 42 vs. 22
  misc_feature: MA Experiment 20000173 PARAMETER Experiment Name: At_42deg_Heat_P Parameter: Timepoint (hr) Value: 6
  misc_feature: MA Experiment 20000173 PARAMETER Experiment Name: At_42deg_Heat_P Parameter: Tissue Value: Aerial
  misc_feature: MA Experiment ID: 20000182 Result: Down-regulated in Transcription
  misc_feature: MA Experiment 20000182 PARAMETER Experiment Name: At_2mM_SA_P Parameter: Age (day) Value: 14
  misc_feature: MA Experiment 20000182 PARAMETER Experiment Name: At_2mM_SA_P Parameter: Organism Value: A. thaliana
  misc_feature: MA Experiment 20000182 PARAMETER Experiment Name: At_2mM_SA_P Parameter: Plant Line Value: WS
  misc_feature: MA Experiment 20000182 PARAMETER Experiment Name: At_2mM_SA_P Parameter: Timepoint (hr) Value: 6
  misc_feature: MA Experiment 20000182 PARAMETER Experiment Name: At_2mM_SA_P Parameter: Tissue Value: Aerial
  misc_feature: MA Experiment 20000182 PARAMETER Experiment Name: At_2mM_SA_P Parameter: Treatment Value: 2mM SA vs. No Treatment
  misc_feature: MA Experiment ID: 20000184 Result: Down-regulated in Transcription
  misc_feature: MA Experiment 20000184 PARAMETER Experiment Name: At_Shoots__P Parameter: Age (day) Value: 7
  misc_feature: MA Experiment 20000184 PARAMETER Experiment Name: At_Shoots__P Parameter: Tissue Value: Shoots vs. Whole Plant
  misc_feature: MA Experiment ID: 20000185 Result: Down-regulated in Transcription
  misc_feature: MA Experiment 20000185 PARAMETER Experiment Name: At_Roots__P Parameter: Age (day) Value: 7 vs. 21
  misc_feature: MA Experiment 20000185 PARAMETER Experiment Name: At_Roots__P Parameter: Organism Value: A. thaliana
  misc_feature: MA Experiment 20000185 PARAMETER Experiment Name: At_Roots__P Parameter: Tissue Value: Roots vs. Whole Plant
  misc_feature: MA Experiment ID: 20000439 Result: Down-regulated in Transcription
  misc_feature: MA Experiment 20000439 PARAMETER Experiment Name: At_Roots__P Parameter: Age (day) Value: 14 vs. 21
  misc_feature: MA Experiment 20000439 PARAMETER Experiment Name: At_Roots__P Parameter: Organism Value: A. thaliana
  misc_feature: MA Experiment 20000439 PARAMETER Experiment Name: At_Roots__P Parameter: Tissue Value: Roots vs. Whole Plant
  misc_feature: MA Experiment ID: 20000527 Result: Up-regulated in Transcription
  misc_feature: MA Experiment 20000527 PARAMETER Experiment Name: At_10percent_PEG_P Parameter: Age (day) Value: 20
  misc_feature: MA Experiment 20000527 PARAMETER Experiment Name: At_10percent_PEG_P Parameter: Organism Value: A. thaliana
  misc_feature: MA Experiment 20000527 PARAMETER Experiment Name: At_10percent_PEG_P Parameter: Plant Line Value: WS
  misc_feature: MA Experiment 20000527 PARAMETER Experiment Name: At_10percent_PEG_P Parameter: Timepoint (day) Value: 20
  misc_feature: MA Experiment 20000527 PARAMETER Experiment Name: At_10percent_PEG_P Parameter: Tissue Value: Whole Plant
  misc_feature: MA Experiment 20000527 PARAMETER Experiment Name: At_10percent_PEG_P Parameter: Treatment Value: 10percent PEG vs. No Treatment
  misc_feature: MA Experiment ID: 20001248 Result: Up-regulated in Transcription
  misc_feature: MA Experiment 20001248 PARAMETER Experiment Name: At_Far-red-induction_P Parameter: Age (day) Value: 7
  misc_feature: MA Experiment 20001248 PARAMETER Experiment Name: At_Far-red-induction_P Parameter: Light Value: Far-red vs. White
  misc_feature: MA Experiment 20001248 PARAMETER Experiment Name: At_Far-red-induction_P Parameter: Organism Value: A. thaliana
  misc_feature: MA Experiment 20001248 PARAMETER Experiment Name: At_Far-red-induction_P Parameter: Plant Line Value: Columbia
  misc_feature: MA Experiment 20001248 PARAMETER Experiment Name: At_Far-red-induction_P Parameter: Timepoint (hr) Value: 4
  misc_feature: MA Experiment 20001248 PARAMETER Experiment Name: At_Far-red-induction_P Parameter: Tissue Value: Whole Plant
  misc_feature: MA Experiment ID: 20001450 Result: Up-regulated in Transcription
  misc_feature: MA Experiment 20001450 PARAMETER Experiment Name: At_Far-red-induction_P Parameter: Age (day) Value: 7
  misc_feature: MA Experiment 20001450 PARAMETER Experiment Name: At_Far-red-induction_P Parameter: Light Value: Far-red vs. White
  misc_feature: MA Experiment 20001450 PARAMETER Experiment Name: At_Far-red-induction_P Parameter: Organism Value: A. thaliana
  misc_feature: MA Experiment 20001450 PARAMETER Experiment Name: At_Far-red-induction_P Parameter: Plant Line Value: Columbia
  misc_feature: MA Experiment 20001450 PARAMETER Experiment Name: At_Far-red-induction_P Parameter: Timepoint (hr) Value: 8
  misc_feature: MA Experiment 20001450 PARAMETER Experiment Name: At_Far-red-induction_P Parameter: Tissue Value: Whole Plant
  misc_feature: MA Experiment ID: 20001451 Result: Up-regulated in Transcription
  misc_feature: MA Experiment 20001451 PARAMETER Experiment Name: At_Far-red-induction_P Parameter: Age (day) Value: 7
  misc_feature: MA Experiment 20001451 PARAMETER Experiment Name: At_Far-red-induction_P Parameter: Light Value: Far-red vs. White
  misc_feature: MA Experiment 20001451 PARAMETER Experiment Name: At_Far-red-induction_P Parameter: Organism Value: A. thaliana
  misc_feature: MA Experiment 20001451 PARAMETER Experiment Name: At_Far-red-induction_P Parameter: Plant Line Value: Columbia
  misc_feature: MA Experiment 20001451 PARAMETER Experiment Name: At_Far-red-induction_P Parameter: Timepoint (hr) Value: 24
  misc_feature: MA Experiment 20001451 PARAMETER Experiment Name: At_Far-red-induction_P Parameter: Tissue Value: Whole Plant
  misc_feature: MA Experiment ID: 20001557 Result: Down-regulated in Transcription
  misc_feature: MA Experiment 20001557 PARAMETER Experiment Name: At_Drought_Soil_Dry_P Parameter: Age (day) Value: 27
  misc_feature: MA Experiment 20001557 PARAMETER Experiment Name: At_Drought_Soil_Dry_P Parameter: Organism Value: A. thaliana
  misc_feature: MA Experiment 20001557 PARAMETER Experiment Name: At_Drought_Soil_Dry_P Parameter: Plant Line Value: WS
  misc_feature: MA Experiment 20001557 PARAMETER Experiment Name: At_Drought_Soil_Dry_P Parameter: Post Timepoint (hr) Value: 3
  misc_feature: MA Experiment 20001557 PARAMETER Experiment Name: At_Drought_Soil_Dry_P Parameter: Post-Treatment Value: Re-Water vs. No Drought
  misc_feature: MA Experiment 20001557 PARAMETER Experiment Name: At_Drought_Soil_Dry_P Parameter: Timepoint (day) Value: 13
  misc_feature: MA Experiment 20001557 PARAMETER Experiment Name: At_Drought_Soil_Dry_P Parameter: Treatment Value: Drought vs. No Drought
  misc_feature: MA Experiment ID: 20001558 Result: Down-regulated in Transcription
  misc_feature: MA Experiment 20001558 PARAMETER Experiment Name: At_Drought_Soil_Dry_P Parameter: Age (day) Value: 27
  misc_feature: MA Experiment 20001558 PARAMETER Experiment Name: At_Drought_Soil_Dry_P Parameter: Organism Value: A. thaliana
  misc_feature: MA Experiment 20001558 PARAMETER Experiment Name: At_Drought_Soil_Dry_P Parameter: Plant Line Value: WS
  misc_feature: MA Experiment 20001558 PARAMETER Experiment Name: At_Drought_Soil_Dry_P Parameter: Post Timepoint (hr) Value: 6
  misc_feature: MA Experiment 20001558 PARAMETER Experiment Name: At_Drought_Soil_Dry_P Parameter: Post-Treatment Value: Re-Water vs. No Drought
  misc_feature: MA Experiment 20001558 PARAMETER Experiment Name: At_Drought_Soil_Dry_P Parameter: Timepoint (day) Value: 13
  misc_feature: MA Experiment 20001558 PARAMETER Experiment Name: At_Drought_Soil_Dry_P Parameter: Treatment Value: Drought vs. No Drought
  misc_feature: MA Experiment ID: 20001560 Result: Down-regulated in Transcription
  misc_feature: MA Experiment 20001560 PARAMETER Experiment Name: At_Drought_Soil_Dry_P Parameter: Age (day) Value: 28
  misc_feature: MA Experiment 20001560 PARAMETER Experiment Name: At_Drought_Soil_Dry_P Parameter: Organism Value: A. thaliana
  misc_feature: MA Experiment 20001560 PARAMETER Experiment Name: At_Drought_Soil_Dry_P Parameter: Plant Line Value: WS
  misc_feature: MA Experiment 20001560 PARAMETER Experiment Name: At_Drought_Soil_Dry_P Parameter: Post Timepoint (hr) Value: None
  misc_feature: MA Experiment 20001560 PARAMETER Experiment Name: At_Drought_Soil_Dry_P Parameter: Post-Treatment Value: None
  misc_feature: MA Experiment 20001560 PARAMETER Experiment Name: At_Drought_Soil_Dry_P Parameter: Timepoint (day) Value: 14
  misc_feature: MA Experiment 20001560 PARAMETER Experiment Name: At_Drought_Soil_Dry_P Parameter: Treatment Value: Drought vs. No Drought
  misc_feature: MA Experiment ID: 20001905 Result: Down-regulated in Transcription
  misc_feature: MA Experiment 20001905 PARAMETER Experiment Name: At_Drought_Reproduction_P Parameter: Age (day) Value: 40
  misc_feature: MA Experiment 20001905 PARAMETER Experiment Name: At_Drought_Reproduction_P Parameter: Organism Value: A. thaliana
  misc_feature: MA Experiment 20001905 PARAMETER Experiment Name: At_Drought_Reproduction_P Parameter: Plant Line Value: WS
  misc_feature: MA Experiment 20001905 PARAMETER Experiment Name: At_Drought_Reproduction_P Parameter: Timepoint (day) Value: 10
  misc_feature: MA Experiment 20001905 PARAMETER Experiment Name: At_Drought_Reproduction_P Parameter: Tissue Value: Rosettes
  misc_feature: MA Experiment 20001905 PARAMETER Experiment Name: At_Drought_Reproduction_P Parameter: Treatment Value: Drought vs. No Drought
  misc_feature: MA Experiment ID: 20001906 Result: Down-regulated in Transcription
  misc_feature: MA Experiment 20001906 PARAMETER Experiment Name: At_Drought_Reproduction_P Parameter: Age (day) Value: 35
  misc_feature: MA Experiment 20001906 PARAMETER Experiment Name: At_Drought_Reproduction_P Parameter: Organism Value: A. thaliana
  misc_feature: MA Experiment 20001906 PARAMETER Experiment Name: At_Drought_Reproduction_P Parameter: Plant Line Value: WS
  misc_feature: MA Experiment 20001906 PARAMETER Experiment Name: At_Drought_Reproduction_P Parameter: Timepoint (day) Value: 5
  misc_feature: MA Experiment 20001906 PARAMETER Experiment Name: At_Drought_Reproduction_P Parameter: Tissue Value: Siliques
  misc_feature: MA Experiment 20001906 PARAMETER Experiment Name: At_Drought_Reproduction_P Parameter: Treatment Value: Drought vs. No Drought
  misc_feature: MA Experiment ID: 20001908 Result: Down-regulated in Transcription
  misc_feature: MA Experiment 20001908 PARAMETER Experiment Name: At_Drought_Reproduction_P Parameter: Age (day) Value: 40
  misc_feature: MA Experiment 20001908 PARAMETER Experiment Name: At_Drought_Reproduction_P Parameter: Organism Value: A. thaliana
  misc_feature: MA Experiment 20001908 PARAMETER Experiment Name: At_Drought_Reproduction_P Parameter: Plant Line Value: WS
  misc_feature: MA Experiment 20001908 PARAMETER Experiment Name: At_Drought_Reproduction_P Parameter: Timepoint (day) Value: 10
  misc_feature: MA Experiment 20001908 PARAMETER Experiment Name: At_Drought_Reproduction_P Parameter: Tissue Value: Siliques
  misc_feature: MA Experiment 20001908 PARAMETER Experiment Name: At_Drought_Reproduction_P Parameter: Treatment Value: Drought vs. No Drought

SEQ ID NO: 32599 - protein, 250 aa, Arabidopsis thaliana; identical to SEQ ID NO: 29009
  peptide (1)..(250): Ceres Seq. ID no. 12395754
  misc_feature (1)..(247): Pfam Name: Serine carboxypeptidase Pfam Description: Serine carboxypeptidase
  misc_feature (1)..(250): Homolog of NCBI NO: 8777303 NR Description: serine carboxypeptidase [Arabidopsis thaliana]
  misc_feature (1)..(250): Homolog of NCBI NO: 30681910 NR Description: serine carboxypeptidase -related [Arabidopsis
  misc_feature (1)..(250): Homolog of NCBI NO: 15219433 NR Description: putative serine carboxypeptidase; protein id:
  misc_feature (1)..(250): Homolog of NCBI NO: 18400137 NR Description: putative serine carboxypeptidase I; protein id:
  misc_feature (1)..(250): Homolog of NCBI NO: 15227772 NR Description: putative serine carboxypeptidase I
  misc_feature (1)..(250): Homolog of NCBI NO: 15227773 NR Description: putative serine carboxypeptidase I; protein id:
  misc_feature (1)..(250): Homolog of NCBI NO: 15228300 NR Description: putative glucose acyltransferase; protein id:
  misc_feature (1)..(250): Homolog of NCBI NO: 15227765 NR Description: putative serine carboxypeptidase I; protein id:
  misc_feature (1)..(250): Homolog of NCBI NO: 15227769 NR Description: putative serine carboxypeptidase II
  misc_feature (1)..(226): Homolog of NCBI NO: 24417488 NR Description: unknown [Arabidopsis thaliana]

SEQ ID NO: 32600 - protein, 206 aa, Arabidopsis thaliana; identical to SEQ ID NO: 29010
  peptide (1)..(206): Ceres Seq. ID no. 12395755
  misc_feature (1)..(203): Pfam Name: Serine carboxypeptidase Pfam Description: Serine carboxypeptidase
  misc_feature (1)..(206): Homolog of NCBI NO: 8777303 NR Description: serine carboxypeptidase [Arabidopsis thaliana]
  misc_feature (1)..(206): Homolog of NCBI NO: 30681910 NR Description: serine carboxypeptidase -related [Arabidopsis
  misc_feature (1)..(206): Homolog of NCBI NO: 15219433 NR Description: putative serine carboxypeptidase; protein id:
  misc_feature (1)..(206): Homolog of NCBI NO: 18400137 NR Description: putative serine carboxypeptidase I; protein id:
  misc_feature (1)..(206): Homolog of NCBI NO: 15227772 NR Description: putative serine carboxypeptidase I
  misc_feature (1)..(206): Homolog of NCBI NO: 15227773 NR Description: putative serine carboxypeptidase I; protein id:
  misc_feature (1)..(206): Homolog of NCBI NO: 15228300 NR Description: putative glucose acyltransferase; protein id:
  misc_feature (1)..(206): Homolog of NCBI NO: 15227765 NR Description: putative serine carboxypeptidase I; protein id:
  misc_feature (1)..(206): Homolog of NCBI NO: 15227769 NR Description: putative serine carboxypeptidase II
  misc_feature (1)..(182): Homolog of NCBI NO: 24417488 NR Description: unknown [Arabidopsis thaliana]

SEQ ID NO: 32601 - protein, 195 aa, Arabidopsis thaliana; identical to SEQ ID NO: 29011
  peptide (1)..(195): Ceres Seq. ID no. 12395756
  misc_feature (1)..(192): Pfam Name: Serine carboxypeptidase Pfam Description: Serine carboxypeptidase
  misc_feature (1)..(195): Homolog of NCBI NO: 8777303 NR Description: serine carboxypeptidase [Arabidopsis thaliana]
  misc_feature (1)..(195): Homolog of NCBI NO: 30681910 NR Description: serine carboxypeptidase -related [Arabidopsis
  misc_feature (1)..(195): Homolog of NCBI NO: 15219433 NR Description: putative serine carboxypeptidase; protein id:
  misc_feature (1)..(195): Homolog of NCBI NO: 18400137 NR Description: putative serine carboxypeptidase I; protein id:
  misc_feature (1)..(195): Homolog of NCBI NO: 15227772 NR Description: putative serine carboxypeptidase I
  misc_feature (1)..(195): Homolog of NCBI NO: 15227773 NR Description: putative serine carboxypeptidase I; protein id:
  misc_feature (1)..(195): Homolog of NCBI NO: 15228300 NR Description: putative glucose acyltransferase; protein id:
  misc_feature (1)..(195): Homolog of NCBI NO: 15227765 NR Description: putative serine carboxypeptidase I; protein id:
  misc_feature (1)..(195): Homolog of NCBI NO: 15227769 NR Description: putative serine carboxypeptidase II
  misc_feature (1)..(171): Homolog of NCBI NO: 24417488 NR Description: unknown [Arabidopsis thaliana]

SEQ ID NO: 32602 - DNA, 881 bp, Arabidopsis thaliana; identical to SEQ ID NO: 29012
  misc_feature (1)..(881): Ceres Seq. ID no. 12334398
  misc_feature: MA Experiment ID: 108434 Result: Up-regulated in Transcription
  misc_feature: MA Experiment 108434 PARAMETER Experiment Name: At_Root_Tips_cDNA_P Parameter: Tissue Value: Root Tips
  misc_feature: MA Experiment ID: 108462 Result: Down-regulated in Transcription
  misc_feature: MA Experiment 108462 PARAMETER Experiment Name: At_Germinating_Seeds_cDNA_P Parameter: Age (day) Value: 2 vs. 0
  misc_feature: MA Experiment 108462 PARAMETER Experiment Name: At_Germinating_Seeds_cDNA_P Parameter: Tissue Value: Germinating Seeds
  misc_feature: MA Experiment ID: 108463 Result: Down-regulated in Transcription
  misc_feature: MA Experiment 108463 PARAMETER Experiment Name: At_Germinating_Seeds_cDNA_P Parameter: Age (day) Value: 3 vs. 0
  misc_feature: MA Experiment 108463 PARAMETER Experiment Name: At_Germinating_Seeds_cDNA_P Parameter: Tissue Value: Germinating Seeds
  misc_feature: MA Experiment ID: 108464 Result: Down-regulated in Transcription
  misc_feature: MA Experiment 108464 PARAMETER Experiment Name: At_Germinating_Seeds_cDNA_P Parameter: Age (day) Value: 4 vs. 0
  misc_feature: MA Experiment 108464 PARAMETER Experiment Name: At_Germinating_Seeds_cDNA_P Parameter: Tissue Value: Germinating Seeds
  misc_feature: MA Experiment ID: 108573 Result: Down-regulated in Transcription
  misc_feature: MA Experiment 108573 PARAMETER Experiment Name: At_Drought_cDNA_P Parameter: Timepoint (hr) Value: 6
  misc_feature: MA Experiment 108573 PARAMETER Experiment Name: At_Drought_cDNA_P Parameter: Tissue Value: Aerial
  misc_feature: MA Experiment 108573 PARAMETER Experiment Name: At_Drought_cDNA_P Parameter: Treatment Value: Drought vs. No Drought
  misc_feature: MA Experiment ID: 20000113 Result: Up-regulated in Transcription
  misc_feature: MA Experiment 20000113 PARAMETER Experiment Name: At_42deg_Heat_cDNA_P Parameter: Temperature (deg C) Value: 42 vs. 22
  misc_feature: MA Experiment 20000113 PARAMETER Experiment Name: At_42deg_Heat_cDNA_P Parameter: Timepoint (hr) Value: 8
  misc_feature: MA Experiment 20000113 PARAMETER Experiment Name: At_42deg_Heat_cDNA_P Parameter: Tissue Value: Aerial
  misc_feature: MA Experiment ID: 20000234 Result: Up-regulated in Transcription
  misc_feature: MA Experiment 20000234 PARAMETER Experiment Name: At_Siliques_P Parameter: Age (day) Value: 21
  misc_feature: MA Experiment 20000234 PARAMETER Experiment Name: At_Siliques_P Parameter: Organism Value: A. thaliana
  misc_feature: MA Experiment 20000234 PARAMETER Experiment Name: At_Siliques_P Parameter: Plant Line Value: WS
  misc_feature: MA Experiment 20000234 PARAMETER Experiment Name: At_Siliques_P Parameter: Tissue Value: Less Than 5mm Siliques vs. Whole Plant
  misc_feature: MA Experiment ID: 20000794 Result: Down-regulated in Transcription
  misc_feature: MA Experiment 20000794 PARAMETER Experiment Name: At_Petals_P Parameter: Age (day) Value: 23-25 days
  misc_feature: MA Experiment 20000794 PARAMETER Experiment Name: At_Petals_P Parameter: Plant Line Value: WS
  misc_feature: MA Experiment 20000794 PARAMETER Experiment Name: At_Petals_P Parameter: Tissue Value: Petals vs. Whole plant
  misc_feature: MA Experiment ID: 20001556 Result: Up-regulated in Transcription
  misc_feature: MA Experiment 20001556 PARAMETER Experiment Name: At_Drought_Soil_Dry_P Parameter: Age (day) Value: 26
  misc_feature: MA Experiment 20001556 PARAMETER Experiment Name: At_Drought_Soil_Dry_P Parameter: Organism Value: A. thaliana
  misc_feature: MA Experiment 20001556 PARAMETER Experiment Name: At_Drought_Soil_Dry_P Parameter: Plant Line Value: WS
  misc_feature: MA Experiment 20001556 PARAMETER Experiment Name: At_Drought_Soil_Dry_P Parameter: Post Timepoint (hr) Value: None
  misc_feature: MA Experiment 20001556 PARAMETER Experiment Name: At_Drought_Soil_Dry_P Parameter: Post-Treatment Value: None
  misc_feature: MA Experiment 20001556 PARAMETER Experiment Name: At_Drought_Soil_Dry_P Parameter: Timepoint (day) Value: 12
  misc_feature: MA Experiment 20001556 PARAMETER Experiment Name: At_Drought_Soil_Dry_P Parameter: Treatment Value: Drought vs. No Drought
  misc_feature: MA Experiment ID: 20001558 Result: Up-regulated in Transcription
  misc_feature: MA Experiment 20001558 PARAMETER Experiment Name: At_Drought_Soil_Dry_P Parameter: Age (day) Value: 27
  misc_feature: MA Experiment 20001558 PARAMETER Experiment Name: At_Drought_Soil_Dry_P Parameter: Organism Value: A. thaliana
  misc_feature: MA Experiment 20001558 PARAMETER Experiment Name: At_Drought_Soil_Dry_P Parameter: Plant Line Value: WS
  misc_feature: MA Experiment 20001558 PARAMETER Experiment Name: At_Drought_Soil_Dry_P Parameter: Post Timepoint (hr) Value: 6
  misc_feature: MA Experiment 20001558 PARAMETER Experiment Name: At_Drought_Soil_Dry_P Parameter: Post-Treatment Value: Re-Water vs. No Drought
  misc_feature: MA Experiment 20001558 PARAMETER Experiment Name: At_Drought_Soil_Dry_P Parameter: Timepoint (day) Value: 13
  misc_feature: MA Experiment 20001558 PARAMETER Experiment Name: At_Drought_Soil_Dry_P Parameter: Treatment Value: Drought vs. No Drought
  misc_feature: MA Experiment ID: 20001560 Result: Up-regulated in Transcription
  misc_feature: MA Experiment 20001560 PARAMETER Experiment Name: At_Drought_Soil_Dry_P Parameter: Age (day) Value: 28
  misc_feature: MA Experiment 20001560 PARAMETER Experiment Name: At_Drought_Soil_Dry_P Parameter: Organism Value: A. thaliana
  misc_feature: MA Experiment 20001560 PARAMETER Experiment Name: At_Drought_Soil_Dry_P Parameter: Plant Line Value: WS
  misc_feature: MA Experiment 20001560 PARAMETER Experiment Name: At_Drought_Soil_Dry_P Parameter: Post Timepoint (hr) Value: None
  misc_feature: MA Experiment 20001560 PARAMETER Experiment Name: At_Drought_Soil_Dry_P Parameter: Post-Treatment Value: None
  misc_feature: MA Experiment 20001560 PARAMETER Experiment Name: At_Drought_Soil_Dry_P Parameter: Timepoint (day) Value: 14
  misc_feature: MA Experiment 20001560 PARAMETER Experiment Name: At_Drought_Soil_Dry_P Parameter: Treatment Value: Drought vs. No Drought
  misc_feature: MA Experiment ID: 20001757 Result: Up-regulated in Transcription
  misc_feature: MA Experiment 20001757 PARAMETER Experiment Name: At_50mM_NH4NO3_L-to-H_P Parameter: Timepoint (hr) Value: 6
  misc_feature: MA Experiment 20001757 PARAMETER Experiment Name: At_50mM_NH4NO3_L-to-H_P Parameter: Tissue Value: Leaf
  misc_feature: MA Experiment 20001757 PARAMETER Experiment Name: At_50mM_NH4NO3_L-to-H_P Parameter: Treatment Value: 50mM NH4NO3 vs 100mM Mannitol

SEQ ID NO: 32603 - protein, 192 aa, Arabidopsis thaliana; identical to SEQ ID NO: 29013
  peptide (1)..(192): Ceres Seq. ID no. 12334399
  misc_feature (6)..(191): Homolog of NCBI NO: 32450084 NR Description: Unknown (protein for MGC:64299) [Xenopus laevis]
  misc_feature (6)..(191): Homolog of NCBI NO: 28630356 NR Description: ribosomal protein L18 [Petromyzon marinus]
  misc_feature (6)..(168): Homolog of NCBI NO: 28798549 NR Description: 60S ribosomal protein [Medicago sativa]
  misc_feature (7)..(192): Homolog of NCBI NO: 7440855 NR Description: ribosomal protein L18, cytosolic - Arabidopsis
  misc_feature (9)..(192): Homolog of NCBI NO: 6094021 NR Description: 60S RIBOSOMAL PROTEIN L18
  misc_feature (6)..(192): Homolog of NCBI NO: 34393858 NR Description: putative cytoplasmic ribosomal protein L18
  misc_feature (6)..(192): Homolog of NCBI NO: 34897628 NR Description: cytoplasmic ribosomal protein L18 [Oryza sativa]
  misc_feature (6)..(192): Homolog of NCBI NO: 606970 NR Description: cytoplasmic ribosomal protein L18
  misc_feature (6)..(192): Homolog of NCBI NO: 15230011 NR Description: putative 60S ribosomal protein L18
  misc_feature (6)..(192): Homolog of NCBI NO: 15241061 NR Description: 60S ribosomal protein - like

SEQ ID NO: 32604 - protein, 187 aa, Arabidopsis thaliana [sequence omitted]

SEQ ID NO: 32605 - protein, 134 aa, Arabidopsis thaliana; identical to SEQ ID NO: 29015
  peptide (1)..(134): Ceres Seq. ID no. 12334401
  misc_feature (1)..(133): Homolog of NCBI NO: 32450084 NR Description: Unknown (protein for MGC:64299) [Xenopus laevis]
  misc_feature (1)..(133): Homolog of NCBI NO: 28630356 NR Description: ribosomal protein L18 [Petromyzon marinus]
  misc_feature (1)..(110): Homolog of NCBI NO: 28798549 NR Description: 60S ribosomal protein [Medicago sativa]
  misc_feature (1)..(134): Homolog of NCBI NO: 7440855 NR Description: ribosomal protein L18, cytosolic - Arabidopsis
  misc_feature (1)..(134): Homolog of NCBI NO: 6094021 NR Description: 60S RIBOSOMAL PROTEIN L18
  misc_feature (1)..(134): Homolog of NCBI NO: 34393858 NR Description: putative cytoplasmic ribosomal protein L18
  misc_feature (1)..(134): Homolog of NCBI NO: 34897628 NR Description: cytoplasmic ribosomal protein L18 [Oryza sativa]
  misc_feature (1)..(134): Homolog of NCBI NO: 606970 NR Description: cytoplasmic ribosomal protein L18
  misc_feature (1)..(134): Homolog of NCBI NO: 15230011 NR Description: putative 60S ribosomal protein L18
  misc_feature (1)..(134): Homolog of NCBI NO: 15241061 NR Description: 60S ribosomal protein - like

SEQ ID NO: 32606 - DNA, 1561 bp, Arabidopsis thaliana; identical to SEQ ID NO: 29016
  misc_feature (1)..(1561): Ceres Seq. ID no. 12371421
  misc_feature: MA Experiment ID: 108461 Result: Up-regulated in Transcription
  misc_feature: MA Experiment 108461 PARAMETER Experiment Name: At_Germinating_Seeds_cDNA_P Parameter: Age (day) Value: 1 vs. 0
  misc_feature: MA Experiment 108461 PARAMETER Experiment Name: At_Germinating_Seeds_cDNA_P Parameter: Tissue Value: Germinating Seeds
  misc_feature: MA Experiment ID: 108464 Result: Up-regulated in Transcription
  misc_feature: MA Experiment 108464 PARAMETER Experiment Name: At_Germinating_Seeds_cDNA_P Parameter: Age (day) Value: 4 vs. 0
  misc_feature: MA Experiment 108464 PARAMETER Experiment Name: At_Germinating_Seeds_cDNA_P Parameter: Tissue Value: Germinating Seeds
  misc_feature: MA Experiment ID: 108594 Result: Up-regulated in Transcription
  misc_feature: MA Experiment 108594 PARAMETER Experiment Name: At_Ler-rhl_Root_cDNA_P Parameter: Plant Line Value: null
  misc_feature: MA Experiment ID: 20000180 Result: Up-regulated in Transcription
  misc_feature: MA Experiment 20000180 PARAMETER Experiment Name: At_Germinating_Seeds_P Parameter: Age (hr) Value: 24 vs. 0
  misc_feature: MA Experiment 20000180 PARAMETER Experiment Name: At_Germinating_Seeds_P Parameter: Tissue Value: Germinating Seeds
  misc_feature: MA Experiment ID: 20000185 Result: Up-regulated in Transcription
  misc_feature: MA Experiment 20000185 PARAMETER Experiment Name: At_Roots__P Parameter: Age (day) Value: 7 vs. 21
  misc_feature: MA Experiment 20000185 PARAMETER Experiment Name: At_Roots__P Parameter: Organism Value: A. thaliana
  misc_feature: MA Experiment 20000185 PARAMETER Experiment Name: At_Roots__P Parameter: Tissue Value: Roots vs. Whole Plant
  misc_feature: MA Experiment ID: 20000269 Result: Down-regulated in Transcription
  misc_feature: MA Experiment 20000269 PARAMETER Experiment Name: At_1mM_KNO3_L-vs-H_Roots_P Parameter: Age (day) Value: 7,10,12
  misc_feature: MA Experiment 20000269 PARAMETER Experiment Name: At_1mM_KNO3_L-vs-H_Roots_P Parameter: Organism Value: A. thaliana
  misc_feature: MA Experiment 20000269 PARAMETER Experiment Name: At_1mM_KNO3_L-vs-H_Roots_P Parameter: Plant Line Value: WS
  misc_feature: MA Experiment 20000269 PARAMETER Experiment Name: At_1mM_KNO3_L-vs-H_Roots_P Parameter: Timepoint (day) Value: 7,10,12
  misc_feature: MA Experiment 20000269 PARAMETER Experiment Name: At_1mM_KNO3_L-vs-H_Roots_P Parameter: Tissue Value: Roots
  misc_feature: MA Experiment 20000269 PARAMETER Experiment Name: At_1mM_KNO3_L-vs-H_Roots_P Parameter: Treatment Value: 1mM KNO3 vs. 50mM KNO3
  misc_feature: MA Experiment ID: 20000439 Result: Up-regulated in Transcription
  misc_feature: MA Experiment 20000439 PARAMETER Experiment Name: At_Roots__P Parameter: Age (day) Value: 14 vs. 21
  misc_feature: MA Experiment 20000439 PARAMETER Experiment Name: At_Roots__P Parameter: Organism Value: A. thaliana
  misc_feature: MA Experiment 20000439 PARAMETER Experiment Name: At_Roots__P Parameter: Tissue Value: Roots vs. Whole Plant
  misc_feature: MA Experiment ID: 20000495 Result: Down-regulated in Transcription
  misc_feature: MA Experiment 20000495 PARAMETER Experiment Name: At_Guard_Cells_P Parameter: Harvest Date Value: 8/2/2002
  misc_feature: MA Experiment 20000495 PARAMETER Experiment Name: At_Guard_Cells_P Parameter: Organism Value: A. thaliana
  misc_feature: MA Experiment 20000495 PARAMETER Experiment Name: At_Guard_Cells_P Parameter: Tissue Value: Guard Cells vs. Leaves

SEQ ID NO: 32607 - protein, 384 aa, Arabidopsis thaliana; identical to SEQ ID NO: 29017
  peptide (1)..(384): Ceres Seq. ID no. 12371422
  misc_feature (136)..(183): Pfam Name: Myb-like DNA-binding domain Pfam Description: Myb-like DNA-binding domain
  misc_feature (60)..(206): Homolog of NCBI NO: 15238083 NR Description: Myb-related transcription activator-like
  misc_feature (240)..(384): Homolog of NCBI NO: 15238083 NR Description: Myb-related transcription activator-like
  misc_feature (1)..(22): Homolog of NCBI NO: 1076660 NR Description: D13F(MYBST1) protein - potato
  misc_feature (47)..(384): Homolog of NCBI NO: 1076660 NR Description: D13F(MYBST1) protein - potato
  misc_feature (1)..(22): Homolog of NCBI NO: 7705206 NR Description: MybSt1 [Solanum tuberosum]
  misc_feature (47)..(384): Homolog of NCBI NO: 7705206 NR Description: MybSt1 [Solanum tuberosum]
  misc_feature (1)..(31): Homolog of NCBI NO: 34906364 NR Description: unnamed protein product [Oryza sativa (japonica
  misc_feature (35)..(384): Homolog of NCBI NO: 34906364 NR Description: unnamed protein product [Oryza sativa (japonica
  misc_feature (20)..(384): Homolog of NCBI NO: 2062176 NR Description: Myb-related transcription activator (MybSt1)
  misc_feature (1)..(384): Homolog of NCBI NO: 15228185 NR Description: putative MYB family transcription factor; protein

SEQ ID NO: 32608 - protein, 319 aa, Arabidopsis thaliana; identical to SEQ ID NO: 29018
  peptide (1)..(319): Ceres Seq. ID no. 12371423
  misc_feature (71)..(118): Pfam Name: Myb-like DNA-binding domain Pfam Description: Myb-like DNA-binding domain
  misc_feature (49)..(301): Homolog of NCBI NO: 28848628 NR Description: ZmMybst1 [Zea mays]
  misc_feature (48)..(301): Homolog of NCBI NO: 37536856 NR Description: putative Myb-related protein
  misc_feature (48)..(301): Homolog of NCBI NO: 24850307 NR Description: transcription factor MYBS3
  misc_feature (1)..(141): Homolog of NCBI NO: 15238083 NR Description: Myb-related transcription activator-like
  misc_feature (175)..(319): Homolog of NCBI NO: 15238083 NR Description: Myb-related transcription activator-like
  misc_feature (1)..(319): Homolog of NCBI NO: 1076660 NR Description: D13F(MYBST1) protein - potato
  misc_feature (1)..(319): Homolog of NCBI NO: 7705206 NR Description: MybSt1 [Solanum tuberosum]
  misc_feature (1)..(319): Homolog of NCBI NO: 34906364 NR Description: unnamed protein product [Oryza sativa (japonica
  misc_feature (1)..(319): Homolog of NCBI NO: 2062176 NR Description: Myb-related transcription activator (MybSt1)
  misc_feature (1)..(319): Homolog of NCBI NO: 15228185 NR Description: putative MYB family transcription factor; protein

SEQ ID NO: 32609 - DNA, 1219 bp, Arabidopsis thaliana; identical to SEQ ID NO: 29019
  misc_feature (1)..(1219): Ceres Seq. ID no. 12334410
  misc_feature: MA Experiment ID: 108595 Result: Down-regulated in Transcription
  misc_feature: MA Experiment 108595 PARAMETER Experiment Name: At_Ler-pi_Ovule_cDNA_P Parameter: Plant Line Value: null
  misc_feature: MA Experiment ID: 20001451 Result: Down-regulated in Transcription
  misc_feature: MA Experiment 20001451 PARAMETER Experiment Name: At_Far-red-induction_P Parameter: Age (day) Value: 7
  misc_feature: MA Experiment 20001451 PARAMETER Experiment Name: At_Far-red-induction_P Parameter: Light Value: Far-red vs. White
  misc_feature: MA Experiment 20001451 PARAMETER Experiment Name: At_Far-red-induction_P Parameter: Organism Value: A. thaliana
  misc_feature: MA Experiment 20001451 PARAMETER Experiment Name: At_Far-red-induction_P Parameter: Plant Line Value: Columbia
  misc_feature: MA Experiment 20001451 PARAMETER Experiment Name: At_Far-red-induction_P Parameter: Timepoint (hr) Value: 24
  misc_feature: MA Experiment 20001451 PARAMETER Experiment Name: At_Far-red-induction_P Parameter: Tissue Value: Whole Plant

SEQ ID NO: 32610 - protein, 288 aa, Arabidopsis thaliana; identical to SEQ ID NO: 29020
  peptide (1)..(288): Ceres Seq. ID no. 12334411
  misc_feature (156)..(288): Homolog of NCBI NO: 17232156 NR Description: hypothetical protein [Nostoc sp. PCC 7120]
  misc_feature (138)..(288): Homolog of NCBI NO: 37522470 NR Description: hypothetical protein gll2901 [Gloeobacter
  misc_feature (152)..(288): Homolog of NCBI NO: 23043068 NR Description: hypothetical protein [Trichodesmium erythraeum
  misc_feature (121)..(288): Homolog of NCBI NO: 16331173 NR Description: unknown protein [Synechocystis sp. PCC 6803]
  misc_feature (134)..(288): Homolog of NCBI NO: 13812204 NR Description: hypothetical protein [Guillardia theta]
  misc_feature (86)..(224): Homolog of NCBI NO: 34894968 NR Description: B1088D01.6 [Oryza sativa (japonica
  misc_feature (1)..(264): Homolog of NCBI NO: 7486491 NR Description: hypothetical protein At2g43940 [imported] -
  misc_feature (1)..(288): Homolog of NCBI NO: 30689549 NR Description: predicted protein [Arabidopsis thaliana]
  misc_feature (1)..(288): Homolog of NCBI NO: 15232185 NR Description: putative protein
  misc_feature (1)..(288): Homolog of NCBI NO: 21537298 NR Description: unknown [Arabidopsis thaliana]

SEQ ID NO: 32611 - protein, 222 aa, Arabidopsis thaliana; identical to SEQ ID NO: 29021
  peptide (1)..(222): Ceres Seq. ID no. 12334412
  misc_feature (90)..(222): Homolog of NCBI NO: 17232156 NR Description: hypothetical protein [Nostoc sp. PCC 7120]
  misc_feature (72)..(222): Homolog of NCBI NO: 37522470 NR Description: hypothetical protein gll2901 [Gloeobacter
  misc_feature (86)..(222): Homolog of NCBI NO: 23043068 NR Description: hypothetical protein [Trichodesmium erythraeum
  misc_feature (55)..(222): Homolog of NCBI NO: 16331173 NR Description: unknown protein [Synechocystis sp. PCC 6803]
  misc_feature (68)..(222): Homolog of NCBI NO: 13812204 NR Description: hypothetical protein [Guillardia theta]
  misc_feature (20)..(158): Homolog of NCBI NO: 34894968 NR Description: B1088D01.6 [Oryza sativa (japonica
  misc_feature (1)..(198): Homolog of NCBI NO: 7486491 NR Description: hypothetical protein At2g43940 [imported] -
  misc_feature (1)..(222): Homolog of NCBI NO: 30689549 NR Description: predicted protein [Arabidopsis thaliana]
  misc_feature (1)..(222): Homolog of NCBI NO: 15232185 NR Description: putative protein
  misc_feature (1)..(222): Homolog of NCBI NO: 21537298 NR Description: unknown [Arabidopsis thaliana]

SEQ ID NO: 32612 - DNA, 1518 bp, Arabidopsis thaliana; identical to SEQ ID NO: 29022
  misc_feature (1)..(1518): Ceres Seq. ID no. 12371601
  misc_feature: MA Experiment ID: 20000030 Result: Down-regulated in Transcription
  misc_feature: MA Experiment 20000030 PARAMETER Experiment Name: At_CS6630_Roots_cDNA_P Parameter: Plant Line Value: CS6630 vs. WS
  misc_feature: MA Experiment 20000030 PARAMETER Experiment Name: At_CS6630_Roots_cDNA_P Parameter: Tissue Value: Roots
  misc_feature: MA Experiment ID: 20000111 Result: Down-regulated in Transcription
  misc_feature: MA Experiment 20000111 PARAMETER Experiment Name: At_42deg_Heat_cDNA_P Parameter: Temperature (deg C) Value: 42 vs. 22
  misc_feature: MA Experiment 20000111 PARAMETER Experiment Name: At_42deg_Heat_cDNA_P Parameter: Timepoint (hr) Value: 6
  misc_feature: MA Experiment 20000111 PARAMETER Experiment Name: At_42deg_Heat_cDNA_P Parameter: Tissue Value: Aerial
  misc_feature: MA Experiment ID: 20000113 Result: Down-regulated in Transcription
  misc_feature: MA Experiment 20000113 PARAMETER Experiment Name: At_42deg_Heat_cDNA_P Parameter: Temperature (deg C) Value: 42 vs. 22
  misc_feature: MA Experiment 20000113 PARAMETER Experiment Name: At_42deg_Heat_cDNA_P Parameter: Timepoint (hr) Value: 8
  misc_feature: MA Experiment 20000113 PARAMETER Experiment Name: At_42deg_Heat_cDNA_P Parameter: Tissue Value: Aerial
  misc_feature: MA Experiment ID: 20000171 Result: Down-regulated in Transcription
  misc_feature: MA Experiment 20000171 PARAMETER Experiment Name: At_42deg_Heat_P Parameter: Age (day) Value: 14
  misc_feature: MA Experiment 20000171 PARAMETER Experiment Name: At_42deg_Heat_P Parameter: Organism Value: A. thaliana
  misc_feature: MA Experiment 20000171 PARAMETER Experiment Name: At_42deg_Heat_P Parameter: Plant Line Value: WS
  misc_feature: MA Experiment 20000171 PARAMETER Experiment Name: At_42deg_Heat_P Parameter: Temperature (deg C) Value: 42 vs. 22
  misc_feature: MA Experiment 20000171 PARAMETER Experiment Name: At_42deg_Heat_P Parameter: Timepoint (hr) Value: 1
  misc_feature: MA Experiment 20000171 PARAMETER Experiment Name: At_42deg_Heat_P Parameter: Tissue Value: Aerial
  misc_feature: MA Experiment ID: 20000173 Result: Down-regulated in Transcription
  misc_feature: MA Experiment 20000173 PARAMETER Experiment Name: At_42deg_Heat_P Parameter: Age (day) Value: 14
  misc_feature: MA Experiment 20000173 PARAMETER Experiment Name: At_42deg_Heat_P Parameter: Organism Value: A. thaliana
  misc_feature: MA Experiment 20000173 PARAMETER Experiment Name: At_42deg_Heat_P Parameter: Plant Line Value: WS
  misc_feature: MA Experiment 20000173 PARAMETER Experiment Name: At_42deg_Heat_P Parameter: Temperature (deg C) Value: 42 vs. 22
  misc_feature: MA Experiment 20000173 PARAMETER Experiment Name: At_42deg_Heat_P Parameter: Timepoint (hr) Value: 6
  misc_feature: MA Experiment 20000173 PARAMETER Experiment Name: At_42deg_Heat_P Parameter: Tissue Value: Aerial
  misc_feature: MA Experiment ID: 20000224 Result: Down-regulated in Transcription

SEQ ID NO: 32613 - protein, 454 aa, Arabidopsis thaliana; identical to SEQ ID NO: 29023
  peptide (1)..(454): Ceres Seq. ID no. 12371602
  misc_feature (35)..(373): Homolog of NCBI NO: 12056117 NR Description: protein disulfide isomerase [Triticum turgidum
  misc_feature (18)..(318): Homolog of NCBI NO: 17647799 NR Description: Protein disulfide isomerase CG6988-PA
  misc_feature (7)..(368): Homolog of NCBI NO: 31239469 NR Description: ENSANGP00000011666 [Anopheles gambiae]
  misc_feature (25)..(382): Homolog of NCBI NO: 11133775 NR Description: Protein disulfide isomerase precursor (PDI)
  misc_feature (18)..(318): Homolog of NCBI NO: 27819775 NR Description: RH09122p [Drosophila melanogaster]
  misc_feature (26)..(382): Homolog of NCBI NO: 15219086 NR Description: putative protein disulfide isomerase precursor
  misc_feature (26)..(382): Homolog of NCBI NO: 30687521 NR Description: protein disulfide isomerase, putative
  misc_feature (18)..(419): Homolog of NCBI NO: 38344940 NR Description: OSJNBa0084A10.16 [Oryza sativa (japonica
  misc_feature (15)..(443): Homolog of NCBI NO: 8778373 NR Description: F15O4.20 [Arabidopsis thaliana]
  misc_feature (15)..(454): Homolog of NCBI NO: 18399786 NR Description: protein disulfide isomerase, putative
  misc_feature (35)..(373): Homolog of NCBI NO: 12056117 NR Description: protein disulfide isomerase [Triticum turgidum
  misc_feature (18)..(318): Homolog of NCBI NO: 17647799 NR Description: Protein disulfide isomerase CG6988-PA
  misc_feature (7)..(368): Homolog of NCBI NO: 31239469 NR Description: ENSANGP00000011666 [Anopheles gambiae]
  misc_feature (25)..(382): Homolog of NCBI NO: 11133775 NR Description: Protein disulfide isomerase precursor (PDI)
  misc_feature (18)..(318): Homolog of NCBI NO: 27819775 NR Description: RH09122p [Drosophila melanogaster]
  misc_feature (26)..(382): Homolog of NCBI NO: 15219086 NR Description: putative protein disulfide isomerase precursor
  misc_feature (26)..(382): Homolog of NCBI NO: 30687521 NR Description: protein disulfide isomerase, putative
  misc_feature (18)..(419): Homolog of NCBI NO: 38344940 NR Description: OSJNBa0084A10.16 [Oryza sativa (japonica
  misc_feature (15)..(443): Homolog of NCBI NO: 8778373 NR Description: F15O4.20 [Arabidopsis thaliana]
  misc_feature (15)..(454): Homolog of NCBI NO: 18399786 NR Description: protein disulfide isomerase, putative

SEQ ID NO: 32614 - protein, 440 aa, Arabidopsis thaliana; identical to SEQ ID NO: 29024
  peptide (1)..(440): Ceres Seq. ID no. 12371603
  misc_feature (21)..(359): Homolog of NCBI NO: 12056117 NR Description: protein disulfide isomerase [Triticum turgidum
  misc_feature (4)..(304): Homolog of NCBI NO: 17647799 NR Description: Protein disulfide isomerase CG6988-PA
  misc_feature (1)..(354): Homolog of NCBI NO: 31239469 NR Description: ENSANGP00000011666 [Anopheles gambiae]
  misc_feature (11)..(368): Homolog of NCBI NO: 11133775 NR Description: Protein disulfide isomerase precursor (PDI)
  misc_feature (4)..(304): Homolog of NCBI NO: 27819775 NR Description: RH09122p [Drosophila melanogaster]
  misc_feature (12)..(368): Homolog of NCBI NO: 15219086 NR Description: putative protein disulfide isomerase precursor
  misc_feature (12)..(368): Homolog of NCBI NO: 30687521 NR Description: protein disulfide isomerase, putative
  misc_feature (4)..(405): Homolog of NCBI NO: 38344940 NR Description: OSJNBa0084A10.16 [Oryza sativa (japonica
  misc_feature (1)..(429): Homolog of NCBI NO: 8778373 NR Description: F15O4.20 [Arabidopsis thaliana]
  misc_feature (1)..(440): Homolog of NCBI NO: 18399786 NR Description: protein disulfide isomerase, putative
  misc_feature (21)..(359): Homolog of NCBI NO: 12056117 NR Description: protein disulfide isomerase [Triticum turgidum
  misc_feature (4)..(304): Homolog of NCBI NO: 17647799 NR Description: Protein disulfide isomerase CG6988-PA
  misc_feature (1)..(354): Homolog of NCBI NO: 31239469 NR Description: ENSANGP00000011666 [Anopheles gambiae]
  misc_feature (11)..(368): Homolog of NCBI NO: 11133775 NR Description: Protein disulfide isomerase precursor (PDI)
  misc_feature (4)..(304): Homolog of NCBI NO: 27819775 NR Description: RH09122p [Drosophila melanogaster]
  misc_feature (12)..(368): Homolog of NCBI NO: 15219086 NR Description: putative protein disulfide isomerase precursor
  misc_feature (12)..(368): Homolog of NCBI NO: 30687521 NR Description: protein disulfide isomerase, putative
  misc_feature (4)..(405): Homolog of NCBI NO: 38344940 NR Description: OSJNBa0084A10.16 [Oryza sativa (japonica
  misc_feature (1)..(429): Homolog of NCBI NO: 8778373 NR Description: F15O4.20 [Arabidopsis thaliana]
  misc_feature (1)..(440): Homolog of NCBI NO: 18399786 NR Description: protein disulfide isomerase, putative

SEQ ID NO: 32615 - protein, 330 aa, Arabidopsis thaliana; identical to SEQ ID NO: 29025
  peptide (1)..(330): Ceres Seq. ID no. 12371604
  misc_feature (1)..(249): Homolog of NCBI NO: 12056117 NR Description: protein disulfide isomerase [Triticum turgidum
  misc_feature (1)..(194): Homolog of NCBI NO: 17647799 NR Description: Protein disulfide isomerase CG6988-PA
  misc_feature (1)..(244): Homolog of NCBI NO: 31239469 NR Description: ENSANGP00000011666 [Anopheles gambiae]
  misc_feature (1)..(258): Homolog of NCBI NO: 11133775 NR Description: Protein disulfide isomerase precursor (PDI)
  misc_feature (1)..(194): Homolog of NCBI NO: 27819775 NR Description: RH09122p [Drosophila melanogaster]
  misc_feature (1)..(258): Homolog of NCBI NO: 15219086 NR Description: putative protein disulfide isomerase precursor
  misc_feature (1)..(258): Homolog of NCBI NO: 30687521 NR Description: protein disulfide isomerase, putative
  misc_feature (1)..(295): Homolog of NCBI NO: 38344940 NR Description: OSJNBa0084A10.16 [Oryza sativa (japonica
  misc_feature (1)..(319): Homolog of NCBI NO: 8778373 NR Description: F15O4.20 [Arabidopsis thaliana]
  misc_feature (1)..(330): Homolog of NCBI NO: 18399786 NR Description: protein disulfide isomerase, putative
  misc_feature (1)..(249): Homolog of NCBI NO: 12056117 NR Description: protein disulfide isomerase [Triticum turgidum
  misc_feature (1)..(194): Homolog of NCBI NO: 17647799 NR Description: Protein disulfide isomerase CG6988-PA
  misc_feature (1)..(244): Homolog of NCBI NO: 31239469 NR Description: ENSANGP00000011666 [Anopheles gambiae]
  misc_feature (1)..(258): Homolog of NCBI NO: 11133775 NR Description: Protein disulfide isomerase precursor (PDI)
  misc_feature (1)..(194): Homolog of NCBI NO: 27819775 NR Description: RH09122p [Drosophila melanogaster]
  misc_feature (1)..(258): Homolog of NCBI NO: 15219086 NR Description: putative protein disulfide isomerase precursor
  misc_feature (1)..(258): Homolog of NCBI NO: 30687521 NR Description: protein disulfide isomerase, putative
  misc_feature (1)..(295): Homolog of NCBI NO: 38344940 NR Description: OSJNBa0084A10.16 [Oryza sativa (japonica
  misc_feature (1)..(319): Homolog of NCBI NO: 8778373 NR Description: F15O4.20 [Arabidopsis thaliana]
  misc_feature (1)..(330): Homolog of NCBI NO: 18399786 NR Description: protein disulfide isomerase, putative

SEQ ID NO: 32616 - DNA, 1429 bp, Arabidopsis thaliana; identical to SEQ ID NO: 26379
  misc_feature (1)..(1429): Ceres Seq. ID no. 13491286
  misc_feature: MA Experiment ID: 108594 Result: Down-regulated in Transcription
  misc_feature: MA Experiment 108594 PARAMETER Experiment Name: At_Ler-rhl_Root_cDNA_P Parameter: Plant Line Value: null
  misc_feature: MA Experiment ID: 108595 Result: Down-regulated in Transcription
  misc_feature: MA Experiment 108595 PARAMETER Experiment Name: At_Ler-pi_Ovule_cDNA_P Parameter: Plant Line Value: null
  misc_feature: MA Experiment ID: 20000180 Result: Up-regulated in Transcription
  misc_feature: MA Experiment 20000180 PARAMETER Experiment Name: At_Germinating_Seeds_P Parameter: Age (hr) Value: 24 vs. 0
  misc_feature: MA Experiment 20000180 PARAMETER Experiment Name: At_Germinating_Seeds_P Parameter: Tissue Value: Germinating Seeds
  misc_feature: MA Experiment ID: 20000185 Result: Down-regulated in Transcription
  misc_feature: MA Experiment 20000185 PARAMETER Experiment Name: At_Roots__P Parameter: Age (day) Value: 7 vs. 21
  misc_feature: MA Experiment 20000185 PARAMETER Experiment Name: At_Roots__P Parameter: Organism Value: A. thaliana
  misc_feature: MA Experiment 20000185 PARAMETER Experiment Name: At_Roots__P Parameter: Tissue Value: Roots vs. Whole Plant
  misc_feature: MA Experiment ID: 20000439 Result: Down-regulated in Transcription
  misc_feature: MA Experiment 20000439 PARAMETER Experiment Name: At_Roots__P Parameter: Age (day) Value: 14 vs. 21
  misc_feature: MA Experiment 20000439 PARAMETER Experiment Name: At_Roots__P Parameter: Organism Value: A. thaliana
  misc_feature: MA Experiment 20000439 PARAMETER Experiment Name: At_Roots__P Parameter: Tissue Value: Roots vs. Whole Plant
  misc_feature: MA Experiment ID: 20000794 Result: Down-regulated in Transcription
  misc_feature: MA Experiment 20000794 PARAMETER Experiment Name: At_Petals_P Parameter: Age (day) Value: 23-25 days
  misc_feature: MA Experiment 20000794 PARAMETER Experiment Name: At_Petals_P Parameter: Plant Line Value: WS
  misc_feature: MA Experiment 20000794 PARAMETER Experiment Name: At_Petals_P Parameter: Tissue Value: Petals vs. Whole plant
  misc_feature: MA Experiment ID: 20001248 Result: Down-regulated in Transcription
  misc_feature: MA Experiment 20001248 PARAMETER Experiment Name: At_Far-red-induction_P Parameter: Age (day) Value: 7
  misc_feature: MA Experiment 20001248 PARAMETER Experiment Name: At_Far-red-induction_P Parameter: Light Value: Far-red vs. White
  misc_feature: MA Experiment 20001248 PARAMETER Experiment Name: At_Far-red-induction_P Parameter: Organism Value: A. thaliana
  misc_feature: MA Experiment 20001248 PARAMETER Experiment Name: At_Far-red-induction_P Parameter: Plant Line Value: Columbia
  misc_feature: MA Experiment 20001248 PARAMETER Experiment Name: At_Far-red-induction_P Parameter: Timepoint (hr) Value: 4
  misc_feature: MA Experiment 20001248 PARAMETER Experiment Name: At_Far-red-induction_P Parameter: Tissue Value: Whole Plant
  misc_feature: MA Experiment ID: 20001450 Result: Down-regulated in Transcription
  misc_feature: MA Experiment 20001450 PARAMETER Experiment Name: At_Far-red-induction_P Parameter: Age (day) Value: 7
  misc_feature: MA Experiment 20001450 PARAMETER Experiment Name: At_Far-red-induction_P Parameter: Light Value: Far-red vs. White
  misc_feature: MA Experiment 20001450 PARAMETER Experiment Name: At_Far-red-induction_P Parameter: Organism Value: A. thaliana
  misc_feature: MA Experiment 20001450 PARAMETER Experiment Name: At_Far-red-induction_P Parameter: Plant Line Value: Columbia
  misc_feature: MA Experiment 20001450 PARAMETER Experiment Name: At_Far-red-induction_P Parameter: Timepoint (hr) Value: 8
  misc_feature: MA Experiment 20001450 PARAMETER Experiment Name: At_Far-red-induction_P Parameter: Tissue Value: Whole Plant
  misc_feature: MA Experiment ID: 20001451 Result: Down-regulated in Transcription
  misc_feature: MA Experiment 20001451 PARAMETER Experiment Name: At_Far-red-induction_P Parameter: Age (day) Value: 7
  misc_feature: MA Experiment 20001451 PARAMETER Experiment Name: At_Far-red-induction_P Parameter: Light Value: Far-red vs. White
  misc_feature: MA Experiment 20001451 PARAMETER Experiment Name: At_Far-red-induction_P Parameter: Organism Value: A. thaliana
  misc_feature: MA Experiment 20001451 PARAMETER Experiment Name: At_Far-red-induction_P Parameter: Plant Line Value: Columbia
  misc_feature: MA Experiment 20001451 PARAMETER Experiment Name: At_Far-red-induction_P Parameter: Timepoint (hr) Value: 24
  misc_feature: MA Experiment 20001451 PARAMETER Experiment Name: At_Far-red-induction_P Parameter: Tissue Value: Whole Plant
  misc_feature: MA Experiment ID: 20001557 Result: Down-regulated in Transcription
  misc_feature: MA Experiment 20001557 PARAMETER Experiment Name: At_Drought_Soil_Dry_P Parameter: Age (day) Value: 27
  misc_feature: MA Experiment 20001557 PARAMETER Experiment Name: At_Drought_Soil_Dry_P Parameter: Organism Value: A. thaliana
  misc_feature: MA Experiment 20001557 PARAMETER Experiment Name: At_Drought_Soil_Dry_P Parameter: Plant Line Value: WS
  misc_feature: MA Experiment 20001557 PARAMETER Experiment Name: At_Drought_Soil_Dry_P Parameter: Post Timepoint (hr) Value: 3
  misc_feature: MA Experiment 20001557 PARAMETER Experiment Name: At_Drought_Soil_Dry_P Parameter: Post-Treatment Value: Re-Water vs. No Drought
  misc_feature: MA Experiment 20001557 PARAMETER Experiment Name: At_Drought_Soil_Dry_P Parameter: Timepoint (day) Value: 13
  misc_feature: MA Experiment 20001557 PARAMETER Experiment Name: At_Drought_Soil_Dry_P Parameter: Treatment Value: Drought vs. No Drought
  misc_feature: MA Experiment ID: 20001904 Result: Down-regulated in Transcription
  misc_feature: MA Experiment 20001904 PARAMETER Experiment Name: At_Drought_Reproduction_P Parameter: Age (day) Value: 37
  misc_feature: MA Experiment 20001904 PARAMETER Experiment Name: At_Drought_Reproduction_P Parameter: Organism Value: A. thaliana
  misc_feature: MA Experiment 20001904 PARAMETER Experiment Name: At_Drought_Reproduction_P Parameter: Plant Line Value: WS
  misc_feature: MA Experiment 20001904 PARAMETER Experiment Name: At_Drought_Reproduction_P Parameter: Timepoint (day) Value: 7
  misc_feature: MA Experiment 20001904 PARAMETER Experiment Name: At_Drought_Reproduction_P Parameter: Tissue Value: Rosettes
  misc_feature: MA Experiment 20001904 PARAMETER Experiment Name: At_Drought_Reproduction_P Parameter: Treatment Value: Drought vs. No Drought
  misc_feature: MA Experiment ID: 20001905 Result: Down-regulated in Transcription
  misc_feature: MA Experiment 20001905 PARAMETER Experiment Name: At_Drought_Reproduction_P Parameter: Age (day) Value: 40
  misc_feature: MA Experiment 20001905 PARAMETER Experiment Name: At_Drought_Reproduction_P Parameter: Organism Value: A. thaliana
  misc_feature: MA Experiment 20001905 PARAMETER Experiment Name: At_Drought_Reproduction_P Parameter: Plant Line Value: WS
  misc_feature: MA Experiment 20001905 PARAMETER Experiment Name: At_Drought_Reproduction_P Parameter: Timepoint (day) Value: 10
  misc_feature: MA Experiment 20001905 PARAMETER Experiment Name: At_Drought_Reproduction_P Parameter: Tissue Value: Rosettes
  misc_feature: MA Experiment 20001905 PARAMETER Experiment Name: At_Drought_Reproduction_P Parameter: Treatment Value: Drought vs. No Drought
  misc_feature: MA Experiment ID: 20001906 Result: Down-regulated in Transcription
  misc_feature: MA Experiment 20001906 PARAMETER Experiment Name: At_Drought_Reproduction_P Parameter: Age (day) Value: 35
  misc_feature: MA Experiment 20001906 PARAMETER Experiment Name: At_Drought_Reproduction_P Parameter: Organism Value: A. thaliana
  misc_feature: MA Experiment 20001906 PARAMETER Experiment Name: At_Drought_Reproduction_P Parameter: Plant Line Value: WS
  misc_feature: MA Experiment 20001906 PARAMETER Experiment Name: At_Drought_Reproduction_P Parameter: Timepoint (day) Value: 5
  misc_feature: MA Experiment 20001906 PARAMETER Experiment Name: At_Drought_Reproduction_P Parameter: Tissue Value: Siliques
  misc_feature: MA Experiment 20001906 PARAMETER Experiment Name: At_Drought_Reproduction_P Parameter: Treatment Value: Drought vs. No Drought
  misc_feature: MA Experiment ID: 20001908 Result: Down-regulated in Transcription
  misc_feature: MA Experiment 20001908 PARAMETER Experiment Name: At_Drought_Reproduction_P Parameter: Age (day) Value: 40
  misc_feature: MA Experiment 20001908 PARAMETER Experiment Name: At_Drought_Reproduction_P Parameter: Organism Value: A. thaliana
  misc_feature: MA Experiment 20001908 PARAMETER Experiment Name: At_Drought_Reproduction_P Parameter: Plant Line Value: WS
  misc_feature: MA Experiment 20001908 PARAMETER Experiment Name: At_Drought_Reproduction_P Parameter: Timepoint (day) Value: 10
  misc_feature: MA Experiment 20001908 PARAMETER Experiment Name: At_Drought_Reproduction_P Parameter: Tissue Value: Siliques
  misc_feature: MA Experiment 20001908 PARAMETER Experiment Name: At_Drought_Reproduction_P Parameter: Treatment Value: Drought vs. No Drought
  misc_feature: MA Experiment ID: 20001911 Result: Down-regulated in Transcription
  misc_feature: MA Experiment 20001911 PARAMETER Experiment Name: At_Drought_Reproduction_P Parameter: Age (day) Value: 40
  misc_feature: MA Experiment 20001911 PARAMETER Experiment Name: At_Drought_Reproduction_P Parameter: Organism Value: A. thaliana
  misc_feature: MA Experiment 20001911 PARAMETER Experiment Name: At_Drought_Reproduction_P Parameter: Plant Line Value: WS
  misc_feature: MA Experiment 20001911 PARAMETER Experiment Name: At_Drought_Reproduction_P Parameter: Timepoint (day) Value: 10
  misc_feature: MA Experiment 20001911 PARAMETER Experiment Name: At_Drought_Reproduction_P Parameter: Tissue Value: Flowers
  misc_feature: MA Experiment 20001911 PARAMETER Experiment Name: At_Drought_Reproduction_P Parameter: Treatment Value: Drought vs. No Drought

SEQ ID NO: 32617 - protein, 379 aa, Arabidopsis thaliana; identical to SEQ ID NO: 26380
  peptide (1)..(379): Ceres Seq. ID no. 13491287
  misc_feature (96)..(345): Pfam Name: haloacid dehalogenase-like hydrolase Pfam Description: haloacid dehalogenase-like hydrolase
  misc_feature (96)..(345): Pfam Name: haloacid dehalogenase-like hydrolase Pfam Description: haloacid dehalogenase-like hydrolase
  misc_feature (81)..(372): Homolog of NCBI NO: 15238800 NR Description: phosphoglycolate phosphatase, putative
  misc_feature (81)..(372): Homolog of NCBI NO: 10177912 NR Description: 4-nitrophenylphosphatase-like protein
  misc_feature (81)..(372): Homolog of NCBI NO: 21593203 NR Description: 4-nitrophenylphosphatase-like protein
  misc_feature (67)..(375): Homolog of NCBI NO: 15982558 NR Description: phosphoglycolate phosphatase precursor
  misc_feature (80)..(379): Homolog of NCBI NO: 38345235 NR Description: OSJNBa0084K20.14 [Oryza sativa (japonica
  misc_feature (81)..(372): Homolog of NCBI NO: 15238800 NR Description: phosphoglycolate phosphatase, putative
  misc_feature (81)..(372): Homolog of NCBI NO: 21593203 NR Description: 4-nitrophenylphosphatase-like protein
  misc_feature (80)..(379): Homolog of NCBI NO: 38345235 NR Description: OSJNBa0084K20.14 [Oryza sativa (japonica
  misc_feature (18)..(349): Homolog of NCBI NO: 8953699 NR Description: 4-nitrophenylphosphatase-like [Arabidopsis
  misc_feature (18)..(379): Homolog of NCBI NO: 15239406 NR Description: phosphoglycolate phosphatase, putative
  misc_feature (71)..(379): Homolog of NCBI NO: 26450878 NR Description: putative p-nitrophenylphosphatase [Arabidopsis
  misc_feature (202)..(379): Homolog of NCBI NO: 8885622 NR Description: N-glyceraldehyde-2-phosphotransferase-like
  misc_feature (71)..(206): Homolog of NCBI NO: 8885622 NR Description: N-glyceraldehyde-2-phosphotransferase-like
  misc_feature (67)..(375): Homolog of NCBI NO: 15982558 NR Description: phosphoglycolate phosphatase precursor
  misc_feature (81)..(372): Homolog of NCBI NO: 10177912 NR Description: 4-nitrophenylphosphatase-like protein
  misc_feature (71)..(206): Homolog of NCBI NO: 8885622 NR Description: N-glyceraldehyde-2-phosphotransferase-like
  misc_feature (202)..(379): Homolog of NCBI NO: 8885622 NR Description: N-glyceraldehyde-2-phosphotransferase-like
  misc_feature (71)..(379): Homolog of NCBI NO: 26450878 NR Description: putative p-nitrophenylphosphatase [Arabidopsis
  misc_feature (18)..(379): Homolog of NCBI NO: 15239406 NR Description: phosphoglycolate phosphatase, putative
  misc_feature (18)..(349): Homolog of NCBI NO: 8953699 NR Description: 4-nitrophenylphosphatase-like [Arabidopsis

SEQ ID NO: 32618 - protein, 362 aa, Arabidopsis thaliana; identical to SEQ ID NO: 26381
  peptide (1)..(362): Ceres Seq. ID no. 13491288
  misc_feature (79)..(328): Pfam Name: haloacid dehalogenase-like hydrolase Pfam Description: haloacid dehalogenase-like hydrolase
  misc_feature (79)..(328): Pfam Name: haloacid dehalogenase-like hydrolase Pfam Description: haloacid dehalogenase-like hydrolase
  misc_feature (64)..(355): Homolog of NCBI NO: 15238800 NR Description: phosphoglycolate phosphatase, putative
  misc_feature (64)..(355): Homolog of NCBI NO: 10177912 NR Description: 4-nitrophenylphosphatase-like protein
  misc_feature (64)..(355): Homolog of NCBI NO: 21593203 NR Description: 4-nitrophenylphosphatase-like protein
  misc_feature (50)..(358): Homolog of NCBI NO: 15982558 NR Description: phosphoglycolate phosphatase precursor
  misc_feature (63)..(362): Homolog of NCBI NO: 38345235 NR Description: OSJNBa0084K20.14 [Oryza sativa (japonica
  misc_feature (64)..(355): Homolog of NCBI NO: 15238800 NR Description: phosphoglycolate phosphatase, putative
  misc_feature (64)..(355): Homolog of NCBI NO: 21593203 NR Description: 4-nitrophenylphosphatase-like protein
  misc_feature (63)..(362): Homolog of NCBI NO: 38345235 NR Description: OSJNBa0084K20.14 [Oryza sativa (japonica
  misc_feature (1)..(332): Homolog of NCBI NO: 8953699 NR Description: 4-nitrophenylphosphatase-like [Arabidopsis
  misc_feature (1)..(362): Homolog of NCBI NO: 15239406 NR Description: phosphoglycolate phosphatase, putative
  misc_feature (54)..(362): Homolog of NCBI NO: 26450878 NR Description: putative p-nitrophenylphosphatase [Arabidopsis
  misc_feature (185)..(362): Homolog of NCBI NO: 8885622 NR Description: N-glyceraldehyde-2-phosphotransferase-like
  misc_feature (54)..(189): Homolog of NCBI NO: 8885622 NR Description: N-glyceraldehyde-2-phosphotransferase-like
  misc_feature (50)..(358): Homolog of NCBI NO: 15982558 NR Description: phosphoglycolate phosphatase precursor
  misc_feature (64)..(355): Homolog of NCBI NO: 10177912 NR Description: 4-nitrophenylphosphatase-like protein
  misc_feature (54)..(189): Homolog of NCBI NO: 8885622 NR Description: N-glyceraldehyde-2-phosphotransferase-like
  misc_feature (185)..(362): Homolog of NCBI NO: 8885622 NR Description: N-glyceraldehyde-2-phosphotransferase-like
  misc_feature (54)..(362): Homolog of NCBI NO: 26450878 NR Description: putative p-nitrophenylphosphatase [Arabidopsis
  misc_feature (1)..(362): Homolog of NCBI NO: 15239406 NR Description: phosphoglycolate phosphatase, putative
  misc_feature (1)..(332): Homolog of NCBI NO: 8953699 NR Description: 4-nitrophenylphosphatase-like [Arabidopsis

SEQ ID NO: 32619 - protein, 309 aa, Arabidopsis thaliana; identical to SEQ ID NO: 26382
  peptide (1)..(309): Ceres Seq. ID no. 13491289
  misc_feature (26)..(275): Pfam Name: haloacid dehalogenase-like hydrolase Pfam Description: haloacid dehalogenase-like hydrolase
  misc_feature (26)..(275): Pfam Name: haloacid dehalogenase-like hydrolase Pfam Description: haloacid dehalogenase-like hydrolase
  misc_feature (11)..(302): Homolog of NCBI NO: 15238800 NR Description: phosphoglycolate phosphatase, putative
  misc_feature (11)..(302): Homolog of NCBI NO: 10177912 NR Description: 4-nitrophenylphosphatase-like protein
  misc_feature (11)..(302): Homolog of NCBI NO: 21593203 NR Description: 4-nitrophenylphosphatase-like protein
  misc_feature (1)..(305): Homolog of NCBI NO: 15982558 NR Description: phosphoglycolate phosphatase precursor
  misc_feature (10)..(309): Homolog of NCBI NO: 38345235 NR Description: OSJNBa0084K20.14 [Oryza sativa (japonica
  misc_feature (1)..(309): Homolog of NCBI NO: 15239406 NR Description: phosphoglycolate phosphatase, putative
  misc_feature (1)..(309): Homolog of NCBI NO: 26450878 NR Description: putative p-nitrophenylphosphatase [Arabidopsis
  misc_feature (1)..(136): Homolog of NCBI NO: 8885622 NR Description: N-glyceraldehyde-2-phosphotransferase-like
  misc_feature (10)..(309): Homolog of NCBI NO: 38345235 NR Description: OSJNBa0084K20.14 [Oryza sativa (japonica
  misc_feature (1)..(305): Homolog of NCBI NO: 15982558 NR Description: phosphoglycolate phosphatase precursor
  misc_feature (11)..(302): Homolog of NCBI NO: 21593203 NR Description: 4-nitrophenylphosphatase-like protein
  misc_feature (11)..(302): Homolog of NCBI NO: 10177912 NR Description: 4-nitrophenylphosphatase-like protein
  misc_feature (11)..(302): Homolog of NCBI NO: 15238800 NR Description: phosphoglycolate phosphatase, putative
  misc_feature (132)..(309): Homolog of NCBI NO: 8885622 NR Description: N-glyceraldehyde-2-phosphotransferase-like
  misc_feature (1)..(279): Homolog of NCBI NO: 8953699 NR Description: 4-nitrophenylphosphatase-like [Arabidopsis
  misc_feature (1)..(136): Homolog of NCBI NO: 8885622 NR Description: N-glyceraldehyde-2-phosphotransferase-like
  misc_feature (132)..(309): Homolog of NCBI NO: 8885622 NR Description: N-glyceraldehyde-2-phosphotransferase-like
  misc_feature (1)..(309): Homolog of NCBI NO: 26450878 NR Description: putative p-nitrophenylphosphatase [Arabidopsis
  misc_feature (1)..(309): Homolog of NCBI NO: 15239406 NR Description: phosphoglycolate phosphatase, putative
  misc_feature (1)..(279): Homolog of NCBI NO: 8953699 NR Description: 4-nitrophenylphosphatase-like [Arabidopsis

SEQ ID NO: 32620 - DNA, 1779 bp, Arabidopsis thaliana; identical to SEQ ID NO: 29030
  misc_feature (1)..(1779): Ceres Seq. ID no. 13600793
  misc_feature: MA Experiment ID: 20000179 Result: Up-regulated in Transcription
  misc_feature: MA Experiment 20000179 PARAMETER Experiment Name: At_Germinating_Seeds_P Parameter: Age (hr) Value: 6 vs. 0
  misc_feature: MA Experiment 20000179 PARAMETER Experiment Name: At_Germinating_Seeds_P Parameter: Tissue Value: Germinating Seeds
  misc_feature: MA Experiment ID: 20001451 Result: Down-regulated in Transcription
  misc_feature: MA Experiment 20001451 PARAMETER Experiment Name: At_Far-red-induction_P Parameter: Age (day) Value: 7
  misc_feature: MA Experiment 20001451 PARAMETER Experiment Name: At_Far-red-induction_P Parameter: Light Value: Far-red vs. White
  misc_feature: MA Experiment 20001451 PARAMETER Experiment Name: At_Far-red-induction_P Parameter: Organism Value: A. thaliana
  misc_feature: MA Experiment 20001451 PARAMETER Experiment Name: At_Far-red-induction_P Parameter: Plant Line Value: Columbia
  misc_feature: MA Experiment 20001451 PARAMETER Experiment Name: At_Far-red-induction_P Parameter: Timepoint (hr) Value: 24
  misc_feature: MA Experiment 20001451 PARAMETER Experiment Name: At_Far-red-induction_P Parameter: Tissue Value: Whole Plant

SEQ ID NO: 32621 - protein, 464 aa, Arabidopsis thaliana; identical to SEQ ID NO: 29031
  peptide (1)..(464): Ceres Seq. ID no. 15219006
  misc_feature (26)..(456): Pfam Name: Ribophorin I Pfam Description: Ribophorin I
  misc_feature (26)..(456): Pfam Name: Ribophorin I Pfam Description: Ribophorin I
  misc_feature (26)..(456): Pfam Name: Ribophorin I Pfam Description: Ribophorin I
  misc_feature (19)..(463): Homolog of NCBI NO: 31543605 NR Description: ribophorin I
  misc_feature (19)..(463): Homolog of NCBI NO: 16359229 NR Description: ribophorin I [Mus musculus]
  misc_feature (22)..(463): Homolog of NCBI NO: 9857227 NR Description: ribophorin I [Sus scrofa]
  misc_feature (19)..(463): Homolog of NCBI NO: 4506675 NR Description: ribophorin I [Homo sapiens]
  misc_feature (11)..(463): Homolog of NCBI NO: 28175644 NR Description: Similar to ribophorin I [Xenopus laevis]
  misc_feature (19)..(463): Homolog of NCBI NO: 31543605 NR Description: ribophorin I
  misc_feature (22)..(463): Homolog of NCBI NO: 9857227 NR Description: ribophorin I [Sus scrofa]
  misc_feature (11)..(463): Homolog of NCBI NO: 28175644 NR Description: Similar to ribophorin I [Xenopus laevis]
  misc_feature (19)..(463): Homolog of NCBI NO: 4506675 NR Description: ribophorin I [Homo sapiens]
  misc_feature (22)..(463): Homolog of NCBI NO: 9857227 NR Description: ribophorin I [Sus scrofa]
  misc_feature (19)..(463): Homolog of NCBI NO: 16359229 NR Description: ribophorin I [Mus musculus]
  misc_feature (19)..(463): Homolog of NCBI NO: 31543605 NR Description: ribophorin I
  misc_feature (1)..(464): Homolog of NCBI NO: 15226341 NR Description: ribophorin I -related [Arabidopsis thaliana]
  misc_feature (14)..(464): Homolog of NCBI NO: 7489438 NR Description: ribophorin I homolog - barley (fragment)
  misc_feature (5)..(464): Homolog of NCBI NO: 15223039 NR Description: ribophorin I
  misc_feature (4)..(463): Homolog of NCBI NO: 28277278 NR Description: Similar to ribophorin I [Xenopus laevis]
  misc_feature (1)..(463): Homolog of NCBI NO: 40674542 NR Description: Unknown (protein for MGC:76266) [Silurana
  misc_feature (1)..(464): Homolog of NCBI NO: 15226341 NR Description: ribophorin I -related [Arabidopsis thaliana]
  misc_feature (14)..(464): Homolog of NCBI NO: 7489438 NR Description: ribophorin I homolog - barley (fragment)
  misc_feature (5)..(464): Homolog of NCBI NO: 15223039 NR Description: ribophorin I
  misc_feature (4)..(463): Homolog of NCBI NO: 28277278 NR Description: Similar to ribophorin I [Xenopus laevis]
  misc_feature (1)..(463): Homolog of NCBI NO: 40674542 NR Description: Unknown (protein for MGC:76266) [Silurana
  misc_feature (11)..(463): Homolog of NCBI NO: 28175644 NR Description: Similar to ribophorin I [Xenopus laevis]
  misc_feature (19)..(463): Homolog of NCBI NO: 4506675 NR Description: ribophorin I [Homo sapiens]
  misc_feature (19)..(463): Homolog of NCBI NO: 16359229 NR Description: ribophorin I [Mus musculus]
  misc_feature (1)..(463): Homolog of NCBI NO: 40674542 NR Description: Unknown (protein for MGC:76266) [Silurana
  misc_feature (4)..(463): Homolog of NCBI NO: 28277278 NR Description: Similar to ribophorin I [Xenopus laevis]
  misc_feature (5)..(464): Homolog of NCBI NO: 15223039 NR Description: ribophorin I
  misc_feature (14)..(464): Homolog of NCBI NO: 7489438 NR Description: ribophorin I homolog - barley (fragment)
  misc_feature (1)..(464): Homolog of NCBI NO: 15226341 NR Description: ribophorin I -related [Arabidopsis thaliana]

SEQ ID NO: 32622 - protein, 403 aa, Arabidopsis thaliana; identical to SEQ ID NO: 29032
  peptide (1)..(403): Ceres Seq. ID no. 15219007
  misc_feature (1)..(395): Pfam Name: Ribophorin I Pfam Description: Ribophorin I
  misc_feature (1)..(395): Pfam Name: Ribophorin I Pfam Description: Ribophorin I
  misc_feature (1)..(395): Pfam Name: Ribophorin I Pfam Description: Ribophorin I
  misc_feature (1)..(402): Homolog of NCBI NO: 31543605 NR Description: ribophorin I
  misc_feature (1)..(402): Homolog of NCBI NO: 16359229 NR Description: ribophorin I [Mus musculus]
  misc_feature (1)..(402): Homolog of NCBI NO: 9857227 NR Description: ribophorin I [Sus scrofa]
  misc_feature (1)..(402): Homolog of NCBI NO: 4506675 NR Description: ribophorin I [Homo sapiens]
  misc_feature (1)..(402): Homolog of NCBI NO: 28175644 NR Description: Similar to ribophorin I [Xenopus laevis]
  misc_feature (1)..(402): Homolog of NCBI NO: 31543605 NR Description: ribophorin I
  misc_feature (1)..(402): Homolog of NCBI NO: 9857227 NR Description: ribophorin I [Sus scrofa]
  misc_feature (1)..(402): Homolog of NCBI NO: 28175644 NR Description: Similar to ribophorin I [Xenopus laevis]
  misc_feature (1)..(402): Homolog of NCBI NO: 4506675 NR Description: ribophorin I [Homo sapiens]
  misc_feature (1)..(402): Homolog of NCBI NO: 9857227 NR Description: ribophorin I [Sus scrofa]
  misc_feature (1)..(402): Homolog of NCBI NO: 16359229 NR Description: ribophorin I [Mus musculus]
  misc_feature (1)..(402): Homolog of NCBI NO: 31543605 NR Description: ribophorin I
  misc_feature (1)..(403): Homolog of NCBI NO: 15226341 NR Description: ribophorin I -related [Arabidopsis thaliana]
  misc_feature (1)..(403): Homolog of NCBI NO: 7489438 NR Description: ribophorin I homolog - barley (fragment)
  misc_feature (1)..(403): Homolog of NCBI NO: 15223039 NR Description: ribophorin I
  misc_feature (1)..(402): Homolog of NCBI NO: 28277278 NR Description: Similar to ribophorin I [Xenopus laevis]
  misc_feature (1)..(402): Homolog of NCBI NO: 40674542 NR Description: Unknown (protein for MGC:76266) [Silurana
  misc_feature (1)..(403): Homolog of NCBI NO: 15226341 NR Description: ribophorin I -related [Arabidopsis thaliana]
  misc_feature (1)..(403): Homolog of NCBI NO: 7489438 NR Description: ribophorin I homolog - barley (fragment)
  misc_feature (1)..(403): Homolog of NCBI NO: 15223039 NR Description: ribophorin I
  misc_feature (1)..(402): Homolog of NCBI NO: 28277278 NR Description: Similar to ribophorin I [Xenopus laevis]
  misc_feature (1)..(402): Homolog of NCBI NO: 40674542 NR Description: Unknown (protein for MGC:76266) [Silurana
  misc_feature (1)..(402): Homolog of NCBI NO: 28175644 NR Description: Similar to ribophorin I [Xenopus laevis]
  misc_feature (1)..(402): Homolog of NCBI NO: 4506675 NR Description: ribophorin I [Homo sapiens]
  misc_feature (1)..(402): Homolog of NCBI NO: 16359229 NR Description: ribophorin I [Mus musculus]
  misc_feature (1)..(402): Homolog of NCBI NO: 40674542 NR Description: Unknown (protein for MGC:76266) [Silurana
  misc_feature (1)..(402): Homolog of NCBI NO: 28277278 NR Description: Similar to ribophorin I [Xenopus laevis]
  misc_feature (1)..(403): Homolog of NCBI NO: 15223039 NR Description: ribophorin I
  misc_feature (1)..(403): Homolog of NCBI NO: 7489438 NR Description: ribophorin I homolog - barley (fragment)
  misc_feature (1)..(403): Homolog of NCBI NO: 15226341 NR Description: ribophorin I -related [Arabidopsis thaliana]

SEQ ID NO: 32623 - protein, 389 aa, Arabidopsis thaliana; identical to SEQ ID NO: 29033
  peptide (1)..(389): Ceres Seq. ID no. 15219008
  misc_feature (1)..(381): Pfam Name: Ribophorin I Pfam Description: Ribophorin I
  misc_feature (1)..(381): Pfam Name: Ribophorin I Pfam Description: Ribophorin I
  misc_feature (1)..(381): Pfam Name: Ribophorin I Pfam Description: Ribophorin I
  misc_feature (1)..(388): Homolog of NCBI NO: 31543605 NR Description: ribophorin I
  misc_feature (1)..(388): Homolog of NCBI NO: 16359229 NR Description: ribophorin I [Mus musculus]
  misc_feature (1)..(388): Homolog of NCBI NO: 9857227 NR Description: ribophorin I [Sus scrofa]
  misc_feature (1)..(388): Homolog of NCBI NO: 4506675 NR Description: ribophorin I [Homo sapiens]
  misc_feature (1)..(388): Homolog of NCBI NO: 28175644 NR Description: Similar to ribophorin I [Xenopus laevis]
  misc_feature (1)..(388): Homolog of NCBI NO: 31543605 NR Description: ribophorin I
  misc_feature (1)..(388): Homolog of NCBI NO: 9857227 NR Description: ribophorin I [Sus scrofa]
  misc_feature (1)..(388): Homolog of NCBI NO: 28175644 NR Description: Similar to ribophorin I [Xenopus laevis]
  misc_feature (1)..(388): Homolog of NCBI NO: 4506675 NR Description: ribophorin I [Homo sapiens]
  misc_feature (1)..(388): Homolog of NCBI NO: 9857227 NR Description: ribophorin I [Sus scrofa]
  misc_feature (1)..(388): Homolog of NCBI NO: 16359229 NR Description: ribophorin I [Mus musculus]
  misc_feature (1)..(388): Homolog of NCBI NO: 31543605 NR Description: ribophorin I
  misc_feature (1)..(389): Homolog of NCBI NO: 15226341 NR Description: ribophorin I -related [Arabidopsis thaliana]
  misc_feature (1)..(389): Homolog of NCBI NO: 7489438 NR Description: ribophorin I homolog - barley (fragment)
  misc_feature (1)..(389): Homolog of NCBI NO: 15223039 NR Description: ribophorin I
  misc_feature (1)..(388): Homolog of NCBI NO: 28277278 NR Description: Similar to ribophorin I [Xenopus laevis]
  misc_feature (1)..(388): Homolog of NCBI NO: 40674542 NR Description: Unknown (protein for MGC:76266) [Silurana
  misc_feature (1)..(389): Homolog of NCBI NO: 15226341 NR Description: ribophorin I -related [Arabidopsis thaliana]
  misc_feature (1)..(389): Homolog of NCBI NO: 7489438 NR Description: ribophorin I homolog - barley (fragment)
  misc_feature (1)..(389): Homolog of NCBI NO: 15223039 NR Description: ribophorin I
  misc_feature (1)..(388): Homolog of NCBI NO: 28277278 NR Description: Similar to ribophorin I [Xenopus laevis]
  misc_feature (1)..(388): Homolog of NCBI NO: 40674542 NR Description: Unknown (protein for MGC:76266) [Silurana
  misc_feature (1)..(388): Homolog of NCBI NO: 28175644 NR Description: Similar to ribophorin I [Xenopus laevis]
  misc_feature (1)..(388): Homolog of NCBI NO: 4506675 NR Description: ribophorin I [Homo sapiens]
  misc_feature (1)..(388): Homolog of NCBI NO: 16359229 NR Description: ribophorin I [Mus musculus]
  misc_feature (1)..(388): Homolog of NCBI NO: 40674542 NR Description: Unknown (protein for MGC:76266) [Silurana
  misc_feature (1)..(388): Homolog of NCBI NO: 28277278 NR Description: Similar to ribophorin I [Xenopus laevis]
  misc_feature (1)..(389): Homolog of NCBI NO: 15223039 NR Description: ribophorin I
  misc_feature (1)..(389): Homolog of NCBI NO: 7489438 NR Description: ribophorin I homolog - barley (fragment)
  misc_feature (1)..(389): Homolog of NCBI NO: 15226341 NR Description: ribophorin I -related [Arabidopsis thaliana]

SEQ ID NO: 32624 - DNA, 895 bp, Arabidopsis thaliana; identical to SEQ ID NO: 29034
  misc_feature (1)..(895): Ceres Seq. ID no. 13492417
  misc_feature: MA Experiment ID: 108434 Result: Up-regulated in Transcription
  misc_feature: MA Experiment 108434 PARAMETER Experiment Name: At_Root_Tips_cDNA_P Parameter: Tissue Value: Root Tips
  misc_feature: MA Experiment ID: 108435 Result: Up-regulated in Transcription
  misc_feature: MA Experiment 108435 PARAMETER Experiment Name: At_stm_Mutants_cDNA_P Parameter: Plant Line Value: wt Landsburg vs stm
  misc_feature: MA Experiment 108435 PARAMETER Experiment Name: At_stm_Mutants_cDNA_P Parameter: Tissue Value: Shoot Apical Meristem Region
  misc_feature: MA Experiment ID: 108461 Result: Down-regulated in Transcription
  misc_feature: MA Experiment 108461 PARAMETER Experiment Name: At_Germinating_Seeds_cDNA_P Parameter: Age (day) Value: 1 vs. 0
  misc_feature: MA Experiment 108461 PARAMETER Experiment Name: At_Germinating_Seeds_cDNA_P Parameter: Tissue Value: Germinating Seeds
  misc_feature: MA Experiment ID: 108462 Result: Down-regulated in Transcription
  misc_feature: MA Experiment 108462 PARAMETER Experiment Name: At_Germinating_Seeds_cDNA_P Parameter: Age (day) Value: 2 vs. 0
  misc_feature: MA Experiment 108462 PARAMETER Experiment Name: At_Germinating_Seeds_cDNA_P Parameter: Tissue Value: Germinating Seeds
  misc_feature: MA Experiment ID: 108463 Result: Down-regulated in Transcription
  misc_feature: MA Experiment 108463 PARAMETER Experiment Name: At_Germinating_Seeds_cDNA_P Parameter: Age (day) Value: 3 vs. 0
  misc_feature: MA Experiment 108463 PARAMETER Experiment Name: At_Germinating_Seeds_cDNA_P Parameter: Tissue Value: Germinating Seeds
  misc_feature: MA Experiment ID: 108464 Result: Down-regulated in Transcription
  misc_feature: MA Experiment 108464 PARAMETER Experiment Name: At_Germinating_Seeds_cDNA_P Parameter: Age (day) Value: 4 vs. 0
  misc_feature: MA Experiment 108464 PARAMETER Experiment Name: At_Germinating_Seeds_cDNA_P Parameter: Tissue Value: Germinating Seeds
  misc_feature: MA Experiment ID: 108572 Result: Down-regulated in Transcription
  misc_feature: MA Experiment 108572 PARAMETER Experiment Name: At_Drought_cDNA_P Parameter: Timepoint (hr) Value: 1
  misc_feature: MA Experiment 108572 PARAMETER Experiment Name: At_Drought_cDNA_P Parameter: Tissue Value: Aerial
  misc_feature: MA Experiment 108572 PARAMETER Experiment Name: At_Drought_cDNA_P Parameter: Treatment Value: Drought vs. No Drought
  misc_feature: MA Experiment ID: 108573 Result: Down-regulated in Transcription
  misc_feature: MA Experiment 108573 PARAMETER Experiment Name: At_Drought_cDNA_P Parameter: Timepoint (hr) Value: 6
  misc_feature: MA Experiment 108573 PARAMETER Experiment Name: At_Drought_cDNA_P Parameter: Tissue Value: Aerial
  misc_feature: MA Experiment 108573 PARAMETER Experiment Name: At_Drought_cDNA_P Parameter: Treatment Value: Drought vs. No Drought
  misc_feature: MA Experiment ID: 108577 Result: Down-regulated in Transcription
  misc_feature: MA Experiment 108577 PARAMETER Experiment Name: At_42deg_Heat_cDNA_P Parameter: Temperature (deg C) Value: 42 vs. 22
  misc_feature: MA Experiment 108577 PARAMETER Experiment Name: At_42deg_Heat_cDNA_P Parameter: Timepoint (hr) Value: 6
  misc_feature: MA Experiment 108577 PARAMETER Experiment Name: At_42deg_Heat_cDNA_P Parameter: Tissue Value: Aerial
  misc_feature: MA Experiment ID: 108579 Result: Up-regulated in Transcription
  misc_feature: MA Experiment 108579 PARAMETER Experiment Name: At_4deg_Cold_cDNA_P Parameter: Temperature (deg C) Value: 4 vs. 22
  misc_feature: MA Experiment 108579 PARAMETER Experiment Name: At_4deg_Cold_cDNA_P Parameter: Timepoint (hr) Value: 6
  misc_feature: MA Experiment 108579 PARAMETER Experiment Name: At_4deg_Cold_cDNA_P Parameter: Tissue Value: Aerial
  misc_feature: MA Experiment ID: 20000180 Result: Down-regulated in Transcription
  misc_feature: MA Experiment 20000180 PARAMETER Experiment Name: At_Germinating_Seeds_P Parameter: Age (hr) Value: 24 vs. 0
  misc_feature: MA Experiment 20000180 PARAMETER Experiment Name: At_Germinating_Seeds_P Parameter: Tissue Value: Germinating Seeds
  misc_feature: MA Experiment ID: 20000184 Result: Up-regulated in Transcription
  misc_feature: MA Experiment 20000184 PARAMETER Experiment Name: At_Shoots__P Parameter: Age (day) Value: 7
  misc_feature: MA Experiment 20000184 PARAMETER Experiment Name: At_Shoots__P Parameter: Tissue Value: Shoots vs. Whole Plant
  misc_feature: MA Experiment ID: 20000227 Result: Up-regulated in Transcription
  misc_feature: MA Experiment 20000227 PARAMETER Experiment Name: At_Root-Tips-vs-Tops_P Parameter: Tissue Value: Root Tips vs. Root Tops
  misc_feature: MA Experiment ID: 20000265 Result: Up-regulated in Transcription
  misc_feature: MA Experiment 20000265 PARAMETER Experiment Name: At_Open_Flower_P Parameter: Age (day) Value: 21
  misc_feature: MA Experiment 20000265 PARAMETER Experiment Name: At_Open_Flower_P Parameter: Plant Line Value: WS
  misc_feature: MA Experiment 20000265 PARAMETER Experiment Name: At_Open_Flower_P Parameter: Tissue Value: Closed Flower vs. Whole Plant
  misc_feature: MA Experiment ID: 20000437 Result: Down-regulated in Transcription
  misc_feature: MA Experiment 20000437 PARAMETER Experiment Name: At_Drought_P Parameter: Age (day) Value: 8
  misc_feature: MA Experiment 20000437 PARAMETER Experiment Name: At_Drought_P Parameter: Organism Value: A. thaliana
  misc_feature: MA Experiment 20000437 PARAMETER Experiment Name: At_Drought_P Parameter: Plant Line Value: WS
  misc_feature: MA Experiment 20000437 PARAMETER Experiment Name: At_Drought_P Parameter: Timepoint (hr) Value: 24
  misc_feature: MA Experiment 20000437 PARAMETER Experiment Name: At_Drought_P Parameter: Tissue Value: Whole Plant
  misc_feature: MA Experiment 20000437 PARAMETER Experiment Name: At_Drought_P Parameter: Treatment Value: Drought vs. No Drought
  misc_feature: MA Experiment ID: 20000453 Result: Down-regulated in Transcription
  misc_feature: MA Experiment 20000453 PARAMETER Experiment Name: At_100uM_ABA_P Parameter: Age (day) Value: 15
  misc_feature: MA Experiment 20000453 PARAMETER Experiment Name: At_100uM_ABA_P Parameter: Organism Value: A. thaliana
  misc_feature: MA Experiment 20000453 PARAMETER Experiment Name: At_100uM_ABA_P Parameter: Plant Line Value: WS
  misc_feature: MA Experiment 20000453 PARAMETER Experiment Name: At_100uM_ABA_P Parameter: Timepoint (hr) Value: 24
  misc_feature: MA Experiment 20000453 PARAMETER Experiment Name: At_100uM_ABA_P Parameter: Tissue Value: Aerial
  misc_feature: MA Experiment 20000453 PARAMETER Experiment Name: At_100uM_ABA_P Parameter: Treatment Value: 100uM ABA vs. No Treatment
  misc_feature: MA Experiment ID: 20000456 Result: Up-regulated in Transcription
  misc_feature: MA Experiment 20000456 PARAMETER Experiment Name: At_100uM_BA_P Parameter: Age (day) Value: 14
  misc_feature: MA Experiment 20000456 PARAMETER Experiment Name: At_100uM_BA_P Parameter: Organism Value: A. thaliana
  misc_feature: MA Experiment 20000456 PARAMETER Experiment Name: At_100uM_BA_P Parameter: Plant Line Value: WS
  misc_feature: MA Experiment 20000456 PARAMETER Experiment Name: At_100uM_BA_P Parameter: Timepoint (hr) Value: 6
  misc_feature: MA Experiment 20000456 PARAMETER Experiment Name: At_100uM_BA_P Parameter: Tissue Value: Aerial
  misc_feature: MA Experiment 20000456 PARAMETER Experiment Name: At_100uM_BA_P Parameter: Treatment Value: 100uM BA vs. No Treatment
  misc_feature: MA Experiment ID: 20000794 Result: Down-regulated in Transcription
  misc_feature: MA Experiment 20000794 PARAMETER Experiment Name: At_Petals_P Parameter: Age (day) Value: 23-25 days
  misc_feature: MA Experiment 20000794 PARAMETER Experiment Name: At_Petals_P Parameter: Plant Line Value: WS
  misc_feature: MA Experiment 20000794 PARAMETER Experiment Name: At_Petals_P Parameter: Tissue Value: Petals vs. Whole plant
  misc_feature: MA Experiment ID: 20001451 Result: Down-regulated in Transcription
  misc_feature: MA Experiment 20001451 PARAMETER Experiment Name: At_Far-red-induction_P Parameter: Age (day) Value: 7
  misc_feature: MA Experiment 20001451 PARAMETER Experiment Name: At_Far-red-induction_P Parameter: Light Value: Far-red vs. White
  misc_feature: MA Experiment 20001451 PARAMETER Experiment Name: At_Far-red-induction_P Parameter: Organism Value: A. thaliana
  misc_feature: MA Experiment 20001451 PARAMETER Experiment Name: At_Far-red-induction_P Parameter: Plant Line Value: Columbia
  misc_feature: MA Experiment 20001451 PARAMETER Experiment Name: At_Far-red-induction_P Parameter: Timepoint (hr) Value: 24
  misc_feature: MA Experiment 20001451 PARAMETER Experiment Name: At_Far-red-induction_P Parameter: Tissue Value: Whole Plant
  misc_feature: MA Experiment ID: 20001556 Result: Up-regulated in Transcription
  misc_feature: MA Experiment 20001556 PARAMETER Experiment Name: At_Drought_Soil_Dry_P Parameter: Age (day) Value: 26
  misc_feature: MA Experiment 20001556 PARAMETER Experiment Name: At_Drought_Soil_Dry_P Parameter: Organism Value: A. thaliana
  misc_feature: MA Experiment 20001556 PARAMETER Experiment Name: At_Drought_Soil_Dry_P Parameter: Plant Line Value: WS
  misc_feature: MA Experiment 20001556 PARAMETER Experiment Name: At_Drought_Soil_Dry_P Parameter: Post Timepoint (hr) Value: None
  misc_feature: MA Experiment 20001556 PARAMETER Experiment Name: At_Drought_Soil_Dry_P Parameter: Post-Treatment Value: None
  misc_feature: MA Experiment 20001556 PARAMETER Experiment Name: At_Drought_Soil_Dry_P Parameter: Timepoint (day) Value: 12
  misc_feature: MA Experiment 20001556 PARAMETER Experiment Name: At_Drought_Soil_Dry_P Parameter: Treatment Value: Drought vs. No Drought
  misc_feature: MA Experiment ID: 20001557 Result: Up-regulated in Transcription
  misc_feature: MA Experiment 20001557 PARAMETER Experiment Name: At_Drought_Soil_Dry_P Parameter: Age (day) Value: 27
  misc_feature: MA Experiment 20001557 PARAMETER Experiment Name: At_Drought_Soil_Dry_P Parameter: Organism Value: A. thaliana
  misc_feature: MA Experiment 20001557 PARAMETER Experiment Name: At_Drought_Soil_Dry_P Parameter: Plant Line Value: WS
  misc_feature: MA Experiment 20001557 PARAMETER Experiment Name: At_Drought_Soil_Dry_P Parameter: Post Timepoint (hr) Value: 3
  misc_feature: MA Experiment 20001557 PARAMETER Experiment Name: At_Drought_Soil_Dry_P Parameter: Post-Treatment Value: Re-Water vs. No Drought
  misc_feature: MA Experiment 20001557 PARAMETER Experiment Name: At_Drought_Soil_Dry_P Parameter: Timepoint (day) Value: 13
  misc_feature: MA Experiment 20001557 PARAMETER Experiment Name: At_Drought_Soil_Dry_P Parameter: Treatment Value: Drought vs. No Drought
  misc_feature: MA Experiment ID: 20001558 Result: Up-regulated in Transcription
  misc_feature: MA Experiment 20001558 PARAMETER Experiment Name: At_Drought_Soil_Dry_P Parameter: Age (day) Value: 27
  misc_feature: MA Experiment 20001558 PARAMETER Experiment Name: At_Drought_Soil_Dry_P Parameter: Organism Value: A. thaliana
  misc_feature: MA Experiment 20001558 PARAMETER Experiment Name: At_Drought_Soil_Dry_P Parameter: Plant Line Value: WS
  misc_feature: MA Experiment 20001558 PARAMETER Experiment Name: At_Drought_Soil_Dry_P Parameter: Post Timepoint (hr) Value: 6
  misc_feature: MA Experiment 20001558 PARAMETER Experiment Name: At_Drought_Soil_Dry_P Parameter: Post-Treatment Value: Re-Water vs. No Drought
  misc_feature: MA Experiment 20001558 PARAMETER Experiment Name: At_Drought_Soil_Dry_P Parameter: Timepoint (day) Value: 13
  misc_feature: MA Experiment 20001558 PARAMETER Experiment Name: At_Drought_Soil_Dry_P Parameter: Treatment Value: Drought vs. No Drought
  misc_feature: MA Experiment ID: 20001560 Result: Up-regulated in Transcription
  misc_feature: MA Experiment 20001560 PARAMETER Experiment Name: At_Drought_Soil_Dry_P Parameter: Age (day) Value: 28
  misc_feature: MA Experiment 20001560 PARAMETER Experiment Name: At_Drought_Soil_Dry_P Parameter: Organism Value: A. thaliana
  misc_feature: MA Experiment 20001560 PARAMETER Experiment Name: At_Drought_Soil_Dry_P Parameter: Plant Line Value: WS
  misc_feature: MA Experiment 20001560 PARAMETER Experiment Name: At_Drought_Soil_Dry_P Parameter: Post Timepoint (hr) Value: None
  misc_feature: MA Experiment 20001560 PARAMETER Experiment Name: At_Drought_Soil_Dry_P Parameter: Post-Treatment Value: None
  misc_feature: MA Experiment 20001560 PARAMETER Experiment Name: At_Drought_Soil_Dry_P Parameter: Timepoint (day) Value: 14
  misc_feature: MA Experiment 20001560 PARAMETER Experiment Name: At_Drought_Soil_Dry_P Parameter: Treatment Value: Drought vs. No Drought

SEQ ID NO: 32625 - protein, 176 aa, Arabidopsis thaliana; identical to SEQ ID NO: 29035
  peptide (1)..(176): Ceres Seq. ID no. 13492418
  misc_feature (2)..(171): Homolog of NCBI NO: 18076088 NR Description: cyclophilin [Ricinus communis]
  misc_feature (1)..(171): Homolog of NCBI NO: 29124975 NR Description: cyclophilin [Populus tremuloides]
  misc_feature (1)..(171): Homolog of NCBI NO: 3334157 NR Description: Peptidyl-prolyl cis-trans isomerase (PPIase)
  misc_feature (1)..(171): Homolog of NCBI NO: 11270316 NR Description: peptidylprolyl isomerase (EC 5.2.1.8)
  misc_feature (3)..(171): Homolog of NCBI NO: 1084454 NR Description: peptidylprolyl isomerase (EC 5.2.1.8) Cyp1 - rice
  misc_feature (1)..(176): Homolog of NCBI NO: 11270314 NR Description: peptidylprolyl isomerase (EC 5.2.1.8) ATCYP4
  misc_feature (1)..(176): Homolog of NCBI NO: 1305457 NR Description: cytosolic cyclophilin [Arabidopsis thaliana]
  misc_feature (1)..(176): Homolog of NCBI NO: 15228814 NR Description: peptidylprolyl isomerase [Arabidopsis thaliana]

SEQ ID NO: 32626 - protein, 162 aa, Arabidopsis thaliana; identical to SEQ ID NO: 29036
  peptide (1)..(162): Ceres Seq. ID no. 13492419
  misc_feature (1)..(157): Homolog of NCBI NO: 18076088 NR Description: cyclophilin [Ricinus communis]
  misc_feature (1)..(157): Homolog of NCBI NO: 29124975 NR Description: cyclophilin [Populus tremuloides]
  misc_feature (1)..(157): Homolog of NCBI NO: 3334157 NR Description: Peptidyl-prolyl cis-trans isomerase (PPIase)
  misc_feature (1)..(157): Homolog of NCBI NO: 11270316 NR Description: peptidylprolyl isomerase (EC 5.2.1.8)
  misc_feature (1)..(157): Homolog of NCBI NO: 1084454 NR Description: peptidylprolyl isomerase (EC 5.2.1.8) Cyp1 - rice
  misc_feature (1)..(162): Homolog of NCBI NO: 11270314 NR Description: peptidylprolyl isomerase (EC 5.2.1.8) ATCYP4
  misc_feature (1)..(162): Homolog of NCBI NO: 1305457 NR Description: cytosolic cyclophilin [Arabidopsis thaliana]
  misc_feature (1)..(162): Homolog of NCBI NO: 15228814 NR Description: peptidylprolyl isomerase [Arabidopsis thaliana]

SEQ ID NO: 32627 - protein, 155 aa, Arabidopsis thaliana; identical to SEQ ID NO: 29037
  peptide (1)..(155): Ceres Seq. ID no. 13492420
  misc_feature (1)..(150): Homolog of NCBI NO: 18076088 NR Description: cyclophilin [Ricinus communis]
  misc_feature (1)..(150): Homolog of NCBI NO: 29124975 NR Description: cyclophilin [Populus tremuloides]
  misc_feature (1)..(150): Homolog of NCBI NO: 3334157 NR Description: Peptidyl-prolyl cis-trans isomerase (PPIase)
  misc_feature (1)..(150): Homolog of NCBI NO: 11270316 NR Description: peptidylprolyl isomerase (EC 5.2.1.8)
  misc_feature (1)..(150): Homolog of NCBI NO: 1084454 NR Description: peptidylprolyl isomerase (EC 5.2.1.8) Cyp1 - rice
  misc_feature (1)..(155): Homolog of NCBI NO: 11270314 NR Description: peptidylprolyl isomerase (EC 5.2.1.8) ATCYP4
  misc_feature (1)..(155): Homolog of NCBI NO: 1305457 NR Description: cytosolic cyclophilin [Arabidopsis thaliana]
  misc_feature (1)..(155): Homolog of NCBI NO: 15228814 NR Description: peptidylprolyl isomerase [Arabidopsis thaliana]

SEQ ID NO: 32628 - DNA, 1721 bp, Arabidopsis thaliana; identical to SEQ ID NO: 29038
  misc_feature (1)..(1721): Ceres Seq. ID no. 12603478
  misc_feature: MA Experiment ID: 20001911 Result: Up-regulated in Transcription
  misc_feature: MA Experiment 20001911 PARAMETER Experiment Name: At_Drought_Reproduction_P Parameter: Age (day) Value: 40
  misc_feature: MA Experiment 20001911 PARAMETER Experiment Name: At_Drought_Reproduction_P Parameter: Organism Value: A. thaliana
  misc_feature: MA Experiment 20001911 PARAMETER Experiment Name: At_Drought_Reproduction_P Parameter: Plant Line Value: WS
  misc_feature: MA Experiment 20001911 PARAMETER Experiment Name: At_Drought_Reproduction_P Parameter: Timepoint (day) Value: 10
  misc_feature: MA Experiment 20001911 PARAMETER Experiment Name: At_Drought_Reproduction_P Parameter: Tissue Value: Flowers
  misc_feature: MA Experiment 20001911 PARAMETER Experiment Name: At_Drought_Reproduction_P Parameter: Treatment Value: Drought vs. No Drought

SEQ ID NO: 32629 - protein, 475 aa, Arabidopsis thaliana; identical to SEQ ID NO: 29039
  peptide (1)..(475): Ceres Seq. ID no. 12603479
  misc_feature (41)..(385): Homolog of NCBI NO: 6164624 NR Description: F-box protein Fbx7 [Homo sapiens]
  misc_feature (1)..(367): Homolog of NCBI NO: 34862922 NR Description: similar to RIKEN cDNA 2410015K21 [Rattus
  misc_feature (3)..(385): Homolog of NCBI NO: 13124249 NR Description: F-box only protein 7
  misc_feature (3)..(385): Homolog of NCBI NO: 15812193 NR Description: F-box only protein 7; F-box protein 7 [Homo
  misc_feature (1)..(385): Homolog of NCBI NO: 23397417 NR Description: RIKEN cDNA 2410015K21 [Mus musculus]
  misc_feature (168)..(357): Homolog of NCBI NO: 15223132 NR Description: hypothetical protein; protein id: At1g70360.1
  misc_feature (12)..(371): Homolog of NCBI NO: 27311243 NR Description: Hypothetical protein [Oryza sativa (japonica
  misc_feature (116)..(430): Homolog of NCBI NO: 15220857 NR Description: unknown protein; protein id: At1g23770.1
  misc_feature (1)..(475): Homolog of NCBI NO: 18395296 NR Description: expressed protein

SEQ ID NO: 32630 - protein, 342 aa, Arabidopsis thaliana; identical to SEQ ID NO: 29040
  peptide (1)..(342): Ceres Seq. ID no. 12603480
  misc_feature (1)..(252): Homolog of NCBI NO: 6164624 NR Description: F-box protein Fbx7 [Homo sapiens]
  misc_feature (1)..(234): Homolog of NCBI NO: 34862922 NR Description: similar to RIKEN cDNA 2410015K21 [Rattus
  misc_feature (1)..(252): Homolog of NCBI NO: 13124249 NR Description: F-box only protein 7
  misc_feature (1)..(252): Homolog of NCBI NO: 15812193 NR Description: F-box only protein 7; F-box protein 7 [Homo
  misc_feature (1)..(252): Homolog of NCBI NO: 23397417 NR Description: RIKEN cDNA 2410015K21 [Mus musculus]
  misc_feature (35)..(224): Homolog of NCBI NO: 15223132 NR Description: hypothetical protein; protein id: At1g70360.1
  misc_feature (1)..(238): Homolog of NCBI NO: 27311243 NR Description: Hypothetical protein [Oryza sativa (japonica
  misc_feature (1)..(297): Homolog of NCBI NO: 15220857 NR Description: unknown protein; protein id: At1g23770.1
  misc_feature (1)..(342): Homolog of NCBI NO: 18395296 NR Description: expressed protein

SEQ ID NO: 32631 - protein, 336 aa, Arabidopsis thaliana; identical to SEQ ID NO: 29041
  peptide (1)..(336): Ceres Seq. ID no. 12603481
  misc_feature (1)..(246): Homolog of NCBI NO: 6164624 NR Description: F-box protein Fbx7 [Homo sapiens]
  misc_feature (1)..(228): Homolog of NCBI NO: 34862922 NR Description: similar to RIKEN cDNA 2410015K21 [Rattus
  misc_feature (1)..(246): Homolog of NCBI NO: 13124249 NR Description: F-box only protein 7
  misc_feature (1)..(246): Homolog of NCBI NO: 15812193 NR Description: F-box only protein 7; F-box protein 7 [Homo
  misc_feature (1)..(246): Homolog of NCBI NO: 23397417 NR Description: RIKEN cDNA 2410015K21 [Mus musculus]
  misc_feature (29)..(218): Homolog of NCBI NO: 15223132 NR Description: hypothetical protein; protein id: At1g70360.1
  misc_feature (1)..(232): Homolog of NCBI NO: 27311243 NR Description: Hypothetical protein [Oryza sativa (japonica
  misc_feature (1)..(291): Homolog of NCBI NO: 15220857 NR Description: unknown protein; protein id: At1g23770.1
  misc_feature (1)..(336): Homolog of NCBI NO: 18395296 NR Description: expressed protein

SEQ ID NO: 32632 - DNA, 3259 bp, Arabidopsis thaliana; identical to SEQ ID NO: 29042
  misc_feature (1)..(3259): Ceres Seq. ID no. 12323883
  misc_feature: MA Experiment ID: 20000179 Result: Up-regulated in Transcription
  misc_feature: MA Experiment 20000179 PARAMETER Experiment Name: At_Germinating_Seeds_P Parameter: Age (hr) Value: 6 vs. 0
  misc_feature: MA Experiment 20000179 PARAMETER Experiment Name: At_Germinating_Seeds_P Parameter: Tissue Value: Germinating Seeds
  misc_feature: MA Experiment ID: 20000180 Result: Up-regulated in Transcription
  misc_feature: MA Experiment 20000180 PARAMETER Experiment Name: At_Germinating_Seeds_P Parameter: Age (hr) Value: 24 vs. 0
  misc_feature: MA Experiment 20000180 PARAMETER Experiment Name: At_Germinating_Seeds_P Parameter: Tissue Value: Germinating Seeds
  misc_feature: MA Experiment ID: 20000185 Result: Up-regulated in Transcription
  misc_feature: MA Experiment 20000185 PARAMETER Experiment Name: At_Roots__P Parameter: Age (day) Value: 7 vs. 21
  misc_feature: MA Experiment 20000185 PARAMETER Experiment Name: At_Roots__P Parameter: Organism Value: A. thaliana
  misc_feature: MA Experiment 20000185 PARAMETER Experiment Name: At_Roots__P Parameter: Tissue Value: Roots vs. Whole Plant
  misc_feature: MA Experiment ID: 20000234 Result: Up-regulated in Transcription
  misc_feature: MA Experiment 20000234 PARAMETER Experiment Name: At_Siliques_P Parameter: Age (day) Value: 21
  misc_feature: MA Experiment 20000234 PARAMETER Experiment Name: At_Siliques_P Parameter: Organism Value: A. thaliana
  misc_feature: MA Experiment 20000234 PARAMETER Experiment Name: At_Siliques_P Parameter: Plant Line Value: WS
  misc_feature: MA Experiment 20000234 PARAMETER Experiment Name: At_Siliques_P Parameter: Tissue Value: Less Than 5mm Siliques vs. Whole Plant
  misc_feature: MA Experiment ID: 20000264 Result: Up-regulated in Transcription
  misc_feature: MA Experiment 20000264 PARAMETER Experiment Name: At_Open_Flower_P Parameter: Age (day) Value: 21
  misc_feature: MA Experiment 20000264 PARAMETER Experiment Name: At_Open_Flower_P Parameter: Plant Line Value: WS
  misc_feature: MA Experiment 20000264 PARAMETER Experiment Name: At_Open_Flower_P Parameter: Tissue Value: Open Flower vs. Whole Plant
  misc_feature: MA Experiment ID: 20000286 Result: Up-regulated in Transcription
  misc_feature: MA Experiment 20000286 PARAMETER Experiment Name: At_Open_Flower_P Parameter: Age (day) Value: 21
  misc_feature: MA Experiment 20000286 PARAMETER Experiment Name: At_Open_Flower_P Parameter: Plant Line Value: WS
  misc_feature: MA Experiment 20000286 PARAMETER Experiment Name: At_Open_Flower_P Parameter: Tissue Value: Half Open vs. Whole Plant
  misc_feature: MA Experiment ID: 20000306 Result: Up-regulated in Transcription
  misc_feature: MA Experiment 20000306 PARAMETER Experiment Name: At_Germinating_Seeds_Sub_P Parameter: Age (hr) Value: 6 vs. 0
  misc_feature: MA Experiment 20000306 PARAMETER Experiment Name: At_Germinating_Seeds_Sub_P Parameter: Organism Value: A. thaliana
  misc_feature: MA Experiment 20000306 PARAMETER Experiment Name: At_Germinating_Seeds_Sub_P Parameter: Plant Line Value: WS
  misc_feature: MA Experiment 20000306 PARAMETER Experiment Name: At_Germinating_Seeds_Sub_P Parameter: Tissue Value: Germinating Seeds
  misc_feature: MA Experiment ID: 20000307 Result: Up-regulated in Transcription
  misc_feature: MA Experiment 20000307 PARAMETER Experiment Name: At_Germinating_Seeds_Sub_P Parameter: Age (hr) Value: 24 vs. 0
  misc_feature: MA Experiment 20000307 PARAMETER Experiment Name: At_Germinating_Seeds_Sub_P Parameter: Organism Value: A. thaliana
  misc_feature: MA Experiment 20000307 PARAMETER Experiment Name: At_Germinating_Seeds_Sub_P Parameter: Plant Line Value: WS
  misc_feature: MA Experiment 20000307 PARAMETER Experiment Name: At_Germinating_Seeds_Sub_P Parameter: Tissue Value: Germinating Seeds
  misc_feature: MA Experiment ID: 20000314 Result: Up-regulated in Transcription
  misc_feature: MA Experiment 20000314 PARAMETER Experiment Name: At_14day_Shoots-Roots_Sub_P Parameter: Age (day) Value: 14
  misc_feature: MA Experiment 20000314 PARAMETER Experiment Name: At_14day_Shoots-Roots_Sub_P Parameter: Organism Value: A. thaliana
  misc_feature: MA Experiment 20000314 PARAMETER Experiment Name: At_14day_Shoots-Roots_Sub_P Parameter: Plant Line Value: WS
  misc_feature: MA Experiment 20000314 PARAMETER Experiment Name: At_14day_Shoots-Roots_Sub_P Parameter: Tissue Value: Roots vs. Whole Plant
  misc_feature: MA Experiment ID: 20000315 Result: Down-regulated in Transcription
  misc_feature: MA Experiment 20000315 PARAMETER Experiment Name: At_14day_Shoots-Roots_Sub_P Parameter: Age (day) Value: 14
  misc_feature: MA Experiment 20000315 PARAMETER Experiment Name: At_14day_Shoots-Roots_Sub_P Parameter: Organism Value: A. thaliana
  misc_feature: MA Experiment 20000315 PARAMETER Experiment Name: At_14day_Shoots-Roots_Sub_P Parameter: Plant Line Value: WS
  misc_feature: MA Experiment 20000315 PARAMETER Experiment Name: At_14day_Shoots-Roots_Sub_P Parameter: Tissue Value: Shoots vs. Whole Plant
  misc_feature: MA Experiment ID: 20000328 Result: Down-regulated in Transcription
  misc_feature: MA Experiment 20000328 PARAMETER Experiment Name: At_42deg_Heat_Sub_P Parameter: Age (day) Value: 14
  misc_feature: MA Experiment 20000328 PARAMETER Experiment Name: At_42deg_Heat_Sub_P Parameter: Organism Value: A. thaliana
  misc_feature: MA Experiment 20000328 PARAMETER Experiment Name: At_42deg_Heat_Sub_P Parameter: Plant Line Value: WS
  misc_feature: MA Experiment 20000328 PARAMETER Experiment Name: At_42deg_Heat_Sub_P Parameter: Temperature (deg C) Value: 42 vs. 22
  misc_feature: MA Experiment 20000328 PARAMETER Experiment Name: At_42deg_Heat_Sub_P Parameter: Timepoint (hr) Value: 6
  misc_feature: MA Experiment 20000328 PARAMETER Experiment Name: At_42deg_Heat_Sub_P Parameter: Tissue Value: Aerial
  misc_feature: MA Experiment ID: 20000329 Result: Down-regulated in Transcription
  misc_feature: MA Experiment 20000329 PARAMETER Experiment Name: At_4deg_Cold_Sub_P Parameter: Age (day) Value: 14
  misc_feature: MA Experiment 20000329 PARAMETER Experiment Name: At_4deg_Cold_Sub_P Parameter: Organism Value: A. thaliana
  misc_feature: MA Experiment 20000329 PARAMETER Experiment Name: At_4deg_Cold_Sub_P Parameter: Plant Line Value: WS
  misc_feature: MA Experiment 20000329 PARAMETER Experiment Name: At_4deg_Cold_Sub_P Parameter: Temperature (deg C) Value: 4 vs. 22
  misc_feature: MA Experiment 20000329 PARAMETER Experiment Name: At_4deg_Cold_Sub_P Parameter: Timepoint (hr) Value: 6
  misc_feature: MA Experiment 20000329 PARAMETER Experiment Name: At_4deg_Cold_Sub_P Parameter: Tissue Value: Aerial
  misc_feature: MA Experiment ID: 20000355 Result: Up-regulated in Transcription
  misc_feature: MA Experiment 20000355 PARAMETER Experiment Name: At_Siliques_Sub_P Parameter: Age (day) Value: 21
  misc_feature: MA Experiment 20000355 PARAMETER Experiment Name: At_Siliques_Sub_P Parameter: Organism Value: A. thaliana
  misc_feature: MA Experiment 20000355 PARAMETER Experiment Name: At_Siliques_Sub_P Parameter: Plant Line Value: WS
  misc_feature: MA Experiment 20000355 PARAMETER Experiment Name: At_Siliques_Sub_P Parameter: Tissue Value: Less Than 5mm Siliques vs. Whole Plant
  misc_feature: MA Experiment ID: 20000439 Result: Up-regulated in Transcription
  misc_feature: MA Experiment 20000439 PARAMETER Experiment Name: At_Roots__P Parameter: Age (day) Value: 14 vs. 21
  misc_feature: MA Experiment 20000439 PARAMETER Experiment Name: At_Roots__P Parameter: Organism Value: A. thaliana
  misc_feature: MA Experiment 20000439 PARAMETER Experiment Name: At_Roots__P Parameter: Tissue Value: Roots vs. Whole Plant
  misc_feature: MA Experiment ID: 20000495 Result: Up-regulated in Transcription
  misc_feature: MA Experiment 20000495 PARAMETER Experiment Name: At_Guard_Cells_P Parameter: Harvest Date Value: 8/2/2002
  misc_feature: MA Experiment 20000495 PARAMETER Experiment Name: At_Guard_Cells_P Parameter: Organism Value: A. thaliana
  misc_feature: MA Experiment 20000495 PARAMETER Experiment Name: At_Guard_Cells_P Parameter: Tissue Value: Guard Cells vs. Leaves
  misc_feature: MA Experiment ID: 20000794 Result: Up-regulated in Transcription
  misc_feature: MA Experiment 20000794 PARAMETER Experiment Name: At_Petals_P Parameter: Age (day) Value: 23-25 days
  misc_feature: MA Experiment 20000794 PARAMETER Experiment Name: At_Petals_P Parameter: Plant Line Value: WS
  misc_feature: MA Experiment 20000794 PARAMETER Experiment Name: At_Petals_P Parameter: Tissue Value: Petals vs. Whole plant
  misc_feature: MA Experiment ID: 20001451 Result: Up-regulated in Transcription
  misc_feature: MA Experiment 20001451 PARAMETER Experiment Name: At_Far-red-induction_P Parameter: Age (day) Value: 7
  misc_feature: MA Experiment 20001451 PARAMETER Experiment Name: At_Far-red-induction_P Parameter: Light Value: Far-red vs. White
  misc_feature: MA Experiment 20001451 PARAMETER Experiment Name: At_Far-red-induction_P Parameter: Organism Value: A. thaliana
  misc_feature: MA Experiment 20001451 PARAMETER Experiment Name: At_Far-red-induction_P Parameter: Plant Line Value: Columbia
  misc_feature: MA Experiment 20001451 PARAMETER Experiment Name: At_Far-red-induction_P Parameter: Timepoint (hr) Value: 24
  misc_feature: MA Experiment 20001451 PARAMETER Experiment Name: At_Far-red-induction_P Parameter: Tissue Value: Whole Plant
  misc_feature: MA Experiment ID: 20001910 Result: Up-regulated in Transcription
  misc_feature: MA Experiment 20001910 PARAMETER Experiment Name: At_Drought_Reproduction_P Parameter: Age (day) Value: 37
  misc_feature: MA Experiment 20001910 PARAMETER Experiment Name: At_Drought_Reproduction_P Parameter: Organism Value: A. thaliana
  misc_feature: MA Experiment 20001910 PARAMETER Experiment Name: At_Drought_Reproduction_P Parameter: Plant Line Value: WS
  misc_feature: MA Experiment 20001910 PARAMETER Experiment Name: At_Drought_Reproduction_P Parameter: Timepoint (day) Value: 7
  misc_feature: MA Experiment 20001910 PARAMETER Experiment Name: At_Drought_Reproduction_P Parameter: Tissue Value: Flowers
  misc_feature: MA Experiment 20001910 PARAMETER Experiment Name: At_Drought_Reproduction_P Parameter: Treatment Value: Drought vs. No Drought

SEQ ID NO: 32633 - protein, 403 aa, Arabidopsis thaliana; identical to SEQ ID NO: 29043
  peptide (1)..(403): Ceres Seq. ID no. 12323884
  misc_feature (1)..(90): Homolog of NCBI NO: 29830411 NR Description: hypothetical protein [Streptomyces avermitilis
  misc_feature (1)..(143): Homolog of NCBI NO: 21222769 NR Description: conserved hypothetical protein [Streptomyces
  misc_feature (1)..(88): Homolog of NCBI NO: 15608116 NR Description: hypothetical protein Rv0976c [Mycobacterium
  misc_feature (1)..(332): Homolog of NCBI NO: 15598082 NR Description: hypothetical protein [Pseudomonas aeruginosa
  misc_feature (280)..(396): Homolog of NCBI NO: 23108010 NR Description: hypothetical protein [Novosphingobium
  misc_feature (1)..(159): Homolog of NCBI NO: 23108010 NR Description: hypothetical protein [Novosphingobium
  misc_feature (1)..(231): Homolog of NCBI NO: 33603653 NR Description: hypothetical protein BB4681 [Bordetella
  misc_feature (1)..(231): Homolog of NCBI NO: 33598699 NR Description: hypothetical protein BPP4211 [Bordetella
  misc_feature (1)..(231): Homolog of NCBI NO: 33602182 NR Description: conserved hypothetical protein [Bordetella
  misc_feature (1)..(402): Homolog of NCBI NO: 34394893 NR Description: unknown protein [Oryza sativa (japonica

SEQ ID NO: 32634 - protein, 394 aa, Arabidopsis thaliana; identical to SEQ ID NO: 29044
  peptide (1)..(394): Ceres Seq. ID no. 12323885
  misc_feature (1)..(81): Homolog of NCBI NO: 29830411 NR Description: hypothetical protein [Streptomyces avermitilis
  misc_feature (1)..(134): Homolog of NCBI NO: 21222769 NR Description: conserved hypothetical protein [Streptomyces
  misc_feature (1)..(79): Homolog of NCBI NO: 15608116 NR Description: hypothetical protein Rv0976c [Mycobacterium
  misc_feature (1)..(323): Homolog of NCBI NO: 15598082 NR Description: hypothetical protein [Pseudomonas aeruginosa
  misc_feature (271)..(387): Homolog of NCBI NO: 23108010 NR Description: hypothetical protein [Novosphingobium
  misc_feature (1)..(150): Homolog of NCBI NO: 23108010 NR Description: hypothetical protein [Novosphingobium
  misc_feature (1)..(222): Homolog of NCBI NO: 33603653 NR Description: hypothetical protein BB4681 [Bordetella
  misc_feature (1)..(222): Homolog of NCBI NO: 33598699 NR Description: hypothetical protein BPP4211 [Bordetella
  misc_feature (1)..(222): Homolog of NCBI NO: 33602182 NR Description: conserved hypothetical protein [Bordetella
  misc_feature (1)..(393): Homolog of NCBI NO: 34394893 NR Description: unknown protein [Oryza sativa (japonica

SEQ ID NO: 32635 - protein, 265 aa, Arabidopsis thaliana; identical to SEQ ID NO: 29045
  peptide (1)..(265): Ceres Seq. ID no. 12323886
  misc_feature (1)..(194): Homolog of NCBI NO: 15598082 NR Description: hypothetical protein [Pseudomonas aeruginosa
  misc_feature (142)..(258): Homolog of NCBI NO: 23108010 NR Description: hypothetical protein [Novosphingobium
  misc_feature (1)..(21): Homolog of NCBI NO: 23108010 NR Description: hypothetical protein [Novosphingobium
  misc_feature (1)..(93): Homolog of NCBI NO: 33603653 NR Description: hypothetical protein BB4681 [Bordetella
  misc_feature (1)..(93): Homolog of NCBI NO: 33598699 NR Description: hypothetical protein BPP4211 [Bordetella
  misc_feature (1)..(93): Homolog of NCBI NO: 33602182 NR Description: conserved hypothetical protein [Bordetella
  misc_feature (1)..(264): Homolog of NCBI NO: 34394893 NR Description: unknown protein [Oryza sativa (japonica

SEQ ID NO: 32636 - DNA, 1766 bp, Arabidopsis thaliana; identical to SEQ ID NO: 29046
  misc_feature (1)..(1766): Ceres Seq. ID no. 13647205
  misc_feature: MA Experiment ID: 20000315 Result: Down-regulated in Transcription
  misc_feature: MA Experiment 20000315 PARAMETER Experiment Name: At_14day_Shoots-Roots_Sub_P Parameter: Age (day) Value: 14
  misc_feature: MA Experiment 20000315 PARAMETER Experiment Name: At_14day_Shoots-Roots_Sub_P Parameter: Organism Value: A. thaliana
  misc_feature: MA Experiment 20000315 PARAMETER Experiment Name: At_14day_Shoots-Roots_Sub_P Parameter: Plant Line Value: WS
  misc_feature: MA Experiment 20000315 PARAMETER Experiment Name: At_14day_Shoots-Roots_Sub_P Parameter: Tissue Value: Shoots vs. Whole Plant
  misc_feature: MA Experiment ID: 20000329 Result: Down-regulated in Transcription
  misc_feature: MA Experiment 20000329 PARAMETER Experiment Name: At_4deg_Cold_Sub_P Parameter: Age (day) Value: 14
  misc_feature: MA Experiment 20000329 PARAMETER Experiment Name: At_4deg_Cold_Sub_P Parameter: Organism Value: A. thaliana
  misc_feature: MA Experiment 20000329 PARAMETER Experiment Name: At_4deg_Cold_Sub_P Parameter: Plant Line Value: WS
  misc_feature: MA Experiment 20000329 PARAMETER Experiment Name: At_4deg_Cold_Sub_P Parameter: Temperature (deg C) Value: 4 vs. 22
  misc_feature: MA Experiment 20000329 PARAMETER Experiment Name: At_4deg_Cold_Sub_P Parameter: Timepoint (hr) Value: 6
  misc_feature: MA Experiment 20000329 PARAMETER Experiment Name: At_4deg_Cold_Sub_P Parameter: Tissue Value: Aerial
  misc_feature: MA Experiment ID: 20000355 Result: Down-regulated in Transcription
  misc_feature: MA Experiment 20000355 PARAMETER Experiment Name: At_Siliques_Sub_P Parameter: Age (day) Value: 21
  misc_feature: MA Experiment 20000355 PARAMETER Experiment Name: At_Siliques_Sub_P Parameter: Organism Value: A. thaliana
  misc_feature: MA Experiment 20000355 PARAMETER Experiment Name: At_Siliques_Sub_P Parameter: Plant Line Value: WS
  misc_feature: MA Experiment 20000355 PARAMETER Experiment Name: At_Siliques_Sub_P Parameter: Tissue Value: Less Than 5mm Siliques vs. Whole Plant

SEQ ID NO: 32637 - protein, 345 aa, Arabidopsis thaliana; identical to SEQ ID NO: 29047
  peptide (1)..(345): Ceres Seq. ID no. 15218678
  misc_feature (101)..(151): Pfam Name: Carboxylesterase Pfam Description: Carboxylesterase
  misc_feature (101)..(151): Pfam Name: Carboxylesterase Pfam Description: Carboxylesterase
  misc_feature (30)..(341): Homolog of NCBI NO: 34904760 NR Description: similar to carboxylesterase
  misc_feature (13)..(345): Homolog of NCBI NO: 34904772 NR Description: similar to carboxylesterase
  misc_feature (16)..(343): Homolog of NCBI NO: 34904774 NR Description: similar to carboxylesterase
  misc_feature (16)..(343): Homolog of NCBI NO: 34393714 NR Description: putative esterase [Oryza sativa (japonica
  misc_feature (3)..(341): Homolog of NCBI NO: 34904770 NR Description: similar to carboxylesterase
  misc_feature (30)..(341): Homolog of NCBI NO: 34904760 NR Description: similar to carboxylesterase
  misc_feature (16)..(343): Homolog of NCBI NO: 34904774 NR Description: similar to carboxylesterase
  misc_feature (3)..(341): Homolog of NCBI NO: 34904770 NR Description: similar to carboxylesterase
  misc_feature (1)..(345): Homolog of NCBI NO: 15229905 NR Description: expressed protein [Arabidopsis thaliana]
  misc_feature (1)..(345): Homolog of NCBI NO: 15240483 NR Description: expressed protein [Arabidopsis thaliana]
  misc_feature (1)..(343): Homolog of NCBI NO: 15229371 NR Description: expressed protein [Arabidopsis thaliana]
  misc_feature (13)..(342): Homolog of NCBI NO: 21618039 NR Description: unknown [Arabidopsis thaliana]
  misc_feature (13)..(342): Homolog of NCBI NO: 15237783 NR Description: expressed protein [Arabidopsis thaliana]
  misc_feature (16)..(343): Homolog of NCBI NO: 34393714 NR Description: putative esterase [Oryza sativa (japonica
  misc_feature (13)..(345): Homolog of NCBI NO: 34904772 NR Description: similar to carboxylesterase
  misc_feature (13)..(342): Homolog of NCBI NO: 15237783 NR Description: expressed protein [Arabidopsis thaliana]
  misc_feature (13)..(342): Homolog of NCBI NO: 21618039 NR Description: unknown [Arabidopsis thaliana]
  misc_feature (1)..(343): Homolog of NCBI NO: 15229371 NR Description: expressed protein [Arabidopsis thaliana]
  misc_feature (1)..(345): Homolog of NCBI NO: 15240483 NR Description: expressed protein [Arabidopsis thaliana]
  misc_feature (1)..(345): Homolog of NCBI NO: 15229905 NR Description: expressed protein [Arabidopsis thaliana]

SEQ ID NO: 32638 - DNA, 2322 bp, Arabidopsis thaliana; identical to SEQ ID NO: 29048
  misc_feature (1)..(2322): Ceres Seq. ID no. 12385531
  misc_feature: MA Experiment ID: 108462 Result: Up-regulated in Transcription
  misc_feature: MA Experiment 108462 PARAMETER Experiment Name: At_Germinating_Seeds_cDNA_P Parameter: Age (day) Value: 2 vs. 0
  misc_feature: MA Experiment 108462 PARAMETER Experiment Name: At_Germinating_Seeds_cDNA_P Parameter: Tissue Value: Germinating Seeds
  misc_feature: MA Experiment ID: 108573 Result: Up-regulated in Transcription
  misc_feature: MA Experiment 108573 PARAMETER Experiment Name: At_Drought_cDNA_P Parameter: Timepoint (hr) Value: 6
  misc_feature: MA Experiment 108573 PARAMETER Experiment Name: At_Drought_cDNA_P Parameter: Tissue Value: Aerial
  misc_feature: MA Experiment 108573 PARAMETER Experiment Name: At_Drought_cDNA_P Parameter: Treatment Value: Drought vs. No Drought
  misc_feature: MA Experiment ID: 20000179 Result: Up-regulated in Transcription
  misc_feature: MA Experiment 20000179 PARAMETER Experiment Name: At_Germinating_Seeds_P Parameter: Age (hr) Value: 6 vs. 0
  misc_feature: MA Experiment 20000179 PARAMETER Experiment Name: At_Germinating_Seeds_P Parameter: Tissue Value: Germinating Seeds
  misc_feature: MA Experiment ID: 20000180 Result: Up-regulated in Transcription
  misc_feature: MA Experiment 20000180 PARAMETER Experiment Name: At_Germinating_Seeds_P Parameter: Age (hr) Value: 24 vs. 0
  misc_feature: MA Experiment 20000180 PARAMETER Experiment Name: At_Germinating_Seeds_P Parameter: Tissue Value: Germinating Seeds
  misc_feature: MA Experiment ID: 20001557 Result: Up-regulated in Transcription
  misc_feature: MA Experiment 20001557 PARAMETER Experiment Name: At_Drought_Soil_Dry_P Parameter: Age (day) Value: 27
  misc_feature: MA Experiment 20001557 PARAMETER Experiment Name: At_Drought_Soil_Dry_P Parameter: Organism Value: A. thaliana
  misc_feature: MA Experiment 20001557 PARAMETER Experiment Name: At_Drought_Soil_Dry_P Parameter: Plant Line Value: WS
  misc_feature: MA Experiment 20001557 PARAMETER Experiment Name: At_Drought_Soil_Dry_P Parameter: Post Timepoint (hr) Value: 3
  misc_feature: MA Experiment 20001557 PARAMETER Experiment Name: At_Drought_Soil_Dry_P Parameter: Post-Treatment Value: Re-Water vs. No Drought
  misc_feature: MA Experiment 20001557 PARAMETER Experiment Name: At_Drought_Soil_Dry_P Parameter: Timepoint (day) Value: 13
  misc_feature: MA Experiment 20001557 PARAMETER Experiment Name: At_Drought_Soil_Dry_P Parameter: Treatment Value: Drought vs. No Drought

SEQ ID NO: 32639 - protein, 614 aa, Arabidopsis thaliana; identical to SEQ ID NO: 29049
  peptide (1)..(614): Ceres Seq. ID no. 12385532
  misc_feature (223)..(509): Pfam Name: Dynamin central region Pfam Description: Dynamin central region
  misc_feature (153)..(613): Homolog of NCBI NO: 30689765 NR Description: phragmoplastin -related [Arabidopsis thaliana]
  misc_feature (4)..(613): Homolog of NCBI NO: 30689768 NR Description: phragmoplastin -related [Arabidopsis thaliana]
  misc_feature (1)..(613): Homolog of NCBI NO: 6651401 NR Description: dynamin-like protein 4 [Arabidopsis thaliana]
  misc_feature (4)..(613): Homolog of NCBI NO: 11357275 NR Description: dynamin-like protein 4 (ADL4) - Arabidopsis
  misc_feature (1)..(613): Homolog of NCBI NO: 18411520 NR Description: dynamin-like protein 4 (ADL4)
  misc_feature (1)..(614): Homolog of NCBI NO: 18071348 NR Description: putative GTP-binding protein
  misc_feature (527)..(614): Homolog of NCBI NO: 8778229 NR Description: F10B6.23 [Arabidopsis thaliana]
  misc_feature (446)..(541): Homolog of NCBI NO: 8778229 NR Description: F10B6.23 [Arabidopsis thaliana]
  misc_feature (1)..(135): Homolog of NCBI NO: 8778229 NR Description: F10B6.23 [Arabidopsis thaliana]
  misc_feature (137)..(466): Homolog of NCBI NO: 8778229 NR Description: F10B6.23 [Arabidopsis thaliana]

SEQ ID NO: 32640 - protein, 611 aa, Arabidopsis thaliana; identical to SEQ ID NO: 29050
  peptide (1)..(611): Ceres Seq. ID no. 12385533
  misc_feature (220)..(506): Pfam Name: Dynamin central region Pfam Description: Dynamin central region
  misc_feature (150)..(610): Homolog of NCBI NO: 30689765 NR Description: phragmoplastin -related [Arabidopsis thaliana]
  misc_feature (1)..(610): Homolog of NCBI NO: 30689768 NR Description: phragmoplastin -related [Arabidopsis thaliana]
  misc_feature (1)..(610): Homolog of NCBI NO: 6651401 NR Description: dynamin-like protein 4 [Arabidopsis thaliana]
  misc_feature (1)..(610): Homolog of NCBI NO: 11357275 NR Description: dynamin-like protein 4 (ADL4) - Arabidopsis
  misc_feature (1)..(610): Homolog of NCBI NO: 18411520 NR Description: dynamin-like protein 4 (ADL4)
  misc_feature (1)..(611): Homolog of NCBI NO: 18071348 NR Description: putative GTP-binding protein
  misc_feature (524)..(611): Homolog of NCBI NO: 8778229 NR Description: F10B6.23 [Arabidopsis thaliana]
  misc_feature (443)..(538): Homolog of NCBI NO: 8778229 NR Description: F10B6.23 [Arabidopsis thaliana]
  misc_feature (1)..(132): Homolog of NCBI NO: 8778229 NR Description: F10B6.23 [Arabidopsis thaliana]
  misc_feature (134)..(463): Homolog of NCBI NO: 8778229 NR Description: F10B6.23 [Arabidopsis thaliana]

SEQ ID NO: 32641 - protein, 586 aa, Arabidopsis thaliana; identical to SEQ ID NO: 29051
  peptide (1)..(586): Ceres Seq. ID no. 12385534
  misc_feature (195)..(481): Pfam Name: Dynamin central region Pfam Description: Dynamin central region
  misc_feature (125)..(585): Homolog of NCBI NO: 30689765 NR Description: phragmoplastin -related [Arabidopsis thaliana]
  misc_feature (1)..(585): Homolog of NCBI NO: 30689768 NR Description: phragmoplastin -related [Arabidopsis thaliana]
  misc_feature (1)..(585): Homolog of NCBI NO: 6651401 NR Description: dynamin-like protein 4 [Arabidopsis thaliana]
  misc_feature (1)..(585): Homolog of NCBI NO: 11357275 NR Description: dynamin-like protein 4 (ADL4) - Arabidopsis
  misc_feature (1)..(585): Homolog of NCBI NO: 18411520 NR Description: dynamin-like protein 4 (ADL4)
  misc_feature (1)..(586): Homolog of NCBI NO: 18071348 NR Description: putative GTP-binding protein
  misc_feature (499)..(586): Homolog of NCBI NO: 8778229 NR Description: F10B6.23 [Arabidopsis thaliana]
  misc_feature (418)..(513): Homolog of NCBI NO: 8778229 NR Description: F10B6.23 [Arabidopsis thaliana]
  misc_feature (1)..(107): Homolog of NCBI NO: 8778229 NR Description: F10B6.23 [Arabidopsis thaliana]
  misc_feature (109)..(438): Homolog of NCBI NO: 8778229 NR Description: F10B6.23 [Arabidopsis thaliana]

SEQ ID NO: 32642 - DNA, 1400 bp, Arabidopsis thaliana; identical to SEQ ID NO: 29052
  misc_feature (1)..(1400): Ceres Seq. ID no. 12423119
  misc_feature: MA Experiment ID: 20000265 Result: Up-regulated in Transcription
  misc_feature: MA Experiment 20000265 PARAMETER Experiment Name: At_Open_Flower_P Parameter: Age (day) Value: 21
  misc_feature: MA Experiment 20000265 PARAMETER Experiment Name: At_Open_Flower_P Parameter: Plant Line Value: WS
  misc_feature: MA Experiment 20000265 PARAMETER Experiment Name: At_Open_Flower_P Parameter: Tissue Value: Closed Flower vs. Whole Plant
  misc_feature: MA Experiment ID: 20000286 Result: Up-regulated in Transcription
  misc_feature: MA Experiment 20000286 PARAMETER Experiment Name: At_Open_Flower_P Parameter: Age (day) Value: 21
  misc_feature: MA Experiment 20000286 PARAMETER Experiment Name: At_Open_Flower_P Parameter: Plant Line Value: WS
  misc_feature: MA Experiment 20000286 PARAMETER Experiment Name: At_Open_Flower_P Parameter: Tissue Value: Half Open vs. Whole Plant
  misc_feature: MA Experiment ID: 20001910 Result: Down-regulated in Transcription
  misc_feature: MA Experiment 20001910 PARAMETER Experiment Name: At_Drought_Reproduction_P Parameter: Age (day) Value: 37
  misc_feature: MA Experiment 20001910 PARAMETER Experiment Name: At_Drought_Reproduction_P Parameter: Organism Value: A. thaliana
  misc_feature: MA Experiment 20001910 PARAMETER Experiment Name: At_Drought_Reproduction_P Parameter: Plant Line Value: WS
  misc_feature: MA Experiment 20001910 PARAMETER Experiment Name: At_Drought_Reproduction_P Parameter: Timepoint (day) Value: 7
  misc_feature: MA Experiment 20001910 PARAMETER Experiment Name: At_Drought_Reproduction_P Parameter: Tissue Value: Flowers
  misc_feature: MA Experiment 20001910 PARAMETER Experiment Name: At_Drought_Reproduction_P Parameter: Treatment Value: Drought vs. No Drought

SEQ ID NO: 32643 - protein, 438 aa, Arabidopsis thaliana; identical to SEQ ID NO: 29053
  peptide (1)..(438): Ceres Seq. ID no. 12423120
  misc_feature (17)..(413): Homolog of NCBI NO: 1527001 NR Description: Ipomoea nil Pn47p
  misc_feature (23)..(422): Homolog of NCBI NO: 34911832 NR Description: lipase-like protein [Oryza sativa (japonica
  misc_feature (20)..(213): Homolog of NCBI NO: 34911870 NR Description: lipase-like protein [Oryza sativa (japonica
  misc_feature (209)..(417): Homolog of NCBI NO: 34911870 NR Description: lipase-like protein [Oryza sativa (japonica
  misc_feature (20)..(417): Homolog of NCBI NO: 34911830 NR Description: lipase-like protein [Oryza sativa (japonica
  misc_feature (3)..(419): Homolog of NCBI NO: 15233922 NR Description: lipase-like protein; protein id: At4g18550.1
  misc_feature (16)..(56): Homolog of NCBI NO: 15224613 NR Description: putative lipase; protein id: At2g31100.1
  misc_feature (137)..(424): Homolog of NCBI NO: 15224613 NR Description: putative lipase; protein id: At2g31100.1
  misc_feature (16)..(438): Homolog of NCBI NO: 15221426 NR Description: lipase-like protein
  misc_feature (16)..(438): Homolog of NCBI NO: 21537306 NR Description: lipase-like protein [Arabidopsis thaliana]

SEQ ID NO: 32644 - protein, 423 aa, Arabidopsis thaliana; identical to SEQ ID NO: 29054
  peptide (1)..(423): Ceres Seq. ID no. 12423121
  misc_feature (2)..(398): Homolog of NCBI NO: 1527001 NR Description: Ipomoea nil Pn47p
  misc_feature (8)..(407): Homolog of NCBI NO: 34911832 NR Description: lipase-like protein [Oryza sativa (japonica
  misc_feature (5)..(198): Homolog of NCBI NO: 34911870 NR Description: lipase-like protein [Oryza sativa (japonica
  misc_feature (194)..(402): Homolog of NCBI NO: 34911870 NR Description: lipase-like protein [Oryza sativa (japonica
  misc_feature (5)..(402): Homolog of NCBI NO: 34911830 NR Description: lipase-like protein [Oryza sativa (japonica
  misc_feature (1)..(404): Homolog of NCBI NO: 15233922 NR Description: lipase-like protein; protein id: At4g18550.1
  misc_feature (1)..(41): Homolog of NCBI NO: 15224613 NR Description: putative lipase; protein id: At2g31100.1
  misc_feature (122)..(409): Homolog of NCBI NO: 15224613 NR Description: putative lipase; protein id: At2g31100.1
  misc_feature (1)..(423): Homolog of NCBI NO: 15221426 NR Description: lipase-like protein
  misc_feature (1)..(423): Homolog of NCBI NO: 21537306 NR Description: lipase-like protein [Arabidopsis thaliana]

SEQ ID NO: 32645 - protein, 385 aa, Arabidopsis thaliana; identical to SEQ ID NO: 29055
  peptide (1)..(385): Ceres Seq. ID no. 12423122
  misc_feature (128)..(366): Homolog of NCBI NO: 4103627 NR Description: lipase [Dianthus caryophyllus]
  misc_feature (1)..(360): Homolog of NCBI NO: 1527001 NR Description: Ipomoea nil Pn47p
  misc_feature (1)..(369): Homolog of NCBI NO: 34911832 NR Description: lipase-like protein [Oryza sativa (japonica
  misc_feature (1)..(160): Homolog of NCBI NO: 34911870 NR Description: lipase-like protein [Oryza sativa (japonica
  misc_feature (156)..(364): Homolog of NCBI NO: 34911870 NR Description: lipase-like protein [Oryza sativa (japonica
  misc_feature (1)..(364): Homolog of NCBI NO: 34911830 NR Description: lipase-like protein [Oryza sativa (japonica
  misc_feature (1)..(366): Homolog of NCBI NO: 15233922 NR Description: lipase-like protein; protein id: At4g18550.1
  misc_feature (84)..(371): Homolog of NCBI NO: 15224613 NR Description: putative lipase; protein id: At2g31100.1
  misc_feature (1)..(385): Homolog of NCBI NO: 15221426 NR Description: lipase-like protein
  misc_feature (1)..(385): Homolog of NCBI NO: 21537306 NR Description: lipase-like protein [Arabidopsis thaliana]

SEQ ID NO: 32646 - DNA, 1133 bp, Arabidopsis thaliana; identical to SEQ ID NO: 29056
  misc_feature (1)..(1133): Ceres Seq. ID no. 12336045
  misc_feature: MA Experiment ID: 20000182 Result: Down-regulated in Transcription
  misc_feature: MA Experiment 20000182 PARAMETER Experiment Name: At_2mM_SA_P Parameter: Age (day) Value: 14
  misc_feature: MA Experiment 20000182 PARAMETER Experiment Name: At_2mM_SA_P Parameter: Organism Value: A. thaliana
  misc_feature: MA Experiment 20000182 PARAMETER Experiment Name: At_2mM_SA_P Parameter: Plant Line Value: WS
  misc_feature: MA Experiment 20000182 PARAMETER Experiment Name: At_2mM_SA_P Parameter: Timepoint (hr) Value: 6
  misc_feature: MA Experiment 20000182 PARAMETER Experiment Name: At_2mM_SA_P Parameter: Tissue Value: Aerial
  misc_feature: MA Experiment 20000182 PARAMETER Experiment Name: At_2mM_SA_P Parameter: Treatment Value: 2mM SA vs. No Treatment
  misc_feature: MA Experiment ID: 20000184 Result: Up-regulated in Transcription
  misc_feature: MA Experiment 20000184 PARAMETER Experiment Name: At_Shoots__P Parameter: Age (day) Value: 7
  misc_feature: MA Experiment 20000184 PARAMETER Experiment Name: At_Shoots__P Parameter: Tissue Value: Shoots vs. Whole Plant
  misc_feature: MA Experiment ID: 20000234 Result: Down-regulated in Transcription
  misc_feature: MA Experiment 20000234 PARAMETER Experiment Name: At_Siliques_P Parameter: Age (day) Value: 21
  misc_feature: MA Experiment 20000234 PARAMETER Experiment Name: At_Siliques_P Parameter: Organism Value: A. thaliana
  misc_feature: MA Experiment 20000234 PARAMETER Experiment Name: At_Siliques_P Parameter: Plant Line Value: WS
  misc_feature: MA Experiment 20000234 PARAMETER Experiment Name: At_Siliques_P Parameter: Tissue Value: Less Than 5mm Siliques vs. Whole Plant
  misc_feature: MA Experiment ID: 20000235 Result: Down-regulated in Transcription
  misc_feature: MA Experiment 20000235 PARAMETER Experiment Name: At_Siliques_P Parameter: Age (day) Value: 21
  misc_feature: MA Experiment 20000235 PARAMETER Experiment Name: At_Siliques_P Parameter: Organism Value: A. thaliana
  misc_feature: MA Experiment 20000235 PARAMETER Experiment Name: At_Siliques_P Parameter: Plant Line Value: WS
  misc_feature: MA Experiment 20000235 PARAMETER Experiment Name: At_Siliques_P Parameter: Tissue Value: 5-10mm Siliques vs. Whole Plant
  misc_feature: MA Experiment ID: 20000264 Result: Down-regulated in Transcription
  misc_feature: MA Experiment 20000264 PARAMETER Experiment Name: At_Open_Flower_P Parameter: Age (day) Value: 21
  misc_feature: MA Experiment 20000264 PARAMETER Experiment Name: At_Open_Flower_P Parameter: Plant Line Value: WS
  misc_feature: MA Experiment 20000264 PARAMETER Experiment Name: At_Open_Flower_P Parameter: Tissue Value: Open Flower vs. Whole Plant
  misc_feature: MA Experiment ID: 20000265 Result: Down-regulated in Transcription
  misc_feature: MA Experiment 20000265 PARAMETER Experiment Name: At_Open_Flower_P Parameter: Age (day) Value: 21
  misc_feature: MA Experiment 20000265 PARAMETER Experiment Name: At_Open_Flower_P Parameter: Plant Line Value: WS
  misc_feature: MA Experiment 20000265 PARAMETER Experiment Name: At_Open_Flower_P Parameter: Tissue Value: Closed Flower vs. Whole Plant
  misc_feature: MA Experiment ID: 20000308 Result: Down-regulated in Transcription
  misc_feature: MA Experiment 20000308 PARAMETER Experiment Name: At_100mM_NaCl__P Parameter: Age (day) Value: 17
  misc_feature: MA Experiment 20000308 PARAMETER Experiment Name: At_100mM_NaCl__P Parameter: Organism Value: A. thaliana
  misc_feature: MA Experiment 20000308 PARAMETER Experiment Name: At_100mM_NaCl__P Parameter: Plant Line Value: WS
  misc_feature: MA Experiment 20000308 PARAMETER Experiment Name: At_100mM_NaCl__P Parameter: Timepoint (hr) Value: 72
  misc_feature: MA Experiment 20000308 PARAMETER Experiment Name: At_100mM_NaCl__P Parameter: Tissue Value: Whole Plant
  misc_feature: MA Experiment 20000308 PARAMETER Experiment Name: At_100mM_NaCl__P Parameter: Treatment Value: 100mM NaCl vs. No Treatment
  misc_feature: MA Experiment ID: 20001247 Result: Up-regulated in Transcription
  misc_feature: MA Experiment 20001247 PARAMETER Experiment Name: At_Far-red-induction_P Parameter: Age (day) Value: 7
  misc_feature: MA Experiment 20001247 PARAMETER Experiment Name: At_Far-red-induction_P Parameter: Light Value: Far-red vs. White
  misc_feature: MA Experiment 20001247 PARAMETER Experiment Name: At_Far-red-induction_P Parameter: Organism Value: A. thaliana
  misc_feature: MA Experiment 20001247 PARAMETER Experiment Name: At_Far-red-induction_P Parameter: Plant Line Value: Columbia
  misc_feature: MA Experiment 20001247 PARAMETER Experiment Name: At_Far-red-induction_P Parameter: Timepoint (hr) Value: 1
  misc_feature: MA Experiment 20001247 PARAMETER Experiment Name: At_Far-red-induction_P Parameter: Tissue Value: Whole Plant
  misc_feature: MA Experiment ID: 20001450 Result: Up-regulated in Transcription
  misc_feature: MA Experiment 20001450 PARAMETER Experiment Name: At_Far-red-induction_P Parameter: Age (day) Value: 7
  misc_feature: MA Experiment 20001450 PARAMETER Experiment Name: At_Far-red-induction_P Parameter: Light Value: Far-red vs. White
  misc_feature: MA Experiment 20001450 PARAMETER Experiment Name: At_Far-red-induction_P Parameter: Organism Value: A. thaliana
  misc_feature: MA Experiment 20001450 PARAMETER Experiment Name: At_Far-red-induction_P Parameter: Plant Line Value: Columbia
  misc_feature: MA Experiment 20001450 PARAMETER Experiment Name: At_Far-red-induction_P Parameter: Timepoint (hr) Value: 8
  misc_feature: MA Experiment 20001450 PARAMETER Experiment Name: At_Far-red-induction_P Parameter: Tissue Value: Whole Plant
  misc_feature: MA Experiment ID: 20001451 Result: Up-regulated in Transcription
  misc_feature: MA Experiment 20001451 PARAMETER Experiment Name: At_Far-red-induction_P Parameter: Age (day) Value: 7
  misc_feature: MA Experiment 20001451 PARAMETER Experiment Name: At_Far-red-induction_P Parameter: Light Value: Far-red vs. White
  misc_feature: MA Experiment 20001451 PARAMETER Experiment Name: At_Far-red-induction_P Parameter: Organism Value: A. thaliana
  misc_feature: MA Experiment 20001451 PARAMETER Experiment Name: At_Far-red-induction_P Parameter: Plant Line Value: Columbia
  misc_feature: MA Experiment 20001451 PARAMETER Experiment Name: At_Far-red-induction_P Parameter: Timepoint (hr) Value: 24
  misc_feature: MA Experiment 20001451 PARAMETER Experiment Name: At_Far-red-induction_P Parameter: Tissue Value: Whole Plant
  misc_feature: MA Experiment ID: 20001555 Result: Down-regulated in Transcription
  misc_feature: MA Experiment 20001555 PARAMETER Experiment Name: At_Drought_Soil_Dry_P Parameter: Age (day) Value: 24
  misc_feature: MA Experiment 20001555 PARAMETER Experiment Name: At_Drought_Soil_Dry_P Parameter: Organism Value: A. thaliana
  misc_feature: MA Experiment 20001555 PARAMETER Experiment Name: At_Drought_Soil_Dry_P Parameter: Plant Line Value: WS
  misc_feature: MA Experiment 20001555 PARAMETER Experiment Name: At_Drought_Soil_Dry_P Parameter: Post Timepoint (hr) Value: None
  misc_feature: MA Experiment 20001555 PARAMETER Experiment Name: At_Drought_Soil_Dry_P Parameter: Post-Treatment Value: None
  misc_feature: MA Experiment 20001555 PARAMETER Experiment Name: At_Drought_Soil_Dry_P Parameter: Timepoint (day) Value: 10
  misc_feature: MA Experiment 20001555 PARAMETER Experiment Name: At_Drought_Soil_Dry_P Parameter: Treatment Value: Drought vs. No Drought
  misc_feature: MA Experiment ID: 20001556 Result: Down-regulated in Transcription
  misc_feature: MA Experiment 20001556 PARAMETER Experiment Name: At_Drought_Soil_Dry_P Parameter: Age (day) Value: 26
  misc_feature: MA Experiment 20001556 PARAMETER Experiment Name: At_Drought_Soil_Dry_P Parameter: Organism Value: A. thaliana
  misc_feature: MA Experiment 20001556 PARAMETER Experiment Name: At_Drought_Soil_Dry_P Parameter: Plant Line Value: WS
  misc_feature: MA Experiment 20001556 PARAMETER Experiment Name: At_Drought_Soil_Dry_P Parameter: Post Timepoint (hr) Value: None
  misc_feature: MA Experiment 20001556 PARAMETER Experiment Name: At_Drought_Soil_Dry_P Parameter: Post-Treatment Value: None
  misc_feature: MA Experiment 20001556 PARAMETER Experiment Name: At_Drought_Soil_Dry_P Parameter: Timepoint (day) Value: 12
  misc_feature: MA Experiment 20001556 PARAMETER Experiment Name: At_Drought_Soil_Dry_P Parameter: Treatment Value: Drought vs. No Drought
  misc_feature: MA Experiment ID: 20001558 Result: Down-regulated in Transcription
  misc_feature: MA Experiment 20001558 PARAMETER Experiment Name: At_Drought_Soil_Dry_P Parameter: Age (day) Value: 27
  misc_feature: MA Experiment 20001558 PARAMETER Experiment Name: At_Drought_Soil_Dry_P Parameter: Organism Value: A. thaliana
  misc_feature: MA Experiment 20001558 PARAMETER Experiment Name: At_Drought_Soil_Dry_P Parameter: Plant Line Value: WS
  misc_feature: MA Experiment 20001558 PARAMETER Experiment Name: At_Drought_Soil_Dry_P Parameter: Post Timepoint (hr) Value: 6
  misc_feature: MA Experiment 20001558 PARAMETER Experiment Name: At_Drought_Soil_Dry_P Parameter: Post-Treatment Value: Re-Water vs. No Drought
  misc_feature: MA Experiment 20001558 PARAMETER Experiment Name: At_Drought_Soil_Dry_P Parameter: Timepoint (day) Value: 13
  misc_feature: MA Experiment 20001558 PARAMETER Experiment Name: At_Drought_Soil_Dry_P Parameter: Treatment Value: Drought vs. No Drought
  misc_feature: MA Experiment ID: 20001904 Result: Down-regulated in Transcription
  misc_feature: MA Experiment 20001904 PARAMETER Experiment Name: At_Drought_Reproduction_P Parameter: Age (day) Value: 37
  misc_feature: MA Experiment 20001904 PARAMETER Experiment Name: At_Drought_Reproduction_P Parameter: Organism Value: A. thaliana
  misc_feature: MA Experiment 20001904 PARAMETER Experiment Name: At_Drought_Reproduction_P Parameter: Plant Line Value: WS
  misc_feature: MA Experiment 20001904 PARAMETER Experiment Name: At_Drought_Reproduction_P Parameter: Timepoint (day) Value: 7
  misc_feature: MA Experiment 20001904 PARAMETER Experiment Name: At_Drought_Reproduction_P Parameter: Tissue Value: Rosettes
  misc_feature: MA Experiment 20001904 PARAMETER Experiment Name: At_Drought_Reproduction_P Parameter: Treatment Value: Drought vs. No Drought

SEQ ID NO: 32647 - protein, 285 aa, Arabidopsis thaliana; identical to SEQ ID NO: 29057
  peptide (1)..(285): Ceres Seq. ID no. 12336046
  misc_feature (20)..(284): Pfam Name: Plant protein of unknown function (DUF868) Pfam Description: Plant protein of unknown function (DUF868)
  misc_feature (20)..(284): Pfam Name: Plant protein of unknown function (DUF868) Pfam Description: Plant protein of unknown function (DUF868)
  misc_feature (20)..(284): Pfam Name: Plant protein of unknown function (DUF868) Pfam Description: Plant protein of unknown function (DUF868)
  misc_feature (21)..(285): Homolog of NCBI NO: 18397034 NR Description: expressed protein
  misc_feature (21)..(285): Homolog of NCBI NO: 15241702 NR Description: putative protein
  misc_feature (25)..(283): Homolog of NCBI NO: 22331055 NR Description: hypothetical protein; protein id: At3g13229.1
  misc_feature (1)..(65): Homolog of NCBI NO: 20804936 NR Description: P0456E05.14 [Oryza sativa (japonica
  misc_feature (70)..(285): Homolog of NCBI NO: 20804936 NR Description: P0456E05.14 [Oryza sativa (japonica
  misc_feature (21)..(285): Homolog of NCBI NO: 18397034 NR Description: expressed protein
  misc_feature (25)..(283): Homolog of NCBI NO: 22331055 NR Description: hypothetical protein; protein id: At3g13229.1
  misc_feature (70)..(285): Homolog of NCBI NO: 20804936 NR Description: P0456E05.14 [Oryza sativa (japonica
  misc_feature (1)..(65): Homolog of NCBI NO: 20804936 NR Description: P0456E05.14 [Oryza sativa (japonica
  misc_feature (25)..(283): Homolog of NCBI NO: 22331055 NR Description: hypothetical protein; protein id: At3g13229.1
  misc_feature (21)..(285): Homolog of NCBI NO: 15241702 NR Description: putative protein
  misc_feature (21)..(285): Homolog of NCBI NO: 18397034 NR Description: expressed protein
  misc_feature (1)..(285): Homolog of NCBI NO: 15235452 NR Description: putative protein
  misc_feature (4)..(259): Homolog of NCBI NO: 15228105 NR Description: hypothetical protein; protein id: At2g04220.1
  misc_feature (1)..(250): Homolog of NCBI NO: 15238927 NR Description: putative protein; protein id: At5g48270.1
  misc_feature (251)..(285): Homolog of NCBI NO: 15238927 NR Description: putative protein; protein id: At5g48270.1
  misc_feature (58)..(259): Homolog of NCBI NO: 25334990 NR Description: hypothetical protein At2g04220 [imported] -
  misc_feature (1)..(285): Homolog of NCBI NO: 15235452 NR Description: putative protein
  misc_feature (4)..(259): Homolog of NCBI NO: 15228105 NR Description: hypothetical protein; protein id: At2g04220.1
  misc_feature (1)..(250): Homolog of NCBI NO: 15238927 NR Description: putative protein; protein id: At5g48270.1
  misc_feature (251)..(285): Homolog of NCBI NO: 15238927 NR Description: putative protein; protein id: At5g48270.1
  misc_feature (58)..(259): Homolog of NCBI NO: 25334990 NR Description: hypothetical protein At2g04220 [imported] -
  misc_feature (70)..(285): Homolog of NCBI NO: 20804936 NR Description: P0456E05.14 [Oryza sativa (japonica
  misc_feature (1)..(65): Homolog of NCBI NO: 20804936 NR Description: P0456E05.14 [Oryza sativa (japonica
  misc_feature (21)..(285): Homolog of NCBI NO: 15241702 NR Description: putative protein
  misc_feature (58)..(259): Homolog of NCBI NO: 25334990 NR Description: hypothetical protein At2g04220 [imported] -
  misc_feature (251)..(285): Homolog of NCBI NO: 15238927 NR Description: putative protein; protein id: At5g48270.1
  misc_feature (1)..(250): Homolog of NCBI NO: 15238927 NR Description: putative protein; protein id: At5g48270.1
  misc_feature (4)..(259): Homolog of NCBI NO: 15228105 NR Description: hypothetical protein; protein id: At2g04220.1
  misc_feature (1)..(285): Homolog of NCBI NO: 15235452 NR Description: putative protein

SEQ ID NO: 32648 - protein, 251 aa, Arabidopsis thaliana; identical to SEQ ID NO: 29058
  peptide (1)..(251): Ceres Seq. ID no. 12336047
  misc_feature (1)..(250): Pfam Name: Plant protein of unknown function (DUF868) Pfam Description: Plant protein of unknown function (DUF868)
  misc_feature (1)..(250): Pfam Name: Plant protein of unknown function (DUF868) Pfam Description: Plant protein of unknown function (DUF868)
  misc_feature (1)..(250): Pfam Name: Plant protein of unknown function (DUF868) Pfam Description: Plant protein of unknown function (DUF868)
  misc_feature (1)..(251): Homolog of NCBI NO: 18397034 NR Description: expressed protein
  misc_feature (1)..(251): Homolog of NCBI NO: 15241702 NR Description: putative protein
  misc_feature (1)..(249): Homolog of NCBI NO: 22331055 NR Description: hypothetical protein; protein id: At3g13229.1
  misc_feature (1)..(31): Homolog of NCBI NO: 20804936 NR Description: P0456E05.14 [Oryza sativa (japonica
  misc_feature (36)..(251): Homolog of NCBI NO: 20804936 NR Description: P0456E05.14 [Oryza sativa (japonica
  misc_feature (1)..(251): Homolog of NCBI NO: 18397034 NR Description: expressed protein
  misc_feature (1)..(249): Homolog of NCBI NO: 22331055 NR Description: hypothetical protein; protein id: At3g13229.1
  misc_feature (36)..(251): Homolog of NCBI NO: 20804936 NR Description: P0456E05.14 [Oryza sativa (japonica
  misc_feature (1)..(31): Homolog of NCBI NO: 20804936 NR Description: P0456E05.14 [Oryza sativa (japonica
  misc_feature (1)..(249): Homolog of NCBI NO: 22331055 NR Description: hypothetical protein; protein id: At3g13229.1
  misc_feature (1)..(251): Homolog of NCBI NO: 15241702 NR Description: putative protein
  misc_feature (1)..(251): Homolog of NCBI NO: 18397034 NR Description: expressed protein
  misc_feature (1)..(251): Homolog of NCBI NO: 15235452 NR Description: putative protein
  misc_feature (1)..(225): Homolog of NCBI NO: 15228105 NR Description: hypothetical protein; protein id: At2g04220.1
  misc_feature (1)..(216): Homolog of NCBI NO: 15238927 NR Description: putative protein; protein id: At5g48270.1
  misc_feature (217)..(251): Homolog of NCBI NO: 15238927 NR Description: putative protein; protein id: At5g48270.1
  misc_feature (24)..(225): Homolog of NCBI NO: 25334990 NR Description: hypothetical protein At2g04220 [imported] -
  misc_feature (1)..(251): Homolog of NCBI NO: 15235452 NR Description: putative protein
  misc_feature (1)..(225): Homolog of NCBI NO: 15228105 NR Description: hypothetical protein; protein id: At2g04220.1
  misc_feature (1)..(216): Homolog of NCBI NO: 15238927 NR Description: putative protein; protein id: At5g48270.1
  misc_feature (217)..(251): Homolog of NCBI NO: 15238927 NR Description: putative protein; protein id: At5g48270.1
  misc_feature (24)..(225): Homolog of NCBI NO: 25334990 NR Description: hypothetical protein At2g04220 [imported] -
  misc_feature (36)..(251): Homolog of NCBI NO: 20804936 NR Description: P0456E05.14 [Oryza sativa (japonica
  misc_feature (1)..(31): Homolog of NCBI NO: 20804936 NR Description: P0456E05.14 [Oryza sativa (japonica
  misc_feature (1)..(251): Homolog of NCBI NO: 15241702 NR Description: putative protein
  misc_feature (24)..(225): Homolog of NCBI NO: 25334990 NR Description: hypothetical protein At2g04220 [imported] -
  misc_feature (217)..(251): Homolog of NCBI NO: 15238927 NR Description: putative protein; protein id: At5g48270.1
  misc_feature (1)..(216): Homolog of NCBI NO: 15238927 NR Description: putative protein; protein id: At5g48270.1
  misc_feature (1)..(225): Homolog of NCBI NO: 15228105 NR Description: hypothetical protein; protein id: At2g04220.1
  misc_feature (1)..(251): Homolog of NCBI NO: 15235452 NR Description: putative protein

SEQ ID NO: 32649 - protein, 235 aa, Arabidopsis thaliana; identical to SEQ ID NO: 29059
  peptide (1)..(235): Ceres Seq. ID no. 12336048
  misc_feature (1)..(234): Pfam Name: Plant protein of unknown function (DUF868) Pfam Description: Plant protein of unknown function (DUF868)
  misc_feature (1)..(234): Pfam Name: Plant protein of unknown function (DUF868) Pfam Description: Plant protein of unknown function (DUF868)
  misc_feature (1)..(234): Pfam Name: Plant protein of unknown function (DUF868) Pfam Description: Plant protein of unknown function (DUF868)
  misc_feature (1)..(235): Homolog of NCBI NO: 18397034 NR Description: expressed protein
  misc_feature (1)..(235): Homolog of NCBI NO: 15241702 NR Description: putative protein
  misc_feature (1)..(233): Homolog of NCBI NO: 22331055 NR Description: hypothetical protein; protein id: At3g13229.1
  misc_feature (1)..(15): Homolog of NCBI NO: 20804936 NR Description: P0456E05.14 [Oryza sativa (japonica
  misc_feature (20)..(235): Homolog of NCBI NO: 20804936 NR Description: P0456E05.14 [Oryza sativa (japonica
  misc_feature (1)..(235): Homolog of NCBI NO: 18397034 NR Description: expressed protein
  misc_feature (1)..(233): Homolog of NCBI NO: 22331055 NR Description: hypothetical protein; protein id: At3g13229.1
  misc_feature (20)..(235): Homolog of NCBI NO: 20804936 NR Description: P0456E05.14 [Oryza sativa (japonica
  misc_feature (1)..(15): Homolog of NCBI NO: 20804936 NR Description: P0456E05.14 [Oryza sativa (japonica
  misc_feature (1)..(233): Homolog of NCBI NO: 22331055 NR Description: hypothetical protein; protein id: At3g13229.1
  misc_feature (1)..(235): Homolog of NCBI NO: 15241702 NR Description: putative protein
  misc_feature (1)..(235): Homolog of NCBI NO: 18397034 NR Description: expressed protein
  misc_feature (1)..(235): Homolog of NCBI NO: 15235452 NR Description: putative protein
  misc_feature (1)..(209): Homolog of NCBI NO: 15228105 NR Description: hypothetical protein; protein id: At2g04220.1
  misc_feature (1)..(200): Homolog of NCBI NO: 15238927 NR Description: putative protein; protein id: At5g48270.1
  misc_feature (201)..(235): Homolog of NCBI NO: 15238927 NR Description: putative protein; protein id: At5g48270.1
  misc_feature (8)..(209): Homolog of NCBI NO: 25334990 NR Description: hypothetical protein At2g04220 [imported] -
  misc_feature (1)..(235): Homolog of NCBI NO: 15235452 NR Description: putative protein
  misc_feature (1)..(209): Homolog of NCBI NO: 15228105 NR Description: hypothetical protein; protein id: At2g04220.1
  misc_feature (1)..(200): Homolog of NCBI NO: 15238927 NR Description: putative protein; protein id: At5g48270.1
  misc_feature (201)..(235): Homolog of NCBI NO: 15238927 NR Description: putative protein; protein id: At5g48270.1
  misc_feature (8)..(209): Homolog of NCBI NO: 25334990 NR Description: hypothetical protein At2g04220 [imported] -
  misc_feature (20)..(235): Homolog of NCBI NO: 20804936 NR Description: P0456E05.14 [Oryza sativa (japonica
  misc_feature (1)..(15): Homolog of NCBI NO: 20804936 NR Description: P0456E05.14 [Oryza sativa (japonica
  misc_feature (1)..(235): Homolog of NCBI NO: 15241702 NR Description: putative protein
  misc_feature (8)..(209): Homolog of NCBI NO: 25334990 NR Description: hypothetical protein At2g04220 [imported] -
  misc_feature (201)..(235): Homolog of NCBI NO: 15238927 NR Description: putative protein; protein id: At5g48270.1
  misc_feature (1)..(200): Homolog of NCBI NO: 15238927 NR Description: putative protein; protein id: At5g48270.1
  misc_feature (1)..(209): Homolog of NCBI NO: 15228105 NR Description: hypothetical protein; protein id: At2g04220.1
  misc_feature (1)..(235): Homolog of NCBI NO: 15235452 NR Description: putative protein

SEQ ID NO: 32650 - DNA, 1106 bp, Arabidopsis thaliana; identical to SEQ ID NO: 29060
  misc_feature (1)..(1106): Ceres Seq. ID no. 12338629
  misc_feature: MA Experiment ID: 108573 Result: Up-regulated in Transcription
  misc_feature: MA Experiment 108573 PARAMETER Experiment Name: At_Drought_cDNA_P Parameter: Timepoint (hr) Value: 6
  misc_feature: MA Experiment 108573 PARAMETER Experiment Name: At_Drought_cDNA_P Parameter: Tissue Value: Aerial
  misc_feature: MA Experiment 108573 PARAMETER Experiment Name: At_Drought_cDNA_P Parameter: Treatment Value: Drought vs. No Drought
  misc_feature: MA Experiment ID: 108595 Result: Down-regulated in Transcription
  misc_feature: MA Experiment 108595 PARAMETER Experiment Name: At_Ler-pi_Ovule_cDNA_P Parameter: Plant Line Value: null
  misc_feature: MA Experiment ID: 20000173 Result: Down-regulated in Transcription
  misc_feature: MA Experiment 20000173 PARAMETER Experiment Name: At_42deg_Heat_P Parameter: Age (day) Value: 14
  misc_feature: MA Experiment 20000173 PARAMETER Experiment Name: At_42deg_Heat_P Parameter: Organism Value: A. thaliana
  misc_feature: MA Experiment 20000173 PARAMETER Experiment Name: At_42deg_Heat_P Parameter: Plant Line Value: WS
  misc_feature: MA Experiment 20000173 PARAMETER Experiment Name: At_42deg_Heat_P Parameter: Temperature (deg C) Value: 42 vs. 22
  misc_feature: MA Experiment 20000173 PARAMETER Experiment Name: At_42deg_Heat_P Parameter: Timepoint (hr) Value: 6
  misc_feature: MA Experiment 20000173 PARAMETER Experiment Name: At_42deg_Heat_P Parameter: Tissue Value: Aerial
  misc_feature: MA Experiment ID: 20000185 Result: Up-regulated in Transcription
  misc_feature: MA Experiment 20000185 PARAMETER Experiment Name: At_Roots__P Parameter: Age (day) Value: 7 vs. 21
  misc_feature: MA Experiment 20000185 PARAMETER Experiment Name: At_Roots__P Parameter: Organism Value: A. thaliana
  misc_feature: MA Experiment 20000185 PARAMETER Experiment Name: At_Roots__P Parameter: Tissue Value: Roots vs. Whole Plant

SEQ ID NO: 32651 - protein, 276 aa, Arabidopsis thaliana; identical to SEQ ID NO: 29061
  peptide (1)..(276): Ceres Seq. ID no. 12338630
  misc_feature (4)..(269): Pfam Name: Eukaryotic porin Pfam Description: Eukaryotic porin
  misc_feature (1)..(276): Homolog of NCBI NO: 5031279 NR Description: porin [Prunus armeniaca]
  misc_feature (1)..(276): Homolog of NCBI NO: 1172558 NR Description: Outer plastidial membrane protein porin
  misc_feature (1)..(276): Homolog of NCBI NO: 36957183 NR Description: VDAC1.2 [Lotus corniculatus var. japonicus]
  misc_feature (1)..(276): Homolog of NCBI NO: 1172555 NR Description: 34 kDa outer mitochondrial membrane protein porin
  misc_feature (1)..(276): Homolog of NCBI NO: 36957170 NR Description: VDAC1.1 [Lotus corniculatus var. japonicus]
  misc_feature (1)..(276): Homolog of NCBI NO: 7442953 NR Description: porin - common ice plant
  misc_feature (3)..(276): Homolog of NCBI NO: 29367429 NR Description: porin-like protein [Oryza sativa (japonica
  misc_feature (3)..(276): Homolog of NCBI NO: 31249532 NR Description: PgPOR29 [Pennisetum glaucum]
  misc_feature (1)..(276): Homolog of NCBI NO: 36957216 NR Description: VDAC2.1 [Lotus corniculatus var. japonicus]
  misc_feature (1)..(276): Homolog of NCBI NO: 15240765 NR Description: porin-like protein

SEQ ID NO: 32652 - DNA, 1321 bp, Arabidopsis thaliana; identical to SEQ ID NO: 29062
  misc_feature (1)..(1321): Ceres Seq. ID no. 12338275
  misc_feature: MA Experiment ID: 20000171 Result: Up-regulated in Transcription
  misc_feature: MA Experiment 20000171 PARAMETER Experiment Name: At_42deg_Heat_P Parameter: Age (day) Value: 14
  misc_feature: MA Experiment 20000171 PARAMETER Experiment Name: At_42deg_Heat_P Parameter: Organism Value: A. thaliana
  misc_feature: MA Experiment 20000171 PARAMETER Experiment Name: At_42deg_Heat_P Parameter: Plant Line Value: WS
  misc_feature: MA Experiment 20000171 PARAMETER Experiment Name: At_42deg_Heat_P Parameter: Temperature (deg C) Value: 42 vs. 22
  misc_feature: MA Experiment 20000171 PARAMETER Experiment Name: At_42deg_Heat_P Parameter: Timepoint (hr) Value: 1
  misc_feature: MA Experiment 20000171 PARAMETER Experiment Name: At_42deg_Heat_P Parameter: Tissue Value: Aerial
  misc_feature: MA Experiment ID: 20000173 Result: Up-regulated in Transcription
  misc_feature: MA Experiment 20000173 PARAMETER Experiment Name: At_42deg_Heat_P Parameter: Age (day) Value: 14
  misc_feature: MA Experiment 20000173 PARAMETER Experiment Name: At_42deg_Heat_P Parameter: Organism Value: A. thaliana
  misc_feature: MA Experiment 20000173 PARAMETER Experiment Name: At_42deg_Heat_P Parameter: Plant Line Value: WS
  misc_feature: MA Experiment 20000173 PARAMETER Experiment Name: At_42deg_Heat_P Parameter: Temperature (deg C) Value: 42 vs. 22
  misc_feature: MA Experiment 20000173 PARAMETER Experiment Name: At_42deg_Heat_P Parameter: Timepoint (hr) Value: 6
  misc_feature: MA Experiment 20000173 PARAMETER Experiment Name: At_42deg_Heat_P Parameter: Tissue Value: Aerial
  misc_feature: MA Experiment ID: 20000180 Result: Up-regulated in Transcription
  misc_feature: MA Experiment 20000180 PARAMETER Experiment Name: At_Germinating_Seeds_P Parameter: Age (hr) Value: 24 vs. 0
  misc_feature: MA Experiment 20000180 PARAMETER Experiment Name: At_Germinating_Seeds_P Parameter: Tissue Value: Germinating Seeds
  misc_feature: MA Experiment ID: 20000185 Result: Up-regulated in Transcription
  misc_feature: MA Experiment 20000185 PARAMETER Experiment Name: At_Roots__P Parameter: Age (day) Value: 7 vs. 21
  misc_feature: MA Experiment 20000185 PARAMETER Experiment Name: At_Roots__P Parameter: Organism Value: A. thaliana
  misc_feature: MA Experiment 20000185 PARAMETER Experiment Name: At_Roots__P Parameter: Tissue Value: Roots vs. Whole Plant
  misc_feature: MA Experiment ID: 20000227 Result: Down-regulated in Transcription
  misc_feature: MA Experiment 20000227 PARAMETER Experiment Name: At_Root-Tips-vs-Tops_P Parameter: Tissue Value: Root Tips vs. Root Tops
  misc_feature: MA Experiment ID: 20000265 Result: Up-regulated in Transcription
  misc_feature: MA Experiment 20000265 PARAMETER Experiment Name: At_Open_Flower_P Parameter: Age (day) Value: 21
  misc_feature: MA Experiment 20000265 PARAMETER Experiment Name: At_Open_Flower_P Parameter: Plant Line Value: WS
  misc_feature: MA Experiment 20000265 PARAMETER Experiment Name: At_Open_Flower_P Parameter: Tissue Value: Closed Flower vs. Whole Plant
  misc_feature: MA Experiment ID: 20000286 Result: Up-regulated in Transcription
  misc_feature: MA Experiment 20000286 PARAMETER Experiment Name: At_Open_Flower_P Parameter: Age (day) Value: 21
  misc_feature: MA Experiment 20000286 PARAMETER Experiment Name: At_Open_Flower_P Parameter: Plant Line Value: WS
  misc_feature: MA Experiment 20000286 PARAMETER Experiment Name: At_Open_Flower_P Parameter: Tissue Value: Half Open vs. Whole Plant
  misc_feature: MA Experiment ID: 20000439 Result: Up-regulated in Transcription
  misc_feature: MA Experiment 20000439 PARAMETER Experiment Name: At_Roots__P Parameter: Age (day) Value: 14 vs. 21
  misc_feature: MA Experiment 20000439 PARAMETER Experiment Name: At_Roots__P Parameter: Organism Value: A. thaliana
  misc_feature: MA Experiment 20000439 PARAMETER Experiment Name: At_Roots__P Parameter: Tissue Value: Roots vs. Whole Plant
  misc_feature: MA Experiment ID: 20000451 Result: Up-regulated in Transcription
  misc_feature: MA Experiment 20000451 PARAMETER Experiment Name: At_CS6879_Shoots-Roots_P Parameter: Age (day) Value: 14
  misc_feature: MA Experiment 20000451 PARAMETER Experiment Name: At_CS6879_Shoots-Roots_P Parameter: Organism Value: A. thaliana
  misc_feature: MA Experiment 20000451 PARAMETER Experiment Name: At_CS6879_Shoots-Roots_P Parameter: Plant Line Value: CS6879 vs. WS
  misc_feature: MA Experiment 20000451 PARAMETER Experiment Name: At_CS6879_Shoots-Roots_P Parameter: Tissue Value: Roots
  misc_feature: MA Experiment ID: 20001556 Result: Up-regulated in Transcription
  misc_feature: MA Experiment 20001556 PARAMETER Experiment Name: At_Drought_Soil_Dry_P Parameter: Age (day) Value: 26
  misc_feature: MA Experiment 20001556 PARAMETER Experiment Name: At_Drought_Soil_Dry_P Parameter: Organism Value: A. thaliana
  misc_feature: MA Experiment 20001556 PARAMETER Experiment Name: At_Drought_Soil_Dry_P Parameter: Plant Line Value: WS
  misc_feature: MA Experiment 20001556 PARAMETER Experiment Name: At_Drought_Soil_Dry_P Parameter: Post Timepoint (hr) Value: None
  misc_feature: MA Experiment 20001556 PARAMETER Experiment Name: At_Drought_Soil_Dry_P Parameter: Post-Treatment Value: None
  misc_feature: MA Experiment 20001556 PARAMETER Experiment Name: At_Drought_Soil_Dry_P Parameter: Timepoint (day) Value: 12
  misc_feature: MA Experiment 20001556 PARAMETER Experiment Name: At_Drought_Soil_Dry_P Parameter: Treatment Value: Drought vs. No Drought
  misc_feature: MA Experiment ID: 20001904 Result: Up-regulated in Transcription
  misc_feature: MA Experiment 20001904 PARAMETER Experiment Name: At_Drought_Reproduction_P Parameter: Age (day) Value: 37
  misc_feature: MA Experiment 20001904 PARAMETER Experiment Name: At_Drought_Reproduction_P Parameter: Organism Value: A. thaliana
  misc_feature: MA Experiment 20001904 PARAMETER Experiment Name: At_Drought_Reproduction_P Parameter: Plant Line Value: WS
  misc_feature: MA Experiment 20001904 PARAMETER Experiment Name: At_Drought_Reproduction_P Parameter: Timepoint (day) Value: 7
  misc_feature: MA Experiment 20001904 PARAMETER Experiment Name: At_Drought_Reproduction_P Parameter: Tissue Value: Rosettes
  misc_feature: MA Experiment 20001904 PARAMETER Experiment Name: At_Drought_Reproduction_P Parameter: Treatment Value: Drought vs. No Drought
  misc_feature: MA Experiment ID: 20001905 Result: Up-regulated in Transcription
  misc_feature: MA Experiment 20001905 PARAMETER Experiment Name: At_Drought_Reproduction_P Parameter: Age (day) Value: 40
  misc_feature: MA Experiment 20001905 PARAMETER Experiment Name: At_Drought_Reproduction_P Parameter: Organism Value: A. thaliana
  misc_feature: MA Experiment 20001905 PARAMETER Experiment Name: At_Drought_Reproduction_P Parameter: Plant Line Value: WS
  misc_feature: MA Experiment 20001905 PARAMETER Experiment Name: At_Drought_Reproduction_P Parameter: Timepoint (day) Value: 10
  misc_feature: MA Experiment 20001905 PARAMETER Experiment Name: At_Drought_Reproduction_P Parameter: Tissue Value: Rosettes
  misc_feature: MA Experiment 20001905 PARAMETER Experiment Name: At_Drought_Reproduction_P Parameter: Treatment Value: Drought vs. No Drought
  misc_feature: MA Experiment ID: 20001906 Result: Up-regulated in Transcription
  misc_feature: MA Experiment 20001906 PARAMETER Experiment Name: At_Drought_Reproduction_P Parameter: Age (day) Value: 35
  misc_feature: MA Experiment 20001906 PARAMETER Experiment Name: At_Drought_Reproduction_P Parameter: Organism Value: A. thaliana
  misc_feature: MA Experiment 20001906 PARAMETER Experiment Name: At_Drought_Reproduction_P Parameter: Plant Line Value: WS
  misc_feature: MA Experiment 20001906 PARAMETER Experiment Name: At_Drought_Reproduction_P Parameter: Timepoint (day) Value: 5
  misc_feature: MA Experiment 20001906 PARAMETER Experiment Name: At_Drought_Reproduction_P Parameter: Tissue Value: Siliques
  misc_feature: MA Experiment 20001906 PARAMETER Experiment Name: At_Drought_Reproduction_P Parameter: Treatment Value: Drought vs. No Drought

SEQ ID NO: 32653 - protein, 343 aa, Arabidopsis thaliana; identical to SEQ ID NO: 29063
  peptide (1)..(343): Ceres Seq. ID no. 12338276
  misc_feature (23)..(149): Pfam Name: No apical meristem (NAM) protein Pfam Description: No apical meristem (NAM) protein
  misc_feature (21)..(343): Homolog of NCBI NO: 30682054 NR Description: NAM (no apical meristem)-related protein
  misc_feature (8)..(343): Homolog of NCBI NO: 30682048 NR Description: NAM (no apical meristem)-related protein
  misc_feature (21)..(343): Homolog of NCBI NO: 21537315 NR Description: NAM, no apical meristem,-like protein
  misc_feature (8)..(343): Homolog of NCBI NO: 15240252 NR Description: NAM, no apical meristem, - like protein

SEQ ID NO: 32654 - protein, 336 aa, Arabidopsis thaliana; identical to SEQ ID NO: 29064
  peptide (1)..(336): Ceres Seq. ID no. 12338277
  misc_feature (16)..(142): Pfam Name: No apical meristem (NAM) protein Pfam Description: No apical meristem (NAM) protein
  misc_feature (14)..(336): Homolog of NCBI NO: 30682054 NR Description: NAM (no apical meristem)-related protein
  misc_feature (1)..(336): Homolog of NCBI NO: 30682048 NR Description: NAM (no apical meristem)-related protein
  misc_feature (14)..(336): Homolog of NCBI NO: 21537315 NR Description: NAM, no apical meristem,-like protein
  misc_feature (1)..(336): Homolog of NCBI NO: 15240252 NR Description: NAM, no apical meristem, - like protein

SEQ ID NO: 32655 - protein, 323 aa, Arabidopsis thaliana; identical to SEQ ID NO: 29065
  peptide (1)..(323): Ceres Seq. ID no. 12338278
  misc_feature (3)..(129): Pfam Name: No apical meristem (NAM) protein Pfam Description: No apical meristem (NAM) protein
  misc_feature (1)..(323): Homolog of NCBI NO: 30682054 NR Description: NAM (no apical meristem)-related protein
  misc_feature (1)..(323): Homolog of NCBI NO: 30682048 NR Description: NAM (no apical meristem)-related protein
  misc_feature (1)..(323): Homolog of NCBI NO: 21537315 NR Description: NAM, no apical meristem,-like protein
  misc_feature (1)..(323): Homolog of NCBI NO: 15240252 NR Description: NAM, no apical meristem, - like protein

SEQ ID NO: 32656 - DNA, 1227 bp, Arabidopsis thaliana; identical to SEQ ID NO: 29066
  misc_feature (1)..(1227): Ceres Seq. ID no. 12338983
  misc_feature: MA Experiment ID: 108461 Result: Up-regulated in Transcription
  misc_feature: MA Experiment 108461 PARAMETER Experiment Name: At_Germinating_Seeds_cDNA_P Parameter: Age (day) Value: 1 vs. 0
  misc_feature: MA Experiment 108461 PARAMETER Experiment Name: At_Germinating_Seeds_cDNA_P Parameter: Tissue Value: Germinating Seeds
  misc_feature: MA Experiment ID: 108585 Result: Up-regulated in Transcription
  misc_feature: MA Experiment 108585 PARAMETER Experiment Name: At_5mM_NaNP_cDNA_P Parameter: Timepoint (hr) Value: 6
  misc_feature: MA Experiment 108585 PARAMETER Experiment Name: At_5mM_NaNP_cDNA_P Parameter: Tissue Value: Aerial
  misc_feature: MA Experiment 108585 PARAMETER Experiment Name: At_5mM_NaNP_cDNA_P Parameter: Treatment Value: null
  misc_feature: MA Experiment ID: 20000171 Result: Up-regulated in Transcription
  misc_feature: MA Experiment 20000171 PARAMETER Experiment Name: At_42deg_Heat_P Parameter: Age (day) Value: 14
  misc_feature: MA Experiment 20000171 PARAMETER Experiment Name: At_42deg_Heat_P Parameter: Organism Value: A. thaliana
  misc_feature: MA Experiment 20000171 PARAMETER Experiment Name: At_42deg_Heat_P Parameter: Plant Line Value: WS
  misc_feature: MA Experiment 20000171 PARAMETER Experiment Name: At_42deg_Heat_P Parameter: Temperature (deg C) Value: 42 vs. 22
  misc_feature: MA Experiment 20000171 PARAMETER Experiment Name: At_42deg_Heat_P Parameter: Timepoint (hr) Value: 1
  misc_feature: MA Experiment 20000171 PARAMETER Experiment Name: At_42deg_Heat_P Parameter: Tissue Value: Aerial
  misc_feature: MA Experiment ID: 20000179 Result: Up-regulated in Transcription
  misc_feature: MA Experiment 20000179 PARAMETER Experiment Name: At_Germinating_Seeds_P Parameter: Age (hr) Value: 6 vs. 0
  misc_feature: MA Experiment 20000179 PARAMETER Experiment Name: At_Germinating_Seeds_P Parameter: Tissue Value: Germinating Seeds
  misc_feature: MA Experiment ID: 20000180 Result: Up-regulated in Transcription
  misc_feature: MA Experiment 20000180 PARAMETER Experiment Name: At_Germinating_Seeds_P Parameter: Age (hr) Value: 24 vs. 0
  misc_feature: MA Experiment 20000180 PARAMETER Experiment Name: At_Germinating_Seeds_P Parameter: Tissue Value: Germinating Seeds
  misc_feature: MA Experiment ID: 20000185 Result: Up-regulated in Transcription
  misc_feature: MA Experiment 20000185 PARAMETER Experiment Name: At_Roots__P Parameter: Age (day) Value: 7 vs. 21
  misc_feature: MA Experiment 20000185 PARAMETER Experiment Name: At_Roots__P Parameter: Organism Value: A. thaliana
  misc_feature: MA Experiment 20000185 PARAMETER Experiment Name: At_Roots__P Parameter: Tissue Value: Roots vs. Whole Plant
  misc_feature: MA Experiment ID: 20000439 Result: Up-regulated in Transcription
  misc_feature: MA Experiment 20000439 PARAMETER Experiment Name: At_Roots__P Parameter: Age (day) Value: 14 vs. 21
  misc_feature: MA Experiment 20000439 PARAMETER Experiment Name: At_Roots__P Parameter: Organism Value: A. thaliana
  misc_feature: MA Experiment 20000439 PARAMETER Experiment Name: At_Roots__P Parameter: Tissue Value: Roots vs. Whole Plant
  misc_feature: MA Experiment ID: 20001556 Result: Down-regulated in Transcription
  misc_feature: MA Experiment 20001556 PARAMETER Experiment Name: At_Drought_Soil_Dry_P Parameter: Age (day) Value: 26
  misc_feature: MA Experiment 20001556 PARAMETER Experiment Name: At_Drought_Soil_Dry_P Parameter: Organism Value: A. thaliana
  misc_feature: MA Experiment 20001556 PARAMETER Experiment Name: At_Drought_Soil_Dry_P Parameter: Plant Line Value: WS
  misc_feature: MA Experiment 20001556 PARAMETER Experiment Name: At_Drought_Soil_Dry_P Parameter: Post Timepoint (hr) Value: None
  misc_feature: MA Experiment 20001556 PARAMETER Experiment Name: At_Drought_Soil_Dry_P Parameter: Post-Treatment Value: None
  misc_feature: MA Experiment 20001556 PARAMETER Experiment Name: At_Drought_Soil_Dry_P Parameter: Timepoint (day) Value: 12
  misc_feature: MA Experiment 20001556 PARAMETER Experiment Name: At_Drought_Soil_Dry_P Parameter: Treatment Value: Drought vs. No Drought
  misc_feature: MA Experiment ID: 20001558 Result: Down-regulated in Transcription
  misc_feature: MA Experiment 20001558 PARAMETER Experiment Name: At_Drought_Soil_Dry_P Parameter: Age (day) Value: 27
  misc_feature: MA Experiment 20001558 PARAMETER Experiment Name: At_Drought_Soil_Dry_P Parameter: Organism Value: A. thaliana
  misc_feature: MA Experiment 20001558 PARAMETER Experiment Name: At_Drought_Soil_Dry_P Parameter: Plant Line Value: WS
  misc_feature: MA Experiment 20001558 PARAMETER Experiment Name: At_Drought_Soil_Dry_P Parameter: Post Timepoint (hr) Value: 6
  misc_feature: MA Experiment 20001558 PARAMETER Experiment Name: At_Drought_Soil_Dry_P Parameter: Post-Treatment Value: Re-Water vs. No Drought
  misc_feature: MA Experiment 20001558 PARAMETER Experiment Name: At_Drought_Soil_Dry_P Parameter: Timepoint (day) Value: 13
  misc_feature: MA Experiment 20001558 PARAMETER Experiment Name: At_Drought_Soil_Dry_P Parameter: Treatment Value: Drought vs. No Drought

SEQ ID NO: 32657 - protein, 357 aa, Arabidopsis thaliana; identical to SEQ ID NO: 29067
  peptide (1)..(357): Ceres Seq. ID no. 12338984
  misc_feature (209)..(310): Pfam Name: 2OG-Fe(II) oxygenase superfamily Pfam Description: 2OG-Fe(II) oxygenase superfamily
  misc_feature (3)..(347): Homolog of NCBI NO: 37536802 NR Description: putative ethylene-forming enzyme
  misc_feature (17)..(332): Homolog of NCBI NO: 34898470 NR Description: ESTs D47168(S12332),D46350(S10967) correspond to region of the predicted gene.~Similar to Prunus armeniaca
  misc_feature (17)..(334): Homolog of NCBI NO: 24413982 NR Description: ethylene-forming-enzyme-like dioxygenase-like
  misc_feature (17)..(345): Homolog of NCBI NO: 24413984 NR Description: ethylene-forming-enzyme-like dioxygenase-like
  misc_feature (16)..(357): Homolog of NCBI NO: 2688828 NR Description: ethylene-forming-enzyme-like dioxygenase [Prunus
  misc_feature (9)..(357): Homolog of NCBI NO: 15239524 NR Description: ethylene-forming-enzyme-like dioxygenase; protein
  misc_feature (9)..(357): Homolog of NCBI NO: 15222131 NR Description: flavonol synthase, putative; protein id:
  misc_feature (9)..(357): Homolog of NCBI NO: 15241348 NR Description: ethylene-forming-enzyme-like dioxygenase-like
  misc_feature (9)..(357): Homolog of NCBI NO: 21593366 NR Description: ethylene-forming-enzyme-like dioxygenase-like
  misc_feature (9)..(357): Homolog of NCBI NO: 15241383 NR Description: ethylene-forming-enzyme-like dioxygenase - like

SEQ ID NO: 32658 - protein, 349 aa, Arabidopsis thaliana; identical to SEQ ID NO: 29068
  peptide (1)..(349): Ceres Seq. ID no. 12338985
  misc_feature (201)..(302): Pfam Name: 2OG-Fe(II) oxygenase superfamily Pfam Description: 2OG-Fe(II) oxygenase superfamily
  misc_feature (1)..(339): Homolog of NCBI NO: 37536802 NR Description: putative ethylene-forming enzyme
  misc_feature (9)..(324): Homolog of NCBI NO: 34898470 NR Description: ESTs D47168(S12332),D46350(S10967) correspond to region of the predicted gene.~Similar to Prunus armeniaca
  misc_feature (9)..(326): Homolog of NCBI NO: 24413982 NR Description: ethylene-forming-enzyme-like dioxygenase-like
  misc_feature (9)..(337): Homolog of NCBI NO: 24413984 NR Description: ethylene-forming-enzyme-like dioxygenase-like
  misc_feature (8)..(349): Homolog of NCBI NO: 2688828 NR Description: ethylene-forming-enzyme-like dioxygenase [Prunus
  misc_feature (1)..(349): Homolog of NCBI NO: 15239524 NR Description: ethylene-forming-enzyme-like dioxygenase; protein
  misc_feature (1)..(349): Homolog of NCBI NO: 15222131 NR Description: flavonol synthase, putative; protein id:
  misc_feature (1)..(349): Homolog of NCBI NO: 15241348 NR Description: ethylene-forming-enzyme-like dioxygenase-like
  misc_feature (1)..(349): Homolog of NCBI NO: 21593366 NR Description: ethylene-forming-enzyme-like dioxygenase-like
  misc_feature (1)..(349): Homolog of NCBI NO: 15241383 NR Description: ethylene-forming-enzyme-like dioxygenase - like

SEQ ID NO: 32659 - protein, 307 aa, Arabidopsis thaliana; identical to SEQ ID NO: 29069
  peptide (1)..(307): Ceres Seq. ID no. 12338987
  misc_feature (159)..(260): Pfam Name: 2OG-Fe(II) oxygenase superfamily Pfam Description: 2OG-Fe(II) oxygenase superfamily
  misc_feature (1)..(297): Homolog of NCBI NO: 37536802 NR Description: putative ethylene-forming enzyme
  misc_feature (1)..(282): Homolog of NCBI NO: 34898470 NR Description: ESTs D47168(S12332),D46350(S10967) correspond to region of the predicted gene.~Similar to Prunus armeniaca
  misc_feature (1)..(284): Homolog of NCBI NO: 24413982 NR Description: ethylene-forming-enzyme-like dioxygenase-like
  misc_feature (1)..(295): Homolog of NCBI NO: 24413984 NR Description: ethylene-forming-enzyme-like dioxygenase-like
  misc_feature (1)..(307): Homolog of NCBI NO: 2688828 NR Description: ethylene-forming-enzyme-like dioxygenase [Prunus
  misc_feature (1)..(307): Homolog of NCBI NO: 15239524 NR Description: ethylene-forming-enzyme-like dioxygenase; protein
  misc_feature (1)..(307): Homolog of NCBI NO: 15222131 NR Description: flavonol synthase, putative; protein id:
  misc_feature (1)..(307): Homolog of NCBI NO: 15241348 NR Description: ethylene-forming-enzyme-like dioxygenase-like
  misc_feature (1)..(307): Homolog of NCBI NO: 21593366 NR Description: ethylene-forming-enzyme-like dioxygenase-like
  misc_feature (1)..(307): Homolog of NCBI NO: 15241383 NR Description: ethylene-forming-enzyme-like dioxygenase - like

SEQ ID NO: 32660 - DNA, 1976 bp, Arabidopsis thaliana; identical to SEQ ID NO: 29070
  misc_feature (1)..(1976): Ceres Seq. ID no. 13497375
  misc_feature: MA Experiment ID: 108434 Result: Up-regulated in Transcription
  misc_feature: MA Experiment 108434 PARAMETER Experiment Name: At_Root_Tips_cDNA_P Parameter: Tissue Value: Root Tips
  misc_feature: MA Experiment ID: 108461 Result: Down-regulated in Transcription
  misc_feature: MA Experiment 108461 PARAMETER Experiment Name: At_Germinating_Seeds_cDNA_P Parameter: Age (day) Value: 1 vs. 0
  misc_feature: MA Experiment 108461 PARAMETER Experiment Name: At_Germinating_Seeds_cDNA_P Parameter: Tissue Value: Germinating Seeds
  misc_feature: MA Experiment ID: 108462 Result: Down-regulated in Transcription
  misc_feature: MA Experiment 108462 PARAMETER Experiment Name: At_Germinating_Seeds_cDNA_P Parameter: Age (day) Value: 2 vs. 0
  misc_feature: MA Experiment 108462 PARAMETER Experiment Name: At_Germinating_Seeds_cDNA_P Parameter: Tissue Value: Germinating Seeds
  misc_feature: MA Experiment ID: 108463 Result: Down-regulated in Transcription
  misc_feature: MA Experiment 108463 PARAMETER Experiment Name: At_Germinating_Seeds_cDNA_P Parameter: Age (day) Value: 3 vs. 0
  misc_feature: MA Experiment 108463 PARAMETER Experiment Name: At_Germinating_Seeds_cDNA_P Parameter: Tissue Value: Germinating Seeds
  misc_feature: MA Experiment ID: 108464 Result: Down-regulated in Transcription
  misc_feature: MA Experiment 108464 PARAMETER Experiment Name: At_Germinating_Seeds_cDNA_P Parameter: Age (day) Value: 4 vs. 0
  misc_feature: MA Experiment 108464 PARAMETER Experiment Name: At_Germinating_Seeds_cDNA_P Parameter: Tissue Value: Germinating Seeds
  misc_feature: MA Experiment ID: 20000113 Result: Down-regulated in Transcription
  misc_feature: MA Experiment 20000113 PARAMETER Experiment Name: At_42deg_Heat_cDNA_P Parameter: Temperature (deg C) Value: 42 vs. 22
  misc_feature: MA Experiment 20000113 PARAMETER Experiment Name: At_42deg_Heat_cDNA_P Parameter: Timepoint (hr) Value: 8
  misc_feature: MA Experiment 20000113 PARAMETER Experiment Name: At_42deg_Heat_cDNA_P Parameter: Tissue Value: Aerial
  misc_feature: MA Experiment ID: 20000227 Result: Up-regulated in Transcription
  misc_feature: MA Experiment 20000227 PARAMETER Experiment Name: At_Root-Tips-vs-Tops_P Parameter: Tissue Value: Root Tips vs. Root Tops
  misc_feature: MA Experiment ID: 20000495 Result: Up-regulated in Transcription
  misc_feature: MA Experiment 20000495 PARAMETER Experiment Name: At_Guard_Cells_P Parameter: Harvest Date Value: 8/2/2002
  misc_feature: MA Experiment 20000495 PARAMETER Experiment Name: At_Guard_Cells_P Parameter: Organism Value: A. thaliana
  misc_feature: MA Experiment 20000495 PARAMETER Experiment Name: At_Guard_Cells_P Parameter: Tissue Value: Guard Cells vs. Leaves
  misc_feature: MA Experiment ID: 20001557 Result: Up-regulated in Transcription
  misc_feature: MA Experiment 20001557 PARAMETER Experiment Name: At_Drought_Soil_Dry_P Parameter: Age (day) Value: 27
  misc_feature: MA Experiment 20001557 PARAMETER Experiment Name: At_Drought_Soil_Dry_P Parameter: Organism Value: A. thaliana
  misc_feature: MA Experiment 20001557 PARAMETER Experiment Name: At_Drought_Soil_Dry_P Parameter: Plant Line Value: WS
  misc_feature: MA Experiment 20001557 PARAMETER Experiment Name: At_Drought_Soil_Dry_P Parameter: Post Timepoint (hr) Value: 3
  misc_feature: MA Experiment 20001557 PARAMETER Experiment Name: At_Drought_Soil_Dry_P Parameter: Post-Treatment Value: Re-Water vs. No Drought
  misc_feature: MA Experiment 20001557 PARAMETER Experiment Name: At_Drought_Soil_Dry_P Parameter: Timepoint (day) Value: 13
  misc_feature: MA Experiment 20001557 PARAMETER Experiment Name: At_Drought_Soil_Dry_P Parameter: Treatment Value: Drought vs. No Drought

SEQ ID NO: 32661 - protein, 527 aa, Arabidopsis thaliana; identical to SEQ ID NO: 29071
  peptide (1)..(527): Ceres Seq. ID no. 13497376
  misc_feature (30)..(520): Pfam Name: TCP-1/cpn60 chaperonin family Pfam Description: TCP-1/cpn60 chaperonin family
  misc_feature (6)..(527): Homolog of NCBI NO: 18313108 NR Description: thermosome (chaperonin) alpha subunit
  misc_feature (2)..(526): Homolog of NCBI NO: 18858175 NR Description: CG7033-PA [Drosophila melanogaster]
  misc_feature (2)..(524): Homolog of NCBI NO: 17066722 NR Description: CCT chaperonin beta subunit [Physarum
  misc_feature (5)..(527): Homolog of NCBI NO: 19113929 NR Description: probable t-complex protein 1, beta subunit
  misc_feature (2)..(502): Homolog of NCBI NO: 21105454 NR Description: chaperonin-containing TCP-1 complex beta chain
  misc_feature (2)..(523): Homolog of NCBI NO: 6671700 NR Description: chaperonin subunit 2 (beta) [Mus musculus]
  misc_feature (2)..(523): Homolog of NCBI NO: 22654291 NR Description: T-complex protein 1, beta subunit (TCP-1-beta)
  misc_feature (2)..(523): Homolog of NCBI NO: 5453603 NR Description: chaperonin containing TCP1, subunit 2 (beta)
  misc_feature (2)..(523): Homolog of NCBI NO: 27503862 NR Description: Similar to chaperonin subunit 2 (beta) [Xenopus
  misc_feature (1)..(527): Homolog of NCBI NO: 15242093 NR Description: chaperonin, putative [Arabidopsis thaliana]

SEQ ID NO: 32662 - protein, 507 aa, Arabidopsis thaliana; identical to SEQ ID NO: 29072
  peptide (1)..(507): Ceres Seq. ID no. 13497377
  misc_feature (10)..(500): Pfam Name: TCP-1/cpn60 chaperonin family Pfam Description: TCP-1/cpn60 chaperonin family
  misc_feature (1)..(507): Homolog of NCBI NO: 18313108 NR Description: thermosome (chaperonin) alpha subunit
  misc_feature (1)..(506): Homolog of NCBI NO: 18858175 NR Description: CG7033-PA [Drosophila melanogaster]
  misc_feature (1)..(504): Homolog of NCBI NO: 17066722 NR Description: CCT chaperonin beta subunit [Physarum
  misc_feature (1)..(507): Homolog of NCBI NO: 19113929 NR Description: probable t-complex protein 1, beta subunit
  misc_feature (1)..(482): Homolog of NCBI NO: 21105454 NR Description: chaperonin-containing TCP-1 complex beta chain
  misc_feature (1)..(503): Homolog of NCBI NO: 6671700 NR Description: chaperonin subunit 2 (beta) [Mus musculus]
  misc_feature (1)..(503): Homolog of NCBI NO: 22654291 NR Description: T-complex protein 1, beta subunit (TCP-1-beta)
  misc_feature (1)..(503): Homolog of NCBI NO: 5453603 NR Description: chaperonin containing TCP1, subunit 2 (beta)
  misc_feature (1)..(503): Homolog of NCBI NO: 27503862 NR Description: Similar to chaperonin subunit 2 (beta) [Xenopus
  misc_feature (1)..(507): Homolog of NCBI NO: 15242093 NR Description: chaperonin, putative [Arabidopsis thaliana]

SEQ ID NO: 32663 - protein, 500 aa, Arabidopsis thaliana; identical to SEQ ID NO: 29073
  peptide (1)..(500): Ceres Seq. ID no. 13497378
  misc_feature (3)..(493): Pfam Name: TCP-1/cpn60 chaperonin family Pfam Description: TCP-1/cpn60 chaperonin family
  misc_feature (1)..(500): Homolog of NCBI NO: 18313108 NR Description: thermosome (chaperonin) alpha subunit
  misc_feature (1)..(499): Homolog of NCBI NO: 18858175 NR Description: CG7033-PA [Drosophila melanogaster]
  misc_feature (1)..(497): Homolog of NCBI NO: 17066722 NR Description: CCT chaperonin beta subunit [Physarum
  misc_feature (1)..(500): Homolog of NCBI NO: 19113929 NR Description: probable t-complex protein 1, beta subunit
  misc_feature (1)..(475): Homolog of NCBI NO: 21105454 NR Description: chaperonin-containing TCP-1 complex beta chain
  misc_feature (1)..(496): Homolog of NCBI NO: 6671700 NR Description: chaperonin subunit 2 (beta) [Mus musculus]
  misc_feature (1)..(496): Homolog of NCBI NO: 22654291 NR Description: T-complex protein 1, beta subunit (TCP-1-beta)
  misc_feature (1)..(496): Homolog of NCBI NO: 5453603 NR Description: chaperonin containing TCP1, subunit 2 (beta)
  misc_feature (1)..(496): Homolog of NCBI NO: 27503862 NR Description: Similar to chaperonin subunit 2 (beta) [Xenopus
  misc_feature (1)..(500): Homolog of NCBI NO: 15242093 NR Description: chaperonin, putative [Arabidopsis thaliana]

SEQ ID NO: 32664 - DNA, 1221 bp, Arabidopsis thaliana; identical to SEQ ID NO: 29074
  misc_feature (1)..(1221): Ceres Seq. ID no. 13487581
  misc_feature: MA Experiment ID: 108461 Result: Up-regulated in Transcription
  misc_feature: MA Experiment 108461 PARAMETER Experiment Name: At_Germinating_Seeds_cDNA_P Parameter: Age (day) Value: 1 vs. 0
  misc_feature: MA Experiment 108461 PARAMETER Experiment Name: At_Germinating_Seeds_cDNA_P Parameter: Tissue Value: Germinating Seeds
  misc_feature: MA Experiment ID: 20000093 Result: Up-regulated in Transcription
  misc_feature: MA Experiment 20000093 PARAMETER Experiment Name: At_42deg_Heat_cDNA_P Parameter: Temperature (deg C) Value: 42 vs. 22
  misc_feature: MA Experiment 20000093 PARAMETER Experiment Name: At_42deg_Heat_cDNA_P Parameter: Timepoint (hr) Value: 0.5
  misc_feature: MA Experiment 20000093 PARAMETER Experiment Name: At_42deg_Heat_cDNA_P Parameter: Tissue Value: Aerial
  misc_feature: MA Experiment ID: 20000144 Result: Up-regulated in Transcription
  misc_feature: MA Experiment 20000144 PARAMETER Experiment Name: At_42deg_Heat_cDNA_P Parameter: Temperature (deg C) Value: 42 vs. 22
  misc_feature: MA Experiment 20000144 PARAMETER Experiment Name: At_42deg_Heat_cDNA_P Parameter: Timepoint (hr) Value: 1
  misc_feature: MA Experiment 20000144 PARAMETER Experiment Name: At_42deg_Heat_cDNA_P Parameter: Tissue Value: Aerial
  misc_feature: MA Experiment ID: 20000179 Result: Up-regulated in Transcription
  misc_feature: MA Experiment 20000179 PARAMETER Experiment Name: At_Germinating_Seeds_P Parameter: Age (hr) Value: 6 vs. 0
  misc_feature: MA Experiment 20000179 PARAMETER Experiment Name: At_Germinating_Seeds_P Parameter: Tissue Value: Germinating Seeds
  misc_feature: MA Experiment ID: 20000180 Result: Up-regulated in Transcription
  misc_feature: MA Experiment 20000180 PARAMETER Experiment Name: At_Germinating_Seeds_P Parameter: Age (hr) Value: 24 vs. 0
  misc_feature: MA Experiment 20000180 PARAMETER Experiment Name: At_Germinating_Seeds_P Parameter: Tissue Value: Germinating Seeds
  misc_feature: MA Experiment ID: 20000224 Result: Down-regulated in Transcription

SEQ ID NO: 32665 - protein, 293 aa, Arabidopsis thaliana; identical to SEQ ID NO: 25308
  peptide (1)..(293): Ceres Seq. ID no. 13487582
  misc_feature (209)..(284): Pfam Name: Uncharacterized protein family UPF0016 Pfam Description: Uncharacterized protein family UPF0016
  misc_feature (80)..(289): Homolog of NCBI NO: 15420543 NR Description: putative membrane protein [Crithidia fasciculata]
  misc_feature (80)..(288): Homolog of NCBI NO: 21593636 NR Description: transmembrane protein, putative [Arabidopsis
  misc_feature (80)..(288): Homolog of NCBI NO: 15222613 NR Description: transmembrane protein -related [Arabidopsis
  misc_feature (177)..(292): Homolog of NCBI NO: 20385488 NR Description: transmembrane protein HTP-1 [Danio rerio]
  misc_feature (10)..(189): Homolog of NCBI NO: 20385488 NR Description: transmembrane protein HTP-1 [Danio rerio]
  misc_feature (73)..(292): Homolog of NCBI NO: 21357589 NR Description: CG4196-PC [Drosophila melanogaster]
  misc_feature (208)..(292): Homolog of NCBI NO: 31240317 NR Description: ENSANGP00000008699 [Anopheles gambiae]
  misc_feature (84)..(198): Homolog of NCBI NO: 31240317 NR Description: ENSANGP00000008699 [Anopheles gambiae]
  misc_feature (1)..(273): Homolog of NCBI NO: 9759042 NR Description: transmembrane protein FT27/PFT27-like
  misc_feature (1)..(293): Homolog of NCBI NO: 18421551 NR Description: transmembrane protein FT27/PFT27-related

SEQ ID NO: 32666 - protein, 244 aa, Arabidopsis thaliana; identical to SEQ ID NO: 25309
  peptide (1)..(244): Ceres Seq. ID no. 13487583
  misc_feature (160)..(235): Pfam Name: Uncharacterized protein family UPF0016 Pfam Description: Uncharacterized protein family UPF0016
  misc_feature (31)..(240): Homolog of NCBI NO: 15420543 NR Description: putative membrane protein [Crithidia fasciculata]
  misc_feature (31)..(239): Homolog of NCBI NO: 21593636 NR Description: transmembrane protein, putative [Arabidopsis
  misc_feature (31)..(239): Homolog of NCBI NO: 15222613 NR Description: transmembrane protein -related [Arabidopsis
  misc_feature (128)..(243): Homolog of NCBI NO: 20385488 NR Description: transmembrane protein HTP-1 [Danio rerio]
  misc_feature (1)..(140): Homolog of NCBI NO: 20385488 NR Description: transmembrane protein HTP-1 [Danio rerio]
  misc_feature (24)..(243): Homolog of NCBI NO: 21357589 NR Description: CG4196-PC [Drosophila melanogaster]
  misc_feature (159)..(243): Homolog of NCBI NO: 31240317 NR Description: ENSANGP00000008699 [Anopheles gambiae]
  misc_feature (35)..(149): Homolog of NCBI NO: 31240317 NR Description: ENSANGP00000008699 [Anopheles gambiae]
  misc_feature (1)..(224): Homolog of NCBI NO: 9759042 NR Description: transmembrane protein FT27/PFT27-like
  misc_feature (1)..(244): Homolog of NCBI NO: 18421551 NR Description: transmembrane protein FT27/PFT27-related

SEQ ID NO: 32667 - protein, 203 aa, Arabidopsis thaliana; identical to SEQ ID NO: 25310
  peptide (1)..(203): Ceres Seq. ID no. 13487584
  misc_feature (119)..(194): Pfam Name: Uncharacterized protein family UPF0016 Pfam Description: Uncharacterized protein family UPF0016
  misc_feature (1)..(199): Homolog of NCBI NO: 15420543 NR Description: putative membrane protein [Crithidia fasciculata]
  misc_feature (1)..(198): Homolog of NCBI NO: 21593636 NR Description: transmembrane protein, putative [Arabidopsis
  misc_feature (1)..(198): Homolog of NCBI NO: 15222613 NR Description: transmembrane protein -related [Arabidopsis
  misc_feature (87)..(202): Homolog of NCBI NO: 20385488 NR Description: transmembrane protein HTP-1 [Danio rerio]
  misc_feature (1)..(99): Homolog of NCBI NO: 20385488 NR Description: transmembrane protein HTP-1 [Danio rerio]
  misc_feature (1)..(202): Homolog of NCBI NO: 21357589 NR Description: CG4196-PC [Drosophila melanogaster]
  misc_feature (118)..(202): Homolog of NCBI NO: 31240317 NR Description: ENSANGP00000008699 [Anopheles gambiae]
  misc_feature (1)..(108): Homolog of NCBI NO: 31240317 NR Description: ENSANGP00000008699 [Anopheles gambiae]
  misc_feature (1)..(183): Homolog of NCBI NO: 9759042 NR Description: transmembrane protein FT27/PFT27-like
  misc_feature (1)..(203): Homolog of NCBI NO: 18421551 NR Description: transmembrane protein FT27/PFT27-related

SEQ ID NO: 32668 - DNA, 1287 bp, Arabidopsis thaliana; identical to SEQ ID NO: 29078
  misc_feature (1)..(1287): Ceres Seq. ID no. 12371833
  misc_feature: MA Experiment ID: 20000069 Result: Up-regulated in Transcription
  misc_feature: MA Experiment 20000069 PARAMETER Experiment Name: At_100uM_ABA_Mutants_cDNA_P Parameter: Plant Line Value: CS23
  misc_feature: MA Experiment 20000069 PARAMETER Experiment Name: At_100uM_ABA_Mutants_cDNA_P Parameter: Timepoint (hr) Value: 6
  misc_feature: MA Experiment 20000069 PARAMETER Experiment Name: At_100uM_ABA_Mutants_cDNA_P Parameter: Tissue Value: Aerial
  misc_feature: MA Experiment 20000069 PARAMETER Experiment Name: At_100uM_ABA_Mutants_cDNA_P Parameter: Treatment Value: 100uM ABA vs. No Treatment

SEQ ID NO: 32669 - protein, 297 aa, Arabidopsis thaliana; identical to SEQ ID NO: 29079
  peptide (1)..(297): Ceres Seq. ID no. 12371834
  misc_feature (148)..(187): Pfam Name: CCT motif Pfam Description: CCT motif
  misc_feature (63)..(284): Homolog of NCBI NO: 15233844 NR Description: Zinc finger protein, Zim
  misc_feature (63)..(284): Homolog of NCBI NO: 11358938 NR Description: zinc-finger protein - Arabidopsis thaliana
  misc_feature (33)..(261): Homolog of NCBI NO: 13174240 NR Description: putative zinc finger protein [Oryza sativa]
  misc_feature (175)..(297): Homolog of NCBI NO: 26451385 NR Description: unknown protein [Arabidopsis thaliana]
  misc_feature (1)..(297): Homolog of NCBI NO: 25405485 NR Description: hypothetical protein F19C24.17 [imported] -
  misc_feature (1)..(297): Homolog of NCBI NO: 15028099 NR Description: putative flowering protein CONSTANS [Arabidopsis
  misc_feature (1)..(297): Homolog of NCBI NO: 18403600 NR Description: flowering protein CONSTANS, putative
  misc_feature (1)..(297): Homolog of NCBI NO: 30686115 NR Description: GATA zinc finger protein [Arabidopsis thaliana]
  misc_feature (1)..(297): Homolog of NCBI NO: 18402914 NR Description: GATA zinc finger protein
  misc_feature (1)..(297): Homolog of NCBI NO: 21537322 NR Description: flowering protein CONSTANS, putative [Arabidopsis

SEQ ID NO: 32670 - protein, 287 aa, Arabidopsis thaliana; identical to SEQ ID NO: 29080
  peptide (1)..(287): Ceres Seq. ID no. 12371835
  misc_feature (138)..(177): Pfam Name: CCT motif Pfam Description: CCT motif
  misc_feature (53)..(274): Homolog of NCBI NO: 15233844 NR Description: Zinc finger protein, Zim
  misc_feature (53)..(274): Homolog of NCBI NO: 11358938 NR Description: zinc-finger protein - Arabidopsis thaliana
  misc_feature (23)..(251): Homolog of NCBI NO: 13174240 NR Description: putative zinc finger protein [Oryza sativa]
  misc_feature (165)..(287): Homolog of NCBI NO: 26451385 NR Description: unknown protein [Arabidopsis thaliana]
  misc_feature (1)..(287): Homolog of NCBI NO: 25405485 NR Description: hypothetical protein F19C24.17 [imported] -
  misc_feature (1)..(287): Homolog of NCBI NO: 15028099 NR Description: putative flowering protein CONSTANS [Arabidopsis
  misc_feature (1)..(287): Homolog of NCBI NO: 18403600 NR Description: flowering protein CONSTANS, putative
  misc_feature (1)..(287): Homolog of NCBI NO: 30686115 NR Description: GATA zinc finger protein [Arabidopsis thaliana]
  misc_feature (1)..(287): Homolog of NCBI NO: 18402914 NR Description: GATA zinc finger protein
  misc_feature (1)..(287): Homolog of NCBI NO: 21537322 NR Description: flowering protein CONSTANS, putative [Arabidopsis

SEQ ID NO: 32671 - protein, 278 aa, Arabidopsis thaliana; identical to SEQ ID NO: 29081
  peptide (1)..(278): Ceres Seq. ID no. 12371836
  misc_feature (129)..(168): Pfam Name: CCT motif Pfam Description: CCT motif
  misc_feature (44)..(265): Homolog of NCBI NO: 15233844 NR Description: Zinc finger protein, Zim
  misc_feature (44)..(265): Homolog of NCBI NO: 11358938 NR Description: zinc-finger protein - Arabidopsis thaliana
  misc_feature (14)..(242): Homolog of NCBI NO: 13174240 NR Description: putative zinc finger protein [Oryza sativa]
  misc_feature (156)..(278): Homolog of NCBI NO: 26451385 NR Description: unknown protein [Arabidopsis thaliana]
  misc_feature (1)..(278): Homolog of NCBI NO: 25405485 NR Description: hypothetical protein F19C24.17 [imported] -
  misc_feature (1)..(278): Homolog of NCBI NO: 15028099 NR Description: putative flowering protein CONSTANS [Arabidopsis
  misc_feature (1)..(278): Homolog of NCBI NO: 18403600 NR Description: flowering protein CONSTANS, putative
  misc_feature (1)..(278): Homolog of NCBI NO: 30686115 NR Description: GATA zinc finger protein [Arabidopsis thaliana]
  misc_feature (1)..(278): Homolog of NCBI NO: 18402914 NR Description: GATA zinc finger protein
  misc_feature (1)..(278): Homolog of NCBI NO: 21537322 NR Description: flowering protein CONSTANS, putative [Arabidopsis

SEQ ID NO: 32672 - DNA, 1529 bp, Arabidopsis thaliana; identical to SEQ ID NO: 29082
  misc_feature (1)..(1529): Ceres Seq. ID no. 13645700
  misc_feature: MA Experiment ID: 108434 Result: Up-regulated in Transcription
  misc_feature: MA Experiment 108434 PARAMETER Experiment Name: At_Root_Tips_cDNA_P Parameter: Tissue Value: Root Tips
  misc_feature: MA Experiment ID: 108461 Result: Down-regulated in Transcription
  misc_feature: MA Experiment 108461 PARAMETER Experiment Name: At_Germinating_Seeds_cDNA_P Parameter: Age (day) Value: 1 vs. 0
  misc_feature: MA Experiment 108461 PARAMETER Experiment Name: At_Germinating_Seeds_cDNA_P Parameter: Tissue Value: Germinating Seeds
  misc_feature: MA Experiment ID: 108462 Result: Down-regulated in Transcription
  misc_feature: MA Experiment 108462 PARAMETER Experiment Name: At_Germinating_Seeds_cDNA_P Parameter: Age (day) Value: 2 vs. 0
  misc_feature: MA Experiment 108462 PARAMETER Experiment Name: At_Germinating_Seeds_cDNA_P Parameter: Tissue Value: Germinating Seeds
  misc_feature: MA Experiment ID: 108463 Result: Down-regulated in Transcription
  misc_feature: MA Experiment 108463 PARAMETER Experiment Name: At_Germinating_Seeds_cDNA_P Parameter: Age (day) Value: 3 vs. 0
  misc_feature: MA Experiment 108463 PARAMETER Experiment Name: At_Germinating_Seeds_cDNA_P Parameter: Tissue Value: Germinating Seeds
  misc_feature: MA Experiment ID: 108569 Result: Up-regulated in Transcription
  misc_feature: MA Experiment 108569 PARAMETER Experiment Name: At_0.001%_MeJA__cDNA_P Parameter: Timepoint (hr) Value: 6
  misc_feature: MA Experiment 108569 PARAMETER Experiment Name: At_0.001%_MeJA__cDNA_P Parameter: Tissue Value: Aerial
  misc_feature: MA Experiment 108569 PARAMETER Experiment Name: At_0.001%_MeJA__cDNA_P Parameter: Treatment Value: 0.001% MeJA vs. No Treatment
  misc_feature: MA Experiment ID: 108576 Result: Down-regulated in Transcription
  misc_feature: MA Experiment 108576 PARAMETER Experiment Name: At_42deg_Heat_cDNA_P Parameter: Temperature (deg C) Value: 42 vs. 22
  misc_feature: MA Experiment 108576 PARAMETER Experiment Name: At_42deg_Heat_cDNA_P Parameter: Timepoint (hr) Value: 1
  misc_feature: MA Experiment 108576 PARAMETER Experiment Name: At_42deg_Heat_cDNA_P Parameter: Tissue Value: Aerial
  misc_feature: MA Experiment ID: 108577 Result: Down-regulated in Transcription
  misc_feature: MA Experiment 108577 PARAMETER Experiment Name: At_42deg_Heat_cDNA_P Parameter: Temperature (deg C) Value: 42 vs. 22
  misc_feature: MA Experiment 108577 PARAMETER Experiment Name: At_42deg_Heat_cDNA_P Parameter: Timepoint (hr) Value: 6
  misc_feature: MA Experiment 108577 PARAMETER Experiment Name: At_42deg_Heat_cDNA_P Parameter: Tissue Value: Aerial
  misc_feature: MA Experiment ID: 108585 Result: Up-regulated in Transcription
  misc_feature: MA Experiment 108585 PARAMETER Experiment Name: At_5mM_NaNP_cDNA_P Parameter: Timepoint (hr) Value: 6
  misc_feature: MA Experiment 108585 PARAMETER Experiment Name: At_5mM_NaNP_cDNA_P Parameter: Tissue Value: Aerial
  misc_feature: MA Experiment 108585 PARAMETER Experiment Name: At_5mM_NaNP_cDNA_P Parameter: Treatment Value: null
  misc_feature: MA Experiment ID: 108594 Result: Down-regulated in Transcription
  misc_feature: MA Experiment 108594 PARAMETER Experiment Name: At_Ler-rhl_Root_cDNA_P Parameter: Plant Line Value: null
  misc_feature: MA Experiment ID: 20000087 Result: Down-regulated in Transcription
  misc_feature: MA Experiment 20000087 PARAMETER Experiment Name: At_100uM_ABA_Mutants_cDNA_P Parameter: Plant Line Value: WS
  misc_feature: MA Experiment 20000087 PARAMETER Experiment Name: At_100uM_ABA_Mutants_cDNA_P Parameter: Timepoint (hr) Value: 6
  misc_feature: MA Experiment 20000087 PARAMETER Experiment Name: At_100uM_ABA_Mutants_cDNA_P Parameter: Tissue Value: Aerial
  misc_feature: MA Experiment 20000087 PARAMETER Experiment Name: At_100uM_ABA_Mutants_cDNA_P Parameter: Treatment Value: 100uM ABA vs. No Treatment
  misc_feature: MA Experiment ID: 20000111 Result: Down-regulated in Transcription
  misc_feature: MA Experiment 20000111 PARAMETER Experiment Name: At_42deg_Heat_cDNA_P Parameter: Temperature (deg C) Value: 42 vs. 22
  misc_feature: MA Experiment 20000111 PARAMETER Experiment Name: At_42deg_Heat_cDNA_P Parameter: Timepoint (hr) Value: 6
  misc_feature: MA Experiment 20000111 PARAMETER Experiment Name: At_42deg_Heat_cDNA_P Parameter: Tissue Value: Aerial
  misc_feature: MA Experiment ID: 20000112 Result: Down-regulated in Transcription
  misc_feature: MA Experiment 20000112 PARAMETER Experiment Name: At_42deg_Heat_cDNA_P Parameter: Temperature (deg C) Value: 42 vs. 22
  misc_feature: MA Experiment 20000112 PARAMETER Experiment Name: At_42deg_Heat_cDNA_P Parameter: Timepoint (hr) Value: 2
  misc_feature: MA Experiment 20000112 PARAMETER Experiment Name: At_42deg_Heat_cDNA_P Parameter: Tissue Value: Aerial
  misc_feature: MA Experiment ID: 20000144 Result: Down-regulated in Transcription
  misc_feature: MA Experiment 20000144 PARAMETER Experiment Name: At_42deg_Heat_cDNA_P Parameter: Temperature (deg C) Value: 42 vs. 22
  misc_feature: MA Experiment 20000144 PARAMETER Experiment Name: At_42deg_Heat_cDNA_P Parameter: Timepoint (hr) Value: 1
  misc_feature: MA Experiment 20000144 PARAMETER Experiment Name: At_42deg_Heat_cDNA_P Parameter: Tissue Value: Aerial
  misc_feature: MA Experiment ID: 20000171 Result: Down-regulated in Transcription
  misc_feature: MA Experiment 20000171 PARAMETER Experiment Name: At_42deg_Heat_P Parameter: Age (day) Value: 14
  misc_feature: MA Experiment 20000171 PARAMETER Experiment Name: At_42deg_Heat_P Parameter: Organism Value: A. thaliana
  misc_feature: MA Experiment 20000171 PARAMETER Experiment Name: At_42deg_Heat_P Parameter: Plant Line Value: WS
  misc_feature: MA Experiment 20000171 PARAMETER Experiment Name: At_42deg_Heat_P Parameter: Temperature (deg C) Value: 42 vs. 22
  misc_feature: MA Experiment 20000171 PARAMETER Experiment Name: At_42deg_Heat_P Parameter: Timepoint (hr) Value: 1
  misc_feature: MA Experiment 20000171 PARAMETER Experiment Name: At_42deg_Heat_P Parameter: Tissue Value: Aerial
  misc_feature: MA Experiment ID: 20000173 Result: Down-regulated in Transcription
  misc_feature: MA Experiment 20000173 PARAMETER Experiment Name: At_42deg_Heat_P Parameter: Age (day) Value: 14
  misc_feature: MA Experiment 20000173 PARAMETER Experiment Name: At_42deg_Heat_P Parameter: Organism Value: A. thaliana
  misc_feature: MA Experiment 20000173 PARAMETER Experiment Name: At_42deg_Heat_P Parameter: Plant Line Value: WS
  misc_feature: MA Experiment 20000173 PARAMETER Experiment Name: At_42deg_Heat_P Parameter: Temperature (deg C) Value: 42 vs. 22
  misc_feature: MA Experiment 20000173 PARAMETER Experiment Name: At_42deg_Heat_P Parameter: Timepoint (hr) Value: 6
  misc_feature: MA Experiment 20000173 PARAMETER Experiment Name: At_42deg_Heat_P Parameter: Tissue Value: Aerial
  misc_feature: MA Experiment ID: 20000180 Result: Down-regulated in Transcription
  misc_feature: MA Experiment 20000180 PARAMETER Experiment Name: At_Germinating_Seeds_P Parameter: Age (hr) Value: 24 vs. 0
  misc_feature: MA Experiment 20000180 PARAMETER Experiment Name: At_Germinating_Seeds_P Parameter: Tissue Value: Germinating Seeds
  misc_feature: MA Experiment ID: 20000234 Result: Up-regulated in Transcription
  misc_feature: MA Experiment 20000234 PARAMETER Experiment Name: At_Siliques_P Parameter: Age (day) Value: 21
  misc_feature: MA Experiment 20000234 PARAMETER Experiment Name: At_Siliques_P Parameter: Organism Value: A. thaliana
  misc_feature: MA Experiment 20000234 PARAMETER Experiment Name: At_Siliques_P Parameter: Plant Line Value: WS
  misc_feature: MA Experiment 20000234 PARAMETER Experiment Name: At_Siliques_P Parameter: Tissue Value: Less Than 5mm Siliques vs. Whole Plant
  misc_feature: MA Experiment ID: 20000264 Result: Up-regulated in Transcription
  misc_feature: MA Experiment 20000264 PARAMETER Experiment Name: At_Open_Flower_P Parameter: Age (day) Value: 21
  misc_feature: MA Experiment 20000264 PARAMETER Experiment Name: At_Open_Flower_P Parameter: Plant Line Value: WS
  misc_feature: MA Experiment 20000264 PARAMETER Experiment Name: At_Open_Flower_P Parameter: Tissue Value: Open Flower vs. Whole Plant
  misc_feature: MA Experiment ID: 20000495 Result: Up-regulated in Transcription
  misc_feature: MA Experiment 20000495 PARAMETER Experiment Name: At_Guard_Cells_P Parameter: Harvest Date Value: 8/2/2002
  misc_feature: MA Experiment 20000495 PARAMETER Experiment Name: At_Guard_Cells_P Parameter: Organism Value: A. thaliana
  misc_feature: MA Experiment 20000495 PARAMETER Experiment Name: At_Guard_Cells_P Parameter: Tissue Value: Guard Cells vs. Leaves

SEQ ID NO: 32673 - protein, 336 aa, Arabidopsis thaliana; identical to SEQ ID NO: 29083
  peptide (1)..(336): Ceres Seq. ID no. 13645701
  misc_feature (23)..(147): Pfam Name: Integral membrane protein DUF6 Pfam Description: Integral membrane protein DUF6
  misc_feature (13)..(300): Homolog of NCBI NO: 15221371 NR Description: phosphate translocator-related [Arabidopsis
  misc_feature (1)..(297): Homolog of NCBI NO: 15228248 NR Description: phosphate translocator-related [Arabidopsis
  misc_feature (13)..(296): Homolog of NCBI NO: 27476065 NR Description: Putative phosphate/phosphoenolpyruvate
  misc_feature (5)..(297): Homolog of NCBI NO: 17064798 NR Description: phosphate/phosphoenolpyruvate translocator-like
  misc_feature (5)..(297): Homolog of NCBI NO: 15237644 NR Description: phosphate translocator-related [Arabidopsis
  misc_feature (1)..(296): Homolog of NCBI NO: 30681126 NR Description: phosphate translocator-related [Arabidopsis
  misc_feature (1)..(296): Homolog of NCBI NO: 9759107 NR Description: phosphate/phosphoenolpyruvate translocator
  misc_feature (8)..(333): Homolog of NCBI NO: 38567832 NR Description: OSJNBb0020J19.10 [Oryza sativa (japonica
  misc_feature (1)..(336): Homolog of NCBI NO: 15219121 NR Description: glucose-6-phosphate/phosphate
  misc_feature (1)..(336): Homolog of NCBI NO: 18411611 NR Description: glucose-6-phosphate/phosphate

SEQ ID NO: 32674 - protein, 331 aa, Arabidopsis thaliana; identical to SEQ ID NO: 29084
  peptide (1)..(331): Ceres Seq. ID no. 13645702
  misc_feature (18)..(142): Pfam Name: Integral membrane protein DUF6 Pfam Description: Integral membrane protein DUF6
  misc_feature (8)..(295): Homolog of NCBI NO: 15221371 NR Description: phosphate translocator-related [Arabidopsis
  misc_feature (1)..(292): Homolog of NCBI NO: 15228248 NR Description: phosphate translocator-related [Arabidopsis
  misc_feature (8)..(291): Homolog of NCBI NO: 27476065 NR Description: Putative phosphate/phosphoenolpyruvate
  misc_feature (1)..(292): Homolog of NCBI NO: 17064798 NR Description: phosphate/phosphoenolpyruvate translocator-like
  misc_feature (1)..(292): Homolog of NCBI NO: 15237644 NR Description: phosphate translocator-related [Arabidopsis
  misc_feature (1)..(291): Homolog of NCBI NO: 30681126 NR Description: phosphate translocator-related [Arabidopsis
  misc_feature (1)..(291): Homolog of NCBI NO: 9759107 NR Description: phosphate/phosphoenolpyruvate translocator
  misc_feature (3)..(328): Homolog of NCBI NO: 38567832 NR Description: OSJNBb0020J19.10 [Oryza sativa (japonica
  misc_feature (1)..(331): Homolog of NCBI NO: 15219121 NR Description: glucose-6-phosphate/phosphate
  misc_feature (1)..(331): Homolog of NCBI NO: 18411611 NR Description: glucose-6-phosphate/phosphate

SEQ ID NO: 32675 - protein, 311 aa, Arabidopsis thaliana; identical to SEQ ID NO: 29085
  peptide (1)..(311): Ceres Seq. ID no. 13645703
  misc_feature (1)..(122): Pfam Name: Integral membrane protein DUF6 Pfam Description: Integral membrane protein DUF6
  misc_feature (1)..(275): Homolog of NCBI NO: 15221371 NR Description: phosphate translocator-related [Arabidopsis
  misc_feature (1)..(272): Homolog of NCBI NO: 15228248 NR Description: phosphate translocator-related [Arabidopsis
  misc_feature (1)..(271): Homolog of NCBI NO: 27476065 NR Description: Putative phosphate/phosphoenolpyruvate
  misc_feature (1)..(272): Homolog of NCBI NO: 17064798 NR Description: phosphate/phosphoenolpyruvate translocator-like
  misc_feature (1)..(272): Homolog of NCBI NO: 15237644 NR Description: phosphate translocator-related [Arabidopsis
  misc_feature (1)..(271): Homolog of NCBI NO: 30681126 NR Description: phosphate translocator-related [Arabidopsis
  misc_feature (1)..(271): Homolog of NCBI NO: 9759107 NR Description: phosphate/phosphoenolpyruvate translocator
  misc_feature (1)..(308): Homolog of NCBI NO: 38567832 NR Description: OSJNBb0020J19.10 [Oryza sativa (japonica
  misc_feature (1)..(311): Homolog of NCBI NO: 15219121 NR Description: glucose-6-phosphate/phosphate
  misc_feature (1)..(311): Homolog of NCBI NO: 18411611 NR Description: glucose-6-phosphate/phosphate

SEQ ID NO: 32676 - DNA, 1152 bp, Arabidopsis thaliana; identical to SEQ ID NO: 29086
  misc_feature (1)..(1152): Ceres Seq. ID no. 12324473
  misc_feature: MA Experiment ID: 108434 Result: Down-regulated in Transcription
  misc_feature: MA Experiment 108434 PARAMETER Experiment Name: At_Root_Tips_cDNA_P Parameter: Tissue Value: Root Tips
  misc_feature: MA Experiment ID: 108464 Result: Up-regulated in Transcription
  misc_feature: MA Experiment 108464 PARAMETER Experiment Name: At_Germinating_Seeds_cDNA_P Parameter: Age (day) Value: 4 vs. 0
  misc_feature: MA Experiment 108464 PARAMETER Experiment Name: At_Germinating_Seeds_cDNA_P Parameter: Tissue Value: Germinating Seeds
  misc_feature: MA Experiment ID: 108488 Result: Down-regulated in Transcription
  misc_feature: MA Experiment ID: 108561 Result: Up-regulated in Transcription
  misc_feature: MA Experiment 108561 PARAMETER Experiment Name: At_100uM_ABA_cDNA_P Parameter: Timepoint (hr) Value: 6
  misc_feature: MA Experiment 108561 PARAMETER Experiment Name: At_100uM_ABA_cDNA_P Parameter: Tissue Value: Aerial
  misc_feature: MA Experiment 108561 PARAMETER Experiment Name: At_100uM_ABA_cDNA_P Parameter: Treatment Value: 100uM ABA vs. No Treatment
  misc_feature: MA Experiment ID: 108573 Result: Up-regulated in Transcription
  misc_feature: MA Experiment 108573 PARAMETER Experiment Name: At_Drought_cDNA_P Parameter: Timepoint (hr) Value: 6
  misc_feature: MA Experiment 108573 PARAMETER Experiment Name: At_Drought_cDNA_P Parameter: Tissue Value: Aerial
  misc_feature: MA Experiment 108573 PARAMETER Experiment Name: At_Drought_cDNA_P Parameter: Treatment Value: Drought vs. No Drought
  misc_feature: MA Experiment ID: 108579 Result: Up-regulated in Transcription
  misc_feature: MA Experiment 108579 PARAMETER Experiment Name: At_4deg_Cold_cDNA_P Parameter: Temperature (deg C) Value: 4 vs. 22
  misc_feature: MA Experiment 108579 PARAMETER Experiment Name: At_4deg_Cold_cDNA_P Parameter: Timepoint (hr) Value: 6
  misc_feature: MA Experiment 108579 PARAMETER Experiment Name: At_4deg_Cold_cDNA_P Parameter: Tissue Value: Aerial
  misc_feature: MA Experiment ID: 108585 Result: Up-regulated in Transcription
  misc_feature: MA Experiment 108585 PARAMETER Experiment Name: At_5mM_NaNP_cDNA_P Parameter: Timepoint (hr) Value: 6
  misc_feature: MA Experiment 108585 PARAMETER Experiment Name: At_5mM_NaNP_cDNA_P Parameter: Tissue Value: Aerial
  misc_feature: MA Experiment 108585 PARAMETER Experiment Name: At_5mM_NaNP_cDNA_P Parameter: Treatment Value: null
  misc_feature: MA Experiment ID: 108595 Result: Up-regulated in Transcription
  misc_feature: MA Experiment 108595 PARAMETER Experiment Name: At_Ler-pi_Ovule_cDNA_P Parameter: Plant Line Value: null
  misc_feature: MA Experiment ID: 108607 Result: Up-regulated in Transcription
  misc_feature: MA Experiment 108607 PARAMETER Experiment Name: At_100uM_ABA_cDNA_P Parameter: Timepoint (hr) Value: 4
  misc_feature: MA Experiment 108607 PARAMETER Experiment Name: At_100uM_ABA_cDNA_P Parameter: Tissue Value: Aerial
  misc_feature: MA Experiment 108607 PARAMETER Experiment Name: At_100uM_ABA_cDNA_P Parameter: Treatment Value: 100uM ABA vs. No Treatment
  misc_feature: MA Experiment ID: 108667 Result: Up-regulated in Transcription
  misc_feature: MA Experiment 108667 PARAMETER Experiment Name: At_2mM_SA_cDNA_P Parameter: Plant Line Value: WS
  misc_feature: MA Experiment 108667 PARAMETER Experiment Name: At_2mM_SA_cDNA_P Parameter: Timepoint (hr) Value: 1
  misc_feature: MA Experiment 108667 PARAMETER Experiment Name: At_2mM_SA_cDNA_P Parameter: Treatment Value: 2mM SA vs. No Treatment
  misc_feature: MA Experiment ID: 20000144 Result: Down-regulated in Transcription
  misc_feature: MA Experiment 20000144 PARAMETER Experiment Name: At_42deg_Heat_cDNA_P Parameter: Temperature (deg C) Value: 42 vs. 22
  misc_feature: MA Experiment 20000144 PARAMETER Experiment Name: At_42deg_Heat_cDNA_P Parameter: Timepoint (hr) Value: 1
  misc_feature: MA Experiment 20000144 PARAMETER Experiment Name: At_42deg_Heat_cDNA_P Parameter: Tissue Value: Aerial
  misc_feature: MA Experiment ID: 20000171 Result: Down-regulated in Transcription
  misc_feature: MA Experiment 20000171 PARAMETER Experiment Name: At_42deg_Heat_P Parameter: Age (day) Value: 14
  misc_feature: MA Experiment 20000171 PARAMETER Experiment Name: At_42deg_Heat_P Parameter: Organism Value: A. thaliana
  misc_feature: MA Experiment 20000171 PARAMETER Experiment Name: At_42deg_Heat_P Parameter: Plant Line Value: WS
  misc_feature: MA Experiment 20000171 PARAMETER Experiment Name: At_42deg_Heat_P Parameter: Temperature (deg C) Value: 42 vs. 22
  misc_feature: MA Experiment 20000171 PARAMETER Experiment Name: At_42deg_Heat_P Parameter: Timepoint (hr) Value: 1
  misc_feature: MA Experiment 20000171 PARAMETER Experiment Name: At_42deg_Heat_P Parameter: Tissue Value: Aerial
  misc_feature: MA Experiment ID: 20000182 Result: Up-regulated in Transcription
  misc_feature: MA Experiment 20000182 PARAMETER Experiment Name: At_2mM_SA_P Parameter: Age (day) Value: 14
  misc_feature: MA Experiment 20000182 PARAMETER Experiment Name: At_2mM_SA_P Parameter: Organism Value: A. thaliana
  misc_feature: MA Experiment 20000182 PARAMETER Experiment Name: At_2mM_SA_P Parameter: Plant Line Value: WS
  misc_feature: MA Experiment 20000182 PARAMETER Experiment Name: At_2mM_SA_P Parameter: Timepoint (hr) Value: 6
  misc_feature: MA Experiment 20000182 PARAMETER Experiment Name: At_2mM_SA_P Parameter: Tissue Value: Aerial
  misc_feature: MA Experiment 20000182 PARAMETER Experiment Name: At_2mM_SA_P Parameter: Treatment Value: 2mM SA vs. No Treatment
  misc_feature: MA Experiment ID: 20000224 Result: Down-regulated in Transcription
  misc_feature: MA Experiment ID: 20000234 Result: Down-regulated in Transcription
  misc_feature: MA Experiment 20000234 PARAMETER Experiment Name: At_Siliques_P Parameter: Age (day) Value: 21
  misc_feature: MA Experiment 20000234 PARAMETER Experiment Name: At_Siliques_P Parameter: Organism Value: A. thaliana
  misc_feature: MA Experiment 20000234 PARAMETER Experiment Name: At_Siliques_P Parameter: Plant Line Value: WS
  misc_feature: MA Experiment 20000234 PARAMETER Experiment Name: At_Siliques_P Parameter: Tissue Value: Less Than 5mm Siliques vs. Whole Plant
  misc_feature: MA Experiment ID: 20000235 Result: Down-regulated in Transcription
  misc_feature: MA Experiment 20000235 PARAMETER Experiment Name: At_Siliques_P Parameter: Age (day) Value: 21
  misc_feature: MA Experiment 20000235 PARAMETER Experiment Name: At_Siliques_P Parameter: Organism Value: A. thaliana
  misc_feature: MA Experiment 20000235 PARAMETER Experiment Name: At_Siliques_P Parameter: Plant Line Value: WS
  misc_feature: MA Experiment 20000235 PARAMETER Experiment Name: At_Siliques_P Parameter: Tissue Value: 5-10mm Siliques vs. Whole Plant
  misc_feature: MA Experiment ID: 20000265 Result: Down-regulated in Transcription
  misc_feature: MA Experiment 20000265 PARAMETER Experiment Name: At_Open_Flower_P Parameter: Age (day) Value: 21
  misc_feature: MA Experiment 20000265 PARAMETER Experiment Name: At_Open_Flower_P Parameter: Plant Line Value: WS
  misc_feature: MA Experiment 20000265 PARAMETER Experiment Name: At_Open_Flower_P Parameter: Tissue Value: Closed Flower vs. Whole Plant
  misc_feature: MA Experiment ID: 20000436 Result: Up-regulated in Transcription
  misc_feature: MA Experiment 20000436 PARAMETER Experiment Name: At_Drought_P Parameter: Age (day) Value: 7
  misc_feature: MA Experiment 20000436 PARAMETER Experiment Name: At_Drought_P Parameter: Organism Value: A. thaliana
  misc_feature: MA Experiment 20000436 PARAMETER Experiment Name: At_Drought_P Parameter: Plant Line Value: WS
  misc_feature: MA Experiment 20000436 PARAMETER Experiment Name: At_Drought_P Parameter: Timepoint (hr) Value: 12
  misc_feature: MA Experiment 20000436 PARAMETER Experiment Name: At_Drought_P Parameter: Tissue Value: Whole Plant
  misc_feature: MA Experiment 20000436 PARAMETER Experiment Name: At_Drought_P Parameter: Treatment Value: Drought vs. No Drought
  misc_feature: MA Experiment ID: 20000438 Result: Down-regulated in Transcription
  misc_feature: MA Experiment 20000438 PARAMETER Experiment Name: At_Shoots__P Parameter: Age (day) Value: 14
  misc_feature: MA Experiment 20000438 PARAMETER Experiment Name: At_Shoots__P Parameter: Tissue Value: Shoots vs. Whole Plant
  misc_feature: MA Experiment ID: 20000460 Result: Up-regulated in Transcription
  misc_feature: MA Experiment 20000460 PARAMETER Experiment Name: At_10percent_PEG_P Parameter: Age (day) Value: 12
  misc_feature: MA Experiment 20000460 PARAMETER Experiment Name: At_10percent_PEG_P Parameter: Organism Value: A. thaliana
  misc_feature: MA Experiment 20000460 PARAMETER Experiment Name: At_10percent_PEG_P Parameter: Plant Line Value: WS
  misc_feature: MA Experiment 20000460 PARAMETER Experiment Name: At_10percent_PEG_P Parameter: Timepoint (day) Value: 12
  misc_feature: MA Experiment 20000460 PARAMETER Experiment Name: At_10percent_PEG_P Parameter: Tissue Value: Whole Plant
  misc_feature: MA Experiment 20000460 PARAMETER Experiment Name: At_10percent_PEG_P Parameter: Treatment Value: 10percent PEG vs. No Treatment
  misc_feature: MA Experiment ID: 20000495 Result: Down-regulated in Transcription
  misc_feature: MA Experiment 20000495 PARAMETER Experiment Name: At_Guard_Cells_P Parameter: Harvest Date Value: 8/2/2002
  misc_feature: MA Experiment 20000495 PARAMETER Experiment Name: At_Guard_Cells_P Parameter: Organism Value: A. thaliana
  misc_feature: MA Experiment 20000495 PARAMETER Experiment Name: At_Guard_Cells_P Parameter: Tissue Value: Guard Cells vs. Leaves
  misc_feature: MA Experiment ID: 20001247 Result: Up-regulated in Transcription
  misc_feature: MA Experiment 20001247 PARAMETER Experiment Name: At_Far-red-induction_P Parameter: Age (day) Value: 7
  misc_feature: MA Experiment 20001247 PARAMETER Experiment Name: At_Far-red-induction_P Parameter: Light Value: Far-red vs. White
  misc_feature: MA Experiment 20001247 PARAMETER Experiment Name: At_Far-red-induction_P Parameter: Organism Value: A. thaliana
  misc_feature: MA Experiment 20001247 PARAMETER Experiment Name: At_Far-red-induction_P Parameter: Plant Line Value: Columbia
  misc_feature: MA Experiment 20001247 PARAMETER Experiment Name: At_Far-red-induction_P Parameter: Timepoint (hr) Value: 1
  misc_feature: MA Experiment 20001247 PARAMETER Experiment Name: At_Far-red-induction_P Parameter: Tissue Value: Whole Plant
  misc_feature: MA Experiment ID: 20001451 Result: Up-regulated in Transcription
  misc_feature: MA Experiment 20001451 PARAMETER Experiment Name: At_Far-red-induction_P Parameter: Age (day) Value: 7
  misc_feature: MA Experiment 20001451 PARAMETER Experiment Name: At_Far-red-induction_P Parameter: Light Value: Far-red vs. White
  misc_feature: MA Experiment 20001451 PARAMETER Experiment Name: At_Far-red-induction_P Parameter: Organism Value: A. thaliana
  misc_feature: MA Experiment 20001451 PARAMETER Experiment Name: At_Far-red-induction_P Parameter: Plant Line Value: Columbia
  misc_feature: MA Experiment 20001451 PARAMETER Experiment Name: At_Far-red-induction_P Parameter: Timepoint (hr) Value: 24
  misc_feature: MA Experiment 20001451 PARAMETER Experiment Name: At_Far-red-induction_P Parameter: Tissue Value: Whole Plant
  misc_feature: MA Experiment ID: 20001905 Result: Up-regulated in Transcription
  misc_feature: MA Experiment 20001905 PARAMETER Experiment Name: At_Drought_Reproduction_P Parameter: Age (day) Value: 40
  misc_feature: MA Experiment 20001905 PARAMETER Experiment Name: At_Drought_Reproduction_P Parameter: Organism Value: A. thaliana
  misc_feature: MA Experiment 20001905 PARAMETER Experiment Name: At_Drought_Reproduction_P Parameter: Plant Line Value: WS
  misc_feature: MA Experiment 20001905 PARAMETER Experiment Name: At_Drought_Reproduction_P Parameter: Timepoint (day) Value: 10
  misc_feature: MA Experiment 20001905 PARAMETER Experiment Name: At_Drought_Reproduction_P Parameter: Tissue Value: Rosettes
  misc_feature: MA Experiment 20001905 PARAMETER Experiment Name: At_Drought_Reproduction_P Parameter: Treatment Value: Drought vs. No Drought

SEQ ID NO: 32677 - protein, 169 aa, Arabidopsis thaliana; identical to SEQ ID NO: 29087
  peptide (1)..(169): Ceres Seq. ID no. 12324474
  misc_feature (110)..(150): Pfam Name: AN1-like Zinc finger Pfam Description: AN1-like Zinc finger
  misc_feature (10)..(169): Homolog of NCBI NO: 15234402 NR Description: putative protein
  misc_feature (3)..(169): Homolog of NCBI NO: 11361253 NR Description: hypothetical protein p85RF [imported] - Prunus
  misc_feature (14)..(168): Homolog of NCBI NO: 15235819 NR Description: similar to zinc finger - like protein
  misc_feature (4)..(169): Homolog of NCBI NO: 35187687 NR Description: zinc-finger protein [Oryza sativa (indica
  misc_feature (7)..(169): Homolog of NCBI NO: 25082726 NR Description: expressed protein [Arabidopsis thaliana]
  misc_feature (7)..(169): Homolog of NCBI NO: 18403408 NR Description: expressed protein
  misc_feature (1)..(169): Homolog of NCBI NO: 15225894 NR Description: putative zinc finger protein
  misc_feature (1)..(169): Homolog of NCBI NO: 18404102 NR Description: expressed protein
  misc_feature (1)..(169): Homolog of NCBI NO: 15231686 NR Description: zinc finger - like protein
  misc_feature (1)..(169): Homolog of NCBI NO: 14596167 NR Description: zinc finger-like protein [Arabidopsis thaliana]

SEQ ID NO: 32678 - protein, 142 aa, Arabidopsis thaliana; identical to SEQ ID NO: 29088
  peptide (1)..(142): Ceres Seq. ID no. 12324475
  misc_feature (83)..(123): Pfam Name: AN1-like Zinc finger Pfam Description: AN1-like Zinc finger
  misc_feature (1)..(142): Homolog of NCBI NO: 15234402 NR Description: putative protein
  misc_feature (1)..(142): Homolog of NCBI NO: 11361253 NR Description: hypothetical protein p85RF [imported] - Prunus
  misc_feature (1)..(141): Homolog of NCBI NO: 15235819 NR Description: similar to zinc finger - like protein
  misc_feature (1)..(142): Homolog of NCBI NO: 35187687 NR Description: zinc-finger protein [Oryza sativa (indica
  misc_feature (1)..(142): Homolog of NCBI NO: 25082726 NR Description: expressed protein [Arabidopsis thaliana]
  misc_feature (1)..(142): Homolog of NCBI NO: 18403408 NR Description: expressed protein
  misc_feature (1)..(142): Homolog of NCBI NO: 15225894 NR Description: putative zinc finger protein
  misc_feature (1)..(142): Homolog of NCBI NO: 18404102 NR Description: expressed protein
  misc_feature (1)..(142): Homolog of NCBI NO: 15231686 NR Description: zinc finger - like protein
  misc_feature (1)..(142): Homolog of NCBI NO: 14596167 NR Description: zinc finger-like protein [Arabidopsis thaliana]

SEQ ID NO: 32679 - protein, 103 aa, Arabidopsis thaliana; identical to SEQ ID NO: 29089
  peptide (1)..(103): Ceres Seq. ID no. 12324476

SEQ ID NO: 32680 - DNA, 1246 bp, Arabidopsis thaliana; identical to SEQ ID NO: 29090
  misc_feature (1)..(1246): Ceres Seq. ID no. 12396125
  misc_feature: MA Experiment ID: 108488 Result: Down-regulated in Transcription
  misc_feature: MA Experiment ID: 108573 Result: Up-regulated in Transcription
  misc_feature: MA Experiment 108573 PARAMETER Experiment Name: At_Drought_cDNA_P Parameter: Timepoint (hr) Value: 6
  misc_feature: MA Experiment 108573 PARAMETER Experiment Name: At_Drought_cDNA_P Parameter: Tissue Value: Aerial
  misc_feature: MA Experiment 108573 PARAMETER Experiment Name: At_Drought_cDNA_P Parameter: Treatment Value: Drought vs. No Drought
  misc_feature: MA Experiment ID: 20000182 Result: Up-regulated in Transcription
  misc_feature: MA Experiment 20000182 PARAMETER Experiment Name: At_2mM_SA_P Parameter: Age (day) Value: 14
  misc_feature: MA Experiment 20000182 PARAMETER Experiment Name: At_2mM_SA_P Parameter: Organism Value: A. thaliana
  misc_feature: MA Experiment 20000182 PARAMETER Experiment Name: At_2mM_SA_P Parameter: Plant Line Value: WS
  misc_feature: MA Experiment 20000182 PARAMETER Experiment Name: At_2mM_SA_P Parameter: Timepoint (hr) Value: 6
  misc_feature: MA Experiment 20000182 PARAMETER Experiment Name: At_2mM_SA_P Parameter: Tissue Value: Aerial
  misc_feature: MA Experiment 20000182 PARAMETER Experiment Name: At_2mM_SA_P Parameter: Treatment Value: 2mM SA vs. No Treatment
  misc_feature: MA Experiment ID: 20000224 Result: Down-regulated in Transcription
  misc_feature: MA Experiment ID: 20000265 Result: Down-regulated in Transcription
  misc_feature: MA Experiment 20000265 PARAMETER Experiment Name: At_Open_Flower_P Parameter: Age (day) Value: 21
  misc_feature: MA Experiment 20000265 PARAMETER Experiment Name: At_Open_Flower_P Parameter: Plant Line Value: WS
  misc_feature: MA Experiment 20000265 PARAMETER Experiment Name: At_Open_Flower_P Parameter: Tissue Value: Closed Flower vs. Whole Plant
  misc_feature: MA Experiment ID: 20000495 Result: Down-regulated in Transcription
  misc_feature: MA Experiment 20000495 PARAMETER Experiment Name: At_Guard_Cells_P Parameter: Harvest Date Value: 8/2/2002
  misc_feature: MA Experiment 20000495 PARAMETER Experiment Name: At_Guard_Cells_P Parameter: Organism Value: A. thaliana
  misc_feature: MA Experiment 20000495 PARAMETER Experiment Name: At_Guard_Cells_P Parameter: Tissue Value: Guard Cells vs. Leaves
  misc_feature: MA Experiment ID: 20001905 Result: Up-regulated in Transcription
  misc_feature: MA Experiment 20001905 PARAMETER Experiment Name: At_Drought_Reproduction_P Parameter: Age (day) Value: 40
  misc_feature: MA Experiment 20001905 PARAMETER Experiment Name: At_Drought_Reproduction_P Parameter: Organism Value: A. thaliana
  misc_feature: MA Experiment 20001905 PARAMETER Experiment Name: At_Drought_Reproduction_P Parameter: Plant Line Value: WS
  misc_feature: MA Experiment 20001905 PARAMETER Experiment Name: At_Drought_Reproduction_P Parameter: Timepoint (day) Value: 10
  misc_feature: MA Experiment 20001905 PARAMETER Experiment Name: At_Drought_Reproduction_P Parameter: Tissue Value: Rosettes
  misc_feature: MA Experiment 20001905 PARAMETER Experiment Name: At_Drought_Reproduction_P Parameter: Treatment Value: Drought vs. No Drought

SEQ ID NO: 32681 - protein, 304 aa, Arabidopsis thaliana; identical to SEQ ID NO: 29091
  peptide (1)..(304): Ceres Seq. ID no. 12396126
  misc_feature (7)..(217): Homolog of NCBI NO: 30688826 NR Description: expressed protein [Arabidopsis thaliana]
  misc_feature (29)..(303): Homolog of NCBI NO: 15128438 NR Description: contains EST D16001(C2001)~similar to Oryza
  misc_feature (7)..(214): Homolog of NCBI NO: 34894218 NR Description: P0439B06.30 [Oryza sativa (japonica
  misc_feature (1)..(276): Homolog of NCBI NO: 34906300 NR Description: unnamed protein product [Oryza sativa (japonica
  misc_feature (1)..(299): Homolog of NCBI NO: 18390460 NR Description: expressed protein
  misc_feature (1)..(258): Homolog of NCBI NO: 7487252 NR Description: hypothetical protein At2g02730 [imported] -
  misc_feature (1)..(266): Homolog of NCBI NO: 15227027 NR Description: expressed protein
  misc_feature (1)..(304): Homolog of NCBI NO: 21537323 NR Description: unknown [Arabidopsis thaliana]
  misc_feature (1)..(304): Homolog of NCBI NO: 18396143 NR Description: bZIP family transcription factor
  misc_feature (1)..(298): Homolog of NCBI NO: 25361065 NR Description: protein T7N9.6 [imported] - Arabidopsis thaliana

SEQ ID NO: 32682 - protein, 302 aa, Arabidopsis thaliana; identical to SEQ ID NO: 29092
  peptide (1)..(302): Ceres Seq. ID no. 12396127
  misc_feature (5)..(215): Homolog of NCBI NO: 30688826 NR Description: expressed protein [Arabidopsis thaliana]
  misc_feature (27)..(301): Homolog of NCBI NO: 15128438 NR Description: contains EST D16001(C2001)~similar to Oryza
  misc_feature (5)..(212): Homolog of NCBI NO: 34894218 NR Description: P0439B06.30 [Oryza sativa (japonica
  misc_feature (1)..(274): Homolog of NCBI NO: 34906300 NR Description: unnamed protein product [Oryza sativa (japonica
  misc_feature (1)..(297): Homolog of NCBI NO: 18390460 NR Description: expressed protein
  misc_feature (1)..(256): Homolog of NCBI NO: 7487252 NR Description: hypothetical protein At2g02730 [imported] -
  misc_feature (1)..(264): Homolog of NCBI NO: 15227027 NR Description: expressed protein
  misc_feature (1)..(302): Homolog of NCBI NO: 21537323 NR Description: unknown [Arabidopsis thaliana]
  misc_feature (1)..(302): Homolog of NCBI NO: 18396143 NR Description: bZIP family transcription factor
  misc_feature (1)..(296): Homolog of NCBI NO: 25361065 NR Description: protein T7N9.6 [imported] - Arabidopsis thaliana

SEQ ID NO: 32683 - protein, 280 aa, Arabidopsis thaliana; identical to SEQ ID NO: 29093
  peptide (1)..(280): Ceres Seq. ID no. 12396128
  misc_feature (1)..(193): Homolog of NCBI NO: 30688826 NR Description: expressed protein [Arabidopsis thaliana]
  misc_feature (5)..(279): Homolog of NCBI NO: 15128438 NR Description: contains EST D16001(C2001)~similar to Oryza
  misc_feature (1)..(190): Homolog of NCBI NO: 34894218 NR Description: P0439B06.30 [Oryza sativa (japonica
  misc_feature (1)..(252): Homolog of NCBI NO: 34906300 NR Description: unnamed protein product [Oryza sativa (japonica
  misc_feature (1)..(275): Homolog of NCBI NO: 18390460 NR Description: expressed protein
  misc_feature (1)..(234): Homolog of NCBI NO: 7487252 NR Description: hypothetical protein At2g02730 [imported] -
  misc_feature (1)..(242): Homolog of NCBI NO: 15227027 NR Description: expressed protein
  misc_feature (1)..(280): Homolog of NCBI NO: 21537323 NR Description: unknown [Arabidopsis thaliana]
  misc_feature (1)..(280): Homolog of NCBI NO: 18396143 NR Description: bZIP family transcription factor
  misc_feature (1)..(274): Homolog of NCBI NO: 25361065 NR Description: protein T7N9.6 [imported] - Arabidopsis thaliana

SEQ ID NO: 32684 - DNA, 1385 bp, Arabidopsis thaliana; identical to SEQ ID NO: 29094
  misc_feature (1)..(1385): Ceres Seq. ID no. 12396466
  misc_feature: MA Experiment ID: 108607 Result: Up-regulated in Transcription
  misc_feature: MA Experiment 108607 PARAMETER Experiment Name: At_100uM_ABA_cDNA_P Parameter: Timepoint (hr) Value: 4
  misc_feature: MA Experiment 108607 PARAMETER Experiment Name: At_100uM_ABA_cDNA_P Parameter: Tissue Value: Aerial
  misc_feature: MA Experiment 108607 PARAMETER Experiment Name: At_100uM_ABA_cDNA_P Parameter: Treatment Value: 100uM ABA vs. No Treatment
  misc_feature: MA Experiment ID: 20000069 Result: Up-regulated in Transcription
  misc_feature: MA Experiment 20000069 PARAMETER Experiment Name: At_100uM_ABA_Mutants_cDNA_P Parameter: Plant Line Value: CS23
  misc_feature: MA Experiment 20000069 PARAMETER Experiment Name: At_100uM_ABA_Mutants_cDNA_P Parameter: Timepoint (hr) Value: 6
  misc_feature: MA Experiment 20000069 PARAMETER Experiment Name: At_100uM_ABA_Mutants_cDNA_P Parameter: Tissue Value: Aerial
  misc_feature: MA Experiment 20000069 PARAMETER Experiment Name: At_100uM_ABA_Mutants_cDNA_P Parameter: Treatment Value: 100uM ABA vs. No Treatment
  misc_feature: MA Experiment ID: 20000070 Result: Up-regulated in Transcription
  misc_feature: MA Experiment 20000070 PARAMETER Experiment Name: At_100uM_ABA_Mutants_cDNA_P Parameter: Plant Line Value: CS24
  misc_feature: MA Experiment 20000070 PARAMETER Experiment Name: At_100uM_ABA_Mutants_cDNA_P Parameter: Timepoint (hr) Value: 6
  misc_feature: MA Experiment 20000070 PARAMETER Experiment Name: At_100uM_ABA_Mutants_cDNA_P Parameter: Tissue Value: Aerial
  misc_feature: MA Experiment 20000070 PARAMETER Experiment Name: At_100uM_ABA_Mutants_cDNA_P Parameter: Treatment Value: 100uM ABA vs. No Treatment
  misc_feature: MA Experiment ID: 20000071 Result: Up-regulated in Transcription
  misc_feature: MA Experiment 20000071 PARAMETER Experiment Name: At_100uM_ABA_Mutants_cDNA_P Parameter: Plant Line Value: CS8104
  misc_feature: MA Experiment 20000071 PARAMETER Experiment Name: At_100uM_ABA_Mutants_cDNA_P Parameter: Timepoint (hr) Value: 6
  misc_feature: MA Experiment 20000071 PARAMETER Experiment Name: At_100uM_ABA_Mutants_cDNA_P Parameter: Tissue Value: Aerial
  misc_feature: MA Experiment 20000071 PARAMETER Experiment Name: At_100uM_ABA_Mutants_cDNA_P Parameter: Treatment Value: 100uM ABA vs. No Treatment
  misc_feature: MA Experiment ID: 20000182 Result: Up-regulated in Transcription
  misc_feature: MA Experiment 20000182 PARAMETER Experiment Name: At_2mM_SA_P Parameter: Age (day) Value: 14
  misc_feature: MA Experiment 20000182 PARAMETER Experiment Name: At_2mM_SA_P Parameter: Organism Value: A. thaliana
  misc_feature: MA Experiment 20000182 PARAMETER Experiment Name: At_2mM_SA_P Parameter: Plant Line Value: WS
  misc_feature: MA Experiment 20000182 PARAMETER Experiment Name: At_2mM_SA_P Parameter: Timepoint (hr) Value: 6
  misc_feature: MA Experiment 20000182 PARAMETER Experiment Name: At_2mM_SA_P Parameter: Tissue Value: Aerial
  misc_feature: MA Experiment 20000182 PARAMETER Experiment Name: At_2mM_SA_P Parameter: Treatment Value: 2mM SA vs. No Treatment
  misc_feature: MA Experiment ID: 20000184 Result: Down-regulated in Transcription
  misc_feature: MA Experiment 20000184 PARAMETER Experiment Name: At_Shoots__P Parameter: Age (day) Value: 7
  misc_feature: MA Experiment 20000184 PARAMETER Experiment Name: At_Shoots__P Parameter: Tissue Value: Shoots vs. Whole Plant
  misc_feature: MA Experiment ID: 20000211 Result: Up-regulated in Transcription
  misc_feature: MA Experiment 20000211 PARAMETER Experiment Name: At_0.001percent_MeJA__P Parameter: Age (day) Value: 14
  misc_feature: MA Experiment 20000211 PARAMETER Experiment Name: At_0.001percent_MeJA__P Parameter: Organism Value: A. thaliana
  misc_feature: MA Experiment 20000211 PARAMETER Experiment Name: At_0.001percent_MeJA__P Parameter: Plant Line Value: WS
  misc_feature: MA Experiment 20000211 PARAMETER Experiment Name: At_0.001percent_MeJA__P Parameter: Timepoint (hr) Value: 1
  misc_feature: MA Experiment 20000211 PARAMETER Experiment Name: At_0.001percent_MeJA__P Parameter: Tissue Value: Aerial
  misc_feature: MA Experiment 20000211 PARAMETER Experiment Name: At_0.001percent_MeJA__P Parameter: Treatment Value: 0.001percent MeJA vs. No Treatment
  misc_feature: MA Experiment ID: 20000234 Result: Down-regulated in Transcription
  misc_feature: MA Experiment 20000234 PARAMETER Experiment Name: At_Siliques_P Parameter: Age (day) Value: 21
  misc_feature: MA Experiment 20000234 PARAMETER Experiment Name: At_Siliques_P Parameter: Organism Value: A. thaliana
  misc_feature: MA Experiment 20000234 PARAMETER Experiment Name: At_Siliques_P Parameter: Plant Line Value: WS
  misc_feature: MA Experiment 20000234 PARAMETER Experiment Name: At_Siliques_P Parameter: Tissue Value: Less Than 5mm Siliques vs. Whole Plant
  misc_feature: MA Experiment ID: 20000438 Result: Down-regulated in Transcription
  misc_feature: MA Experiment 20000438 PARAMETER Experiment Name: At_Shoots__P Parameter: Age (day) Value: 14
  misc_feature: MA Experiment 20000438 PARAMETER Experiment Name: At_Shoots__P Parameter: Tissue Value: Shoots vs. Whole Plant
  misc_feature: MA Experiment ID: 20000453 Result: Up-regulated in Transcription
  misc_feature: MA Experiment 20000453 PARAMETER Experiment Name: At_100uM_ABA_P Parameter: Age (day) Value: 15
  misc_feature: MA Experiment 20000453 PARAMETER Experiment Name: At_100uM_ABA_P Parameter: Organism Value: A. thaliana
  misc_feature: MA Experiment 20000453 PARAMETER Experiment Name: At_100uM_ABA_P Parameter: Plant Line Value: WS
  misc_feature: MA Experiment 20000453 PARAMETER Experiment Name: At_100uM_ABA_P Parameter: Timepoint (hr) Value: 24
  misc_feature: MA Experiment 20000453 PARAMETER Experiment Name: At_100uM_ABA_P Parameter: Tissue Value: Aerial
  misc_feature: MA Experiment 20000453 PARAMETER Experiment Name: At_100uM_ABA_P Parameter: Treatment Value: 100uM ABA vs. No Treatment
  misc_feature: MA Experiment ID: 20000495 Result: Down-regulated in Transcription
  misc_feature: MA Experiment 20000495 PARAMETER Experiment Name: At_Guard_Cells_P Parameter: Harvest Date Value: 8/2/2002
  misc_feature: MA Experiment 20000495 PARAMETER Experiment Name: At_Guard_Cells_P Parameter: Organism Value: A. thaliana
  misc_feature: MA Experiment 20000495 PARAMETER Experiment Name: At_Guard_Cells_P Parameter: Tissue Value: Guard Cells vs. Leaves
  misc_feature: MA Experiment ID: 20000496 Result: Down-regulated in Transcription
  misc_feature: MA Experiment 20000496 PARAMETER Experiment Name: At_Guard_Cells_P Parameter: Harvest Date Value: 7/19/2002
  misc_feature: MA Experiment 20000496 PARAMETER Experiment Name: At_Guard_Cells_P Parameter: Organism Value: Canola
  misc_feature: MA Experiment 20000496 PARAMETER Experiment Name: At_Guard_Cells_P Parameter: Tissue Value: Guard Cells vs. Leaves
  misc_feature: MA Experiment ID: 20000506 Result: Up-regulated in Transcription
  misc_feature: MA Experiment 20000506 PARAMETER Experiment Name: At_Wounding_P Parameter: Organism Value: A. thaliana
  misc_feature: MA Experiment 20000506 PARAMETER Experiment Name: At_Wounding_P Parameter: Plant Line Value: WS
  misc_feature: MA Experiment 20000506 PARAMETER Experiment Name: At_Wounding_P Parameter: Timepoint (hr) Value: 6
  misc_feature: MA Experiment 20000506 PARAMETER Experiment Name: At_Wounding_P Parameter: Tissue Value: Aerial
  misc_feature: MA Experiment 20000506 PARAMETER Experiment Name: At_Wounding_P Parameter: Treatment Value: Wounding vs. No Wounding
  misc_feature: MA Experiment ID: 20000573 Result: Up-regulated in Transcription
  misc_feature: MA Experiment 20000573 PARAMETER Experiment Name: At_100uM_ABA_Mutants__P Parameter: Organism Value: A. thaliana
  misc_feature: MA Experiment 20000573 PARAMETER Experiment Name: At_100uM_ABA_Mutants__P Parameter: Plant Line Value: CS22 vs. Ler wt
  misc_feature: MA Experiment 20000573 PARAMETER Experiment Name: At_100uM_ABA_Mutants__P Parameter: Timepoint (hr) Value: N/A
  misc_feature: MA Experiment 20000573 PARAMETER Experiment Name: At_100uM_ABA_Mutants__P Parameter: Tissue Value: Whole Plant
  misc_feature: MA Experiment 20000573 PARAMETER Experiment Name: At_100uM_ABA_Mutants__P Parameter: Treatment Value: None
  misc_feature: MA Experiment ID: 20000574 Result: Up-regulated in Transcription
  misc_feature: MA Experiment 20000574 PARAMETER Experiment Name: At_100uM_ABA_Mutants__P Parameter: Organism Value: A. thaliana
  misc_feature: MA Experiment 20000574 PARAMETER Experiment Name: At_100uM_ABA_Mutants__P Parameter: Plant Line Value: CS23 vs. Ler wt
  misc_feature: MA Experiment 20000574 PARAMETER Experiment Name: At_100uM_ABA_Mutants__P Parameter: Timepoint (hr) Value: N/A
  misc_feature: MA Experiment 20000574 PARAMETER Experiment Name: At_100uM_ABA_Mutants__P Parameter: Tissue Value: Whole Plant
  misc_feature: MA Experiment 20000574 PARAMETER Experiment Name: At_100uM_ABA_Mutants__P Parameter: Treatment Value: None
  misc_feature: MA Experiment ID: 20000576 Result: Down-regulated in Transcription
  misc_feature: MA Experiment 20000576 PARAMETER Experiment Name: At_100uM_ABA_Mutants__P Parameter: Organism Value: A. thaliana
  misc_feature: MA Experiment 20000576 PARAMETER Experiment Name: At_100uM_ABA_Mutants__P Parameter: Plant Line Value: CS23
  misc_feature: MA Experiment 20000576 PARAMETER Experiment Name: At_100uM_ABA_Mutants__P Parameter: Timepoint (hr) Value: 6
  misc_feature: MA Experiment 20000576 PARAMETER Experiment Name: At_100uM_ABA_Mutants__P Parameter: Tissue Value: Whole Plant
  misc_feature: MA Experiment 20000576 PARAMETER Experiment Name: At_100uM_ABA_Mutants__P Parameter: Treatment Value: 1uM ABA vs. No Treatment
  misc_feature: MA Experiment ID: 20000606 Result: Up-regulated in Transcription
  misc_feature: MA Experiment 20000606 PARAMETER Experiment Name: At_CS8548_Mutant_P Parameter: Age (day) Value: 14
  misc_feature: MA Experiment 20000606 PARAMETER Experiment Name: At_CS8548_Mutant_P Parameter: Plant Line Value: CS8548 vs. wt
  misc_feature: MA Experiment 20000606 PARAMETER Experiment Name: At_CS8548_Mutant_P Parameter: Tissue Value: Whole Plant
  misc_feature: MA Experiment ID: 20000709 Result: Up-regulated in Transcription
  misc_feature: MA Experiment 20000709 PARAMETER Experiment Name: At_15mM_NH4NO3_L-to-H_P Parameter: Age (hr) Value: 14
  misc_feature: MA Experiment 20000709 PARAMETER Experiment Name: At_15mM_NH4NO3_L-to-H_P Parameter: Organism Value: A. thaliana
  misc_feature: MA Experiment 20000709 PARAMETER Experiment Name: At_15mM_NH4NO3_L-to-H_P Parameter: Plant Line Value: WS
  misc_feature: MA Experiment 20000709 PARAMETER Experiment Name: At_15mM_NH4NO3_L-to-H_P Parameter: Timepoint (hr) Value: 4
  misc_feature: MA Experiment 20000709 PARAMETER Experiment Name: At_15mM_NH4NO3_L-to-H_P Parameter: Tissue Value: Aerial
  misc_feature: MA Experiment 20000709 PARAMETER Experiment Name: At_15mM_NH4NO3_L-to-H_P Parameter: Treatment Value: 15mM NH4NO3 vs. 30mM Mannitol
  misc_feature: MA Experiment ID: 20001450 Result: Down-regulated in Transcription
  misc_feature: MA Experiment 20001450 PARAMETER Experiment Name: At_Far-red-induction_P Parameter: Age (day) Value: 7
  misc_feature: MA Experiment 20001450 PARAMETER Experiment Name: At_Far-red-induction_P Parameter: Light Value: Far-red vs. White
  misc_feature: MA Experiment 20001450 PARAMETER Experiment Name: At_Far-red-induction_P Parameter: Organism Value: A. thaliana
  misc_feature: MA Experiment 20001450 PARAMETER Experiment Name: At_Far-red-induction_P Parameter: Plant Line Value: Columbia
  misc_feature: MA Experiment 20001450 PARAMETER Experiment Name: At_Far-red-induction_P Parameter: Timepoint (hr) Value: 8
  misc_feature: MA Experiment 20001450 PARAMETER Experiment Name: At_Far-red-induction_P Parameter: Tissue Value: Whole Plant
  misc_feature: MA Experiment ID: 20001451 Result: Down-regulated in Transcription
  misc_feature: MA Experiment 20001451 PARAMETER Experiment Name: At_Far-red-induction_P Parameter: Age (day) Value: 7
  misc_feature: MA Experiment 20001451 PARAMETER Experiment Name: At_Far-red-induction_P Parameter: Light Value: Far-red vs. White
  misc_feature: MA Experiment 20001451 PARAMETER Experiment Name: At_Far-red-induction_P Parameter: Organism Value: A. thaliana
  misc_feature: MA Experiment 20001451 PARAMETER Experiment Name: At_Far-red-induction_P Parameter: Plant Line Value: Columbia
  misc_feature: MA Experiment 20001451 PARAMETER Experiment Name: At_Far-red-induction_P Parameter: Timepoint (hr) Value: 24
  misc_feature: MA Experiment 20001451 PARAMETER Experiment Name: At_Far-red-induction_P Parameter: Tissue Value: Whole Plant

SEQ ID NO: 32685 - protein, 371 aa, Arabidopsis thaliana; identical to SEQ ID NO: 29095
  peptide (1)..(371): Ceres Seq. ID no. 12396467
  misc_feature (220)..(320): Pfam Name: 2OG-Fe(II) oxygenase superfamily Pfam Description: 2OG-Fe(II) oxygenase superfamily
  misc_feature (23)..(357): Homolog of NCBI NO: 2116599 NR Description: leucoanthocyanidin dioxygenase [Perilla
  misc_feature (27)..(365): Homolog of NCBI NO: 18402992 NR Description: expressed protein
  misc_feature (20)..(371): Homolog of NCBI NO: 21554535 NR Description: putative anthocyanidin synthase [Arabidopsis
  misc_feature (20)..(371): Homolog of NCBI NO: 15224472 NR Description: putative anthocyanidin synthase
  misc_feature (286)..(366): Homolog of NCBI NO: 34907994 NR Description: leucoanthocyanidin dioxygenase-like protein
  misc_feature (17)..(294): Homolog of NCBI NO: 34907994 NR Description: leucoanthocyanidin dioxygenase-like protein
  misc_feature (19)..(371): Homolog of NCBI NO: 15228785 NR Description: leucoanthocyanidin dioxygenase -like protein
  misc_feature (1)..(371): Homolog of NCBI NO: 15229694 NR Description: putative leucoanthocyanidin dioxygenase; protein
  misc_feature (17)..(371): Homolog of NCBI NO: 21537324 NR Description: leucoanthocyanidin dioxygenase-like protein
  misc_feature (1)..(371): Homolog of NCBI NO: 15239179 NR Description: leucoanthocyanidin dioxygenase-like protein

SEQ ID NO: 32686 - protein, 355 aa, Arabidopsis thaliana; identical to SEQ ID NO: 29096
  peptide (1)..(355): Ceres Seq. ID no. 12396468
  misc_feature (204)..(304): Pfam Name: 2OG-Fe(II) oxygenase superfamily Pfam Description: 2OG-Fe(II) oxygenase superfamily
  misc_feature (7)..(341): Homolog of NCBI NO: 2116599 NR Description: leucoanthocyanidin dioxygenase [Perilla
  misc_feature (11)..(349): Homolog of NCBI NO: 18402992 NR Description: expressed protein
  misc_feature (4)..(355): Homolog of NCBI NO: 21554535 NR Description: putative anthocyanidin synthase [Arabidopsis
  misc_feature (4)..(355): Homolog of NCBI NO: 15224472 NR Description: putative anthocyanidin synthase
  misc_feature (270)..(350): Homolog of NCBI NO: 34907994 NR Description: leucoanthocyanidin dioxygenase-like protein
  misc_feature (1)..(278): Homolog of NCBI NO: 34907994 NR Description: leucoanthocyanidin dioxygenase-like protein
  misc_feature (3)..(355): Homolog of NCBI NO: 15228785 NR Description: leucoanthocyanidin dioxygenase -like protein
  misc_feature (1)..(355): Homolog of NCBI NO: 15229694 NR Description: putative leucoanthocyanidin dioxygenase; protein
  misc_feature (1)..(355): Homolog of NCBI NO: 21537324 NR Description: leucoanthocyanidin dioxygenase-like protein
  misc_feature (1)..(355): Homolog of NCBI NO: 15239179 NR Description: leucoanthocyanidin dioxygenase-like protein

SEQ ID NO: 32687 - protein, 290 aa, Arabidopsis thaliana; identical to SEQ ID NO: 29097
  peptide (1)..(290): Ceres Seq. ID no. 12396469
  misc_feature (139)..(239): Pfam Name: 2OG-Fe(II) oxygenase superfamily Pfam Description: 2OG-Fe(II) oxygenase superfamily
  misc_feature (1)..(276): Homolog of NCBI NO: 2116599 NR Description: leucoanthocyanidin dioxygenase [Perilla
  misc_feature (1)..(284): Homolog of NCBI NO: 18402992 NR Description: expressed protein
  misc_feature (1)..(290): Homolog of NCBI NO: 21554535 NR Description: putative anthocyanidin synthase [Arabidopsis
  misc_feature (1)..(290): Homolog of NCBI NO: 15224472 NR Description: putative anthocyanidin synthase
  misc_feature (205)..(285): Homolog of NCBI NO: 34907994 NR Description: leucoanthocyanidin dioxygenase-like protein
  misc_feature (1)..(213): Homolog of NCBI NO: 34907994 NR Description: leucoanthocyanidin dioxygenase-like protein
  misc_feature (1)..(290): Homolog of NCBI NO: 15228785 NR Description: leucoanthocyanidin dioxygenase -like protein
  misc_feature (1)..(290): Homolog of NCBI NO: 15229694 NR Description: putative leucoanthocyanidin dioxygenase; protein
  misc_feature (1)..(290): Homolog of NCBI NO: 21537324 NR Description: leucoanthocyanidin dioxygenase-like protein
  misc_feature (1)..(290): Homolog of NCBI NO: 15239179 NR Description: leucoanthocyanidin dioxygenase-like protein

SEQ ID NO: 32688 - DNA, 1272 bp, Arabidopsis thaliana; identical to SEQ ID NO: 29098
  misc_feature (1)..(1272): Ceres Seq. ID no. 13500081
  misc_feature: MA Experiment ID: 108434 Result: Up-regulated in Transcription
  misc_feature: MA Experiment 108434 PARAMETER Experiment Name: At_Root_Tips_cDNA_P Parameter: Tissue Value: Root Tips
  misc_feature: MA Experiment ID: 20000179 Result: Up-regulated in Transcription
  misc_feature: MA Experiment 20000179 PARAMETER Experiment Name: At_Germinating_Seeds_P Parameter: Age (hr) Value: 6 vs. 0
  misc_feature: MA Experiment 20000179 PARAMETER Experiment Name: At_Germinating_Seeds_P Parameter: Tissue Value: Germinating Seeds
  misc_feature: MA Experiment ID: 20000180 Result: Up-regulated in Transcription
  misc_feature: MA Experiment 20000180 PARAMETER Experiment Name: At_Germinating_Seeds_P Parameter: Age (hr) Value: 24 vs. 0
  misc_feature: MA Experiment 20000180 PARAMETER Experiment Name: At_Germinating_Seeds_P Parameter: Tissue Value: Germinating Seeds
  misc_feature: MA Experiment ID: 20000495 Result: Up-regulated in Transcription
  misc_feature: MA Experiment 20000495 PARAMETER Experiment Name: At_Guard_Cells_P Parameter: Harvest Date Value: 8/2/2002
  misc_feature: MA Experiment 20000495 PARAMETER Experiment Name: At_Guard_Cells_P Parameter: Organism Value: A. thaliana
  misc_feature: MA Experiment 20000495 PARAMETER Experiment Name: At_Guard_Cells_P Parameter: Tissue Value: Guard Cells vs. Leaves
  misc_feature: MA Experiment ID: 20000496 Result: Up-regulated in Transcription
  misc_feature: MA Experiment 20000496 PARAMETER Experiment Name: At_Guard_Cells_P Parameter: Harvest Date Value: 7/19/2002
  misc_feature: MA Experiment 20000496 PARAMETER Experiment Name: At_Guard_Cells_P Parameter: Organism Value: Canola
  misc_feature: MA Experiment 20000496 PARAMETER Experiment Name: At_Guard_Cells_P Parameter: Tissue Value: Guard Cells vs. Leaves
  misc_feature: MA Experiment ID: 20001905 Result: Up-regulated in Transcription
  misc_feature: MA Experiment 20001905 PARAMETER Experiment Name: At_Drought_Reproduction_P Parameter: Age (day) Value: 40
  misc_feature: MA Experiment 20001905 PARAMETER Experiment Name: At_Drought_Reproduction_P Parameter: Organism Value: A. thaliana
  misc_feature: MA Experiment 20001905 PARAMETER Experiment Name: At_Drought_Reproduction_P Parameter: Plant Line Value: WS
  misc_feature: MA Experiment 20001905 PARAMETER Experiment Name: At_Drought_Reproduction_P Parameter: Timepoint (day) Value: 10
  misc_feature: MA Experiment 20001905 PARAMETER Experiment Name: At_Drought_Reproduction_P Parameter: Tissue Value: Rosettes
  misc_feature: MA Experiment 20001905 PARAMETER Experiment Name: At_Drought_Reproduction_P Parameter: Treatment Value: Drought vs. No Drought

SEQ ID NO: 32689 - protein, 304 aa, Arabidopsis thaliana; identical to SEQ ID NO: 29099
  peptide (1)..(304): Ceres Seq. ID no. 13500082
  misc_feature (52)..(150): Homolog of NCBI NO: 2340093 NR Description: PL6 protein, unknown function but deleted in
  misc_feature (195)..(298): Homolog of NCBI NO: 2340093 NR Description: PL6 protein, unknown function but deleted in
  misc_feature (19)..(282): Homolog of NCBI NO: 19920824 NR Description: CG9536-PA [Drosophila melanogaster]
  misc_feature (20)..(282): Homolog of NCBI NO: 34865897 NR Description: similar to PL6 protein [Rattus norvegicus]
  misc_feature (20)..(282): Homolog of NCBI NO: 9790165 NR Description: PL6 protein; PL-6; placental protein 6 [Mus
  misc_feature (40)..(298): Homolog of NCBI NO: 5902022 NR Description: PL6 protein [Homo sapiens]
  misc_feature (12)..(285): Homolog of NCBI NO: 21741573 NR Description: OSJNBa0094O15.3 [Oryza sativa (japonica
  misc_feature (5)..(304): Homolog of NCBI NO: 34395257 NR Description: putative placental protein 6
  misc_feature (1)..(304): Homolog of NCBI NO: 18398108 NR Description: expressed protein [Arabidopsis thaliana]
  misc_feature (5)..(304): Homolog of NCBI NO: 6648207 NR Description: unknown protein [Arabidopsis thaliana]

SEQ ID NO: 32690 - protein, 297 aa, Arabidopsis thaliana; identical to SEQ ID NO: 29100
  peptide (1)..(297): Ceres Seq. ID no. 13500083
  misc_feature (45)..(143): Homolog of NCBI NO: 2340093 NR Description: PL6 protein, unknown function but deleted in
  misc_feature (188)..(291): Homolog of NCBI NO: 2340093 NR Description: PL6 protein, unknown function but deleted in
  misc_feature (12)..(275): Homolog of NCBI NO: 19920824 NR Description: CG9536-PA [Drosophila melanogaster]
  misc_feature (13)..(275): Homolog of NCBI NO: 34865897 NR Description: similar to PL6 protein [Rattus norvegicus]
  misc_feature (13)..(275): Homolog of NCBI NO: 9790165 NR Description: PL6 protein; PL-6; placental protein 6 [Mus
  misc_feature (33)..(291): Homolog of NCBI NO: 5902022 NR Description: PL6 protein [Homo sapiens]
  misc_feature (5)..(278): Homolog of NCBI NO: 21741573 NR Description: OSJNBa0094O15.3 [Oryza sativa (japonica
  misc_feature (1)..(297): Homolog of NCBI NO: 34395257 NR Description: putative placental protein 6
  misc_feature (1)..(297): Homolog of NCBI NO: 18398108 NR Description: expressed protein [Arabidopsis thaliana]
  misc_feature (1)..(297): Homolog of NCBI NO: 6648207 NR Description: unknown protein [Arabidopsis thaliana]

SEQ ID NO: 32691 - protein, 228 aa, Arabidopsis thaliana; identical to SEQ ID NO: 29101
  peptide (1)..(228): Ceres Seq. ID no. 13500084
  misc_feature (1)..(74): Homolog of NCBI NO: 2340093 NR Description: PL6 protein, unknown function but deleted in
  misc_feature (119)..(222): Homolog of NCBI NO: 2340093 NR Description: PL6 protein, unknown function but deleted in
  misc_feature (1)..(206): Homolog of NCBI NO: 19920824 NR Description: CG9536-PA [Drosophila melanogaster]
  misc_feature (1)..(206): Homolog of NCBI NO: 34865897 NR Description: similar to PL6 protein [Rattus norvegicus]
  misc_feature (1)..(206): Homolog of NCBI NO: 9790165 NR Description: PL6 protein; PL-6; placental protein 6 [Mus
  misc_feature (1)..(222): Homolog of NCBI NO: 5902022 NR Description: PL6 protein [Homo sapiens]
  misc_feature (1)..(209): Homolog of NCBI NO: 21741573 NR Description: OSJNBa0094O15.3 [Oryza sativa (japonica
  misc_feature (1)..(228): Homolog of NCBI NO: 34395257 NR Description: putative placental protein 6
  misc_feature (1)..(228): Homolog of NCBI NO: 18398108 NR Description: expressed protein [Arabidopsis thaliana]
  misc_feature (1)..(228): Homolog of NCBI NO: 6648207 NR Description: unknown protein [Arabidopsis thaliana]

SEQ ID NO: 32692 - DNA, 1362 bp, Arabidopsis thaliana; identical to SEQ ID NO: 29102
  misc_feature (1)..(1362): Ceres Seq. ID no. 13486641
  misc_feature: MA Experiment ID: 108434 Result: Down-regulated in Transcription
  misc_feature: MA Experiment 108434 PARAMETER Experiment Name: At_Root_Tips_cDNA_P Parameter: Tissue Value: Root Tips
  misc_feature: MA Experiment ID: 108469 Result: Up-regulated in Transcription
  misc_feature: MA Experiment ID: 108569 Result: Up-regulated in Transcription
  misc_feature: MA Experiment 108569 PARAMETER Experiment Name: At_0.001%_MeJA__cDNA_P Parameter: Timepoint (hr) Value: 6
  misc_feature: MA Experiment 108569 PARAMETER Experiment Name: At_0.001%_MeJA__cDNA_P Parameter: Tissue Value: Aerial
  misc_feature: MA Experiment 108569 PARAMETER Experiment Name: At_0.001%_MeJA__cDNA_P Parameter: Treatment Value: 0.001% MeJA vs. No Treatment
  misc_feature: MA Experiment ID: 108572 Result: Down-regulated in Transcription
  misc_feature: MA Experiment 108572 PARAMETER Experiment Name: At_Drought_cDNA_P Parameter: Timepoint (hr) Value: 1
  misc_feature: MA Experiment 108572 PARAMETER Experiment Name: At_Drought_cDNA_P Parameter: Tissue Value: Aerial
  misc_feature: MA Experiment 108572 PARAMETER Experiment Name: At_Drought_cDNA_P Parameter: Treatment Value: Drought vs. No Drought
  misc_feature: MA Experiment ID: 108594 Result: Down-regulated in Transcription
  misc_feature: MA Experiment 108594 PARAMETER Experiment Name: At_Ler-rhl_Root_cDNA_P Parameter: Plant Line Value: null
  misc_feature: MA Experiment ID: 108668 Result: Up-regulated in Transcription
  misc_feature: MA Experiment 108668 PARAMETER Experiment Name: At_2mM_SA_cDNA_P Parameter: Plant Line Value: WS
  misc_feature: MA Experiment 108668 PARAMETER Experiment Name: At_2mM_SA_cDNA_P Parameter: Timepoint (hr) Value: 6
  misc_feature: MA Experiment 108668 PARAMETER Experiment Name: At_2mM_SA_cDNA_P Parameter: Treatment Value: 2mM SA vs. No Treatment
  misc_feature: MA Experiment ID: 20000111 Result: Down-regulated in Transcription
  misc_feature: MA Experiment 20000111 PARAMETER Experiment Name: At_42deg_Heat_cDNA_P Parameter: Temperature (deg C) Value: 42 vs. 22
  misc_feature: MA Experiment 20000111 PARAMETER Experiment Name: At_42deg_Heat_cDNA_P Parameter: Timepoint (hr) Value: 6
  misc_feature: MA Experiment 20000111 PARAMETER Experiment Name: At_42deg_Heat_cDNA_P Parameter: Tissue Value: Aerial
  misc_feature: MA Experiment ID: 20000113 Result: Down-regulated in Transcription
  misc_feature: MA Experiment 20000113 PARAMETER Experiment Name: At_42deg_Heat_cDNA_P Parameter: Temperature (deg C) Value: 42 vs. 22
  misc_feature: MA Experiment 20000113 PARAMETER Experiment Name: At_42deg_Heat_cDNA_P Parameter: Timepoint (hr) Value: 8
  misc_feature: MA Experiment 20000113 PARAMETER Experiment Name: At_42deg_Heat_cDNA_P Parameter: Tissue Value: Aerial
  misc_feature: MA Experiment ID: 20000180 Result: Up-regulated in Transcription
  misc_feature: MA Experiment 20000180 PARAMETER Experiment Name: At_Germinating_Seeds_P Parameter: Age (hr) Value: 24 vs. 0
  misc_feature: MA Experiment 20000180 PARAMETER Experiment Name: At_Germinating_Seeds_P Parameter: Tissue Value: Germinating Seeds
  misc_feature: MA Experiment ID: 20000182 Result: Up-regulated in Transcription
  misc_feature: MA Experiment 20000182 PARAMETER Experiment Name: At_2mM_SA_P Parameter: Age (day) Value: 14
  misc_feature: MA Experiment 20000182 PARAMETER Experiment Name: At_2mM_SA_P Parameter: Organism Value: A. thaliana
  misc_feature: MA Experiment 20000182 PARAMETER Experiment Name: At_2mM_SA_P Parameter: Plant Line Value: WS
  misc_feature: MA Experiment 20000182 PARAMETER Experiment Name: At_2mM_SA_P Parameter: Timepoint (hr) Value: 6
  misc_feature: MA Experiment 20000182 PARAMETER Experiment Name: At_2mM_SA_P Parameter: Tissue Value: Aerial
  misc_feature: MA Experiment 20000182 PARAMETER Experiment Name: At_2mM_SA_P Parameter: Treatment Value: 2mM SA vs. No Treatment
  misc_feature: MA Experiment ID: 20000185 Result: Up-regulated in Transcription
  misc_feature: MA Experiment 20000185 PARAMETER Experiment Name: At_Roots__P Parameter: Age (day) Value: 7 vs. 21
  misc_feature: MA Experiment 20000185 PARAMETER Experiment Name: At_Roots__P Parameter: Organism Value: A. thaliana
  misc_feature: MA Experiment 20000185 PARAMETER Experiment Name: At_Roots__P Parameter: Tissue Value: Roots vs. Whole Plant
  misc_feature: MA Experiment ID: 20000495 Result: Up-regulated in Transcription
  misc_feature: MA Experiment 20000495 PARAMETER Experiment Name: At_Guard_Cells_P Parameter: Harvest Date Value: 8/2/2002
  misc_feature: MA Experiment 20000495 PARAMETER Experiment Name: At_Guard_Cells_P Parameter: Organism Value: A. thaliana
  misc_feature: MA Experiment 20000495 PARAMETER Experiment Name: At_Guard_Cells_P Parameter: Tissue Value: Guard Cells vs. Leaves
  misc_feature: MA Experiment ID: 20000527 Result: Down-regulated in Transcription
  misc_feature: MA Experiment 20000527 PARAMETER Experiment Name: At_10percent_PEG_P Parameter: Age (day) Value: 20
  misc_feature: MA Experiment 20000527 PARAMETER Experiment Name: At_10percent_PEG_P Parameter: Organism Value: A. thaliana
  misc_feature: MA Experiment 20000527 PARAMETER Experiment Name: At_10percent_PEG_P Parameter: Plant Line Value: WS
  misc_feature: MA Experiment 20000527 PARAMETER Experiment Name: At_10percent_PEG_P Parameter: Timepoint (day) Value: 20
  misc_feature: MA Experiment 20000527 PARAMETER Experiment Name: At_10percent_PEG_P Parameter: Tissue Value: Whole Plant
  misc_feature: MA Experiment 20000527 PARAMETER Experiment Name: At_10percent_PEG_P Parameter: Treatment Value: 10percent PEG vs. No Treatment
  misc_feature: MA Experiment ID: 20001556 Result: Down-regulated in Transcription
  misc_feature: MA Experiment 20001556 PARAMETER Experiment Name: At_Drought_Soil_Dry_P Parameter: Age (day) Value: 26
  misc_feature: MA Experiment 20001556 PARAMETER Experiment Name: At_Drought_Soil_Dry_P Parameter: Organism Value: A. thaliana
  misc_feature: MA Experiment 20001556 PARAMETER Experiment Name: At_Drought_Soil_Dry_P Parameter: Plant Line Value: WS
  misc_feature: MA Experiment 20001556 PARAMETER Experiment Name: At_Drought_Soil_Dry_P Parameter: Post Timepoint (hr) Value: None
  misc_feature: MA Experiment 20001556 PARAMETER Experiment Name: At_Drought_Soil_Dry_P Parameter: Post-Treatment Value: None
  misc_feature: MA Experiment 20001556 PARAMETER Experiment Name: At_Drought_Soil_Dry_P Parameter: Timepoint (day) Value: 12
  misc_feature: MA Experiment 20001556 PARAMETER Experiment Name: At_Drought_Soil_Dry_P Parameter: Treatment Value: Drought vs. No Drought
  misc_feature: MA Experiment ID: 20001906 Result: Down-regulated in Transcription
  misc_feature: MA Experiment 20001906 PARAMETER Experiment Name: At_Drought_Reproduction_P Parameter: Age (day) Value: 35
  misc_feature: MA Experiment 20001906 PARAMETER Experiment Name: At_Drought_Reproduction_P Parameter: Organism Value: A. thaliana
  misc_feature: MA Experiment 20001906 PARAMETER Experiment Name: At_Drought_Reproduction_P Parameter: Plant Line Value: WS
  misc_feature: MA Experiment 20001906 PARAMETER Experiment Name: At_Drought_Reproduction_P Parameter: Timepoint (day) Value: 5
  misc_feature: MA Experiment 20001906 PARAMETER Experiment Name: At_Drought_Reproduction_P Parameter: Tissue Value: Siliques
  misc_feature: MA Experiment 20001906 PARAMETER Experiment Name: At_Drought_Reproduction_P Parameter: Treatment Value: Drought vs. No Drought
  misc_feature: MA Experiment ID: 20001911 Result: Down-regulated in Transcription
  misc_feature: MA Experiment 20001911 PARAMETER Experiment Name: At_Drought_Reproduction_P Parameter: Age (day) Value: 40
  misc_feature: MA Experiment 20001911 PARAMETER Experiment Name: At_Drought_Reproduction_P Parameter: Organism Value: A. thaliana
  misc_feature: MA Experiment 20001911 PARAMETER Experiment Name: At_Drought_Reproduction_P Parameter: Plant Line Value: WS
  misc_feature: MA Experiment 20001911 PARAMETER Experiment Name: At_Drought_Reproduction_P Parameter: Timepoint (day) Value: 10
  misc_feature: MA Experiment 20001911 PARAMETER Experiment Name: At_Drought_Reproduction_P Parameter: Tissue Value: Flowers
  misc_feature: MA Experiment 20001911 PARAMETER Experiment Name: At_Drought_Reproduction_P Parameter: Treatment Value: Drought vs. No Drought

SEQ ID NO: 32693 - protein, 359 aa, Arabidopsis thaliana; identical to SEQ ID NO: 29103
  peptide (1)..(359): Ceres Seq. ID no. 13486642
  misc_feature (44)..(348): Pfam Name: GDSL-like Lipase/Acylhydrolase Pfam Description: GDSL-like Lipase/Acylhydrolase
  misc_feature (44)..(348): Homolog of NCBI NO: 10241432 NR Description: putative lipase/acylhydrolase
  misc_feature (59)..(101): Homolog of NCBI NO: 15242809 NR Description: hypothetical protein [Arabidopsis thaliana]
  misc_feature (220)..(358): Homolog of NCBI NO: 15242809 NR Description: hypothetical protein [Arabidopsis thaliana]
  misc_feature (68)..(220): Homolog of NCBI NO: 33285918 NR Description: putative lipase [Brassica rapa subsp. pekinensis]
  misc_feature (7)..(348): Homolog of NCBI NO: 20260298 NR Description: unknown protein [Arabidopsis thaliana]
  misc_feature (29)..(358): Homolog of NCBI NO: 15242810 NR Description: GDSL-motif lipase/hydrolase protein [Arabidopsis
  misc_feature (92)..(354): Homolog of NCBI NO: 6143883 NR Description: unknown protein [Arabidopsis thaliana]
  misc_feature (4)..(354): Homolog of NCBI NO: 15232799 NR Description: GDSL-motif lipase/hydrolase protein [Arabidopsis
  misc_feature (4)..(354): Homolog of NCBI NO: 28393114 NR Description: putative lipase acylhydrolase [Arabidopsis
  misc_feature (1)..(359): Homolog of NCBI NO: 15242811 NR Description: GDSL-motif lipase/hydrolase protein [Arabidopsis

SEQ ID NO: 32694 - protein, 242 aa, Arabidopsis thaliana; identical to SEQ ID NO: 29104
  peptide (1)..(242): Ceres Seq. ID no. 13486643
  misc_feature (1)..(231): Pfam Name: GDSL-like Lipase/Acylhydrolase Pfam Description: GDSL-like Lipase/Acylhydrolase
  misc_feature (1)..(231): Homolog of NCBI NO: 32488918 NR Description: OSJNBb0059K02.9 [Oryza sativa (japonica
  misc_feature (1)..(231): Homolog of NCBI NO: 10241432 NR Description: putative lipase/acylhydrolase
  misc_feature (103)..(241): Homolog of NCBI NO: 15242809 NR Description: hypothetical protein [Arabidopsis thaliana]
  misc_feature (1)..(103): Homolog of NCBI NO: 33285918 NR Description: putative lipase [Brassica rapa subsp. pekinensis]
  misc_feature (1)..(231): Homolog of NCBI NO: 20260298 NR Description: unknown protein [Arabidopsis thaliana]
  misc_feature (1)..(241): Homolog of NCBI NO: 15242810 NR Description: GDSL-motif lipase/hydrolase protein [Arabidopsis
  misc_feature (1)..(237): Homolog of NCBI NO: 6143883 NR Description: unknown protein [Arabidopsis thaliana]
  misc_feature (1)..(237): Homolog of NCBI NO: 15232799 NR Description: GDSL-motif lipase/hydrolase protein [Arabidopsis
  misc_feature (1)..(237): Homolog of NCBI NO: 28393114 NR Description: putative lipase acylhydrolase [Arabidopsis
  misc_feature (1)..(242): Homolog of NCBI NO: 15242811 NR Description: GDSL-motif lipase/hydrolase protein [Arabidopsis

SEQ ID NO: 32695 - protein, 223 aa, Arabidopsis thaliana; identical to SEQ ID NO: 29105
  peptide (1)..(223): Ceres Seq. ID no. 13486644
  misc_feature (1)..(212): Pfam Name: GDSL-like Lipase/Acylhydrolase Pfam Description: GDSL-like Lipase/Acylhydrolase
  misc_feature (1)..(212): Homolog of NCBI NO: 32488918 NR Description: OSJNBb0059K02.9 [Oryza sativa (japonica
  misc_feature (1)..(212): Homolog of NCBI NO: 10241432 NR Description: putative lipase/acylhydrolase
  misc_feature (84)..(222): Homolog of NCBI NO: 15242809 NR Description: hypothetical protein [Arabidopsis thaliana]
  misc_feature (1)..(84): Homolog of NCBI NO: 33285918 NR Description: putative lipase [Brassica rapa subsp. pekinensis]
  misc_feature (1)..(212): Homolog of NCBI NO: 20260298 NR Description: unknown protein [Arabidopsis thaliana]
  misc_feature (1)..(222): Homolog of NCBI NO: 15242810 NR Description: GDSL-motif lipase/hydrolase protein [Arabidopsis
  misc_feature (1)..(218): Homolog of NCBI NO: 6143883 NR Description: unknown protein [Arabidopsis thaliana]
  misc_feature (1)..(218): Homolog of NCBI NO: 15232799 NR Description: GDSL-motif lipase/hydrolase protein [Arabidopsis
  misc_feature (1)..(218): Homolog of NCBI NO: 28393114 NR Description: putative lipase acylhydrolase [Arabidopsis
  misc_feature (1)..(223): Homolog of NCBI NO: 15242811 NR Description: GDSL-motif lipase/hydrolase protein [Arabidopsis

SEQ ID NO: 32696 - DNA, 1035 bp, Arabidopsis thaliana; identical to SEQ ID NO: 22638
  misc_feature (1)..(1035): Ceres Seq. ID no. 13509220
  misc_feature: MA Experiment ID: 108434 Result: Down-regulated in Transcription
  misc_feature: MA Experiment 108434 PARAMETER Experiment Name: At_Root_Tips_cDNA_P Parameter: Tissue Value: Root Tips
  misc_feature: MA Experiment ID: 108461 Result: Up-regulated in Transcription
  misc_feature: MA Experiment 108461 PARAMETER Experiment Name: At_Germinating_Seeds_cDNA_P Parameter: Age (day) Value: 1 vs. 0
  misc_feature: MA Experiment 108461 PARAMETER Experiment Name: At_Germinating_Seeds_cDNA_P Parameter: Tissue Value: Germinating Seeds
  misc_feature: MA Experiment ID: 108462 Result: Up-regulated in Transcription
  misc_feature: MA Experiment 108462 PARAMETER Experiment Name: At_Germinating_Seeds_cDNA_P Parameter: Age (day) Value: 2 vs. 0
  misc_feature: MA Experiment 108462 PARAMETER Experiment Name: At_Germinating_Seeds_cDNA_P Parameter: Tissue Value: Germinating Seeds
  misc_feature: MA Experiment ID: 108464 Result: Up-regulated in Transcription
  misc_feature: MA Experiment 108464 PARAMETER Experiment Name: At_Germinating_Seeds_cDNA_P Parameter: Age (day) Value: 4 vs. 0
  misc_feature: MA Experiment 108464 PARAMETER Experiment Name: At_Germinating_Seeds_cDNA_P Parameter: Tissue Value: Germinating Seeds
  misc_feature: MA Experiment ID: 108488 Result: Up-regulated in Transcription
  misc_feature: MA Experiment ID: 108489 Result: Down-regulated in Transcription
  misc_feature: MA Experiment ID: 108595 Result: Down-regulated in Transcription
  misc_feature: MA Experiment 108595 PARAMETER Experiment Name: At_Ler-pi_Ovule_cDNA_P Parameter: Plant Line Value: null
  misc_feature: MA Experiment ID: 20000314 Result: Down-regulated in Transcription
  misc_feature: MA Experiment 20000314 PARAMETER Experiment Name: At_14day_Shoots-Roots_Sub_P Parameter: Age (day) Value: 14
  misc_feature: MA Experiment 20000314 PARAMETER Experiment Name: At_14day_Shoots-Roots_Sub_P Parameter: Organism Value: A. thaliana
  misc_feature: MA Experiment 20000314 PARAMETER Experiment Name: At_14day_Shoots-Roots_Sub_P Parameter: Plant Line Value: WS
  misc_feature: MA Experiment 20000314 PARAMETER Experiment Name: At_14day_Shoots-Roots_Sub_P Parameter: Tissue Value: Roots vs. Whole Plant
  misc_feature: MA Experiment ID: 20000315 Result: Up-regulated in Transcription
  misc_feature: MA Experiment 20000315 PARAMETER Experiment Name: At_14day_Shoots-Roots_Sub_P Parameter: Age (day) Value: 14
  misc_feature: MA Experiment 20000315 PARAMETER Experiment Name: At_14day_Shoots-Roots_Sub_P Parameter: Organism Value: A. thaliana
  misc_feature: MA Experiment 20000315 PARAMETER Experiment Name: At_14day_Shoots-Roots_Sub_P Parameter: Plant Line Value: WS
  misc_feature: MA Experiment 20000315 PARAMETER Experiment Name: At_14day_Shoots-Roots_Sub_P Parameter: Tissue Value: Shoots vs. Whole Plant
  misc_feature: MA Experiment ID: 20000328 Result: Up-regulated in Transcription
  misc_feature: MA Experiment 20000328 PARAMETER Experiment Name: At_42deg_Heat_Sub_P Parameter: Age (day) Value: 14
  misc_feature: MA Experiment 20000328 PARAMETER Experiment Name: At_42deg_Heat_Sub_P Parameter: Organism Value: A. thaliana
  misc_feature: MA Experiment 20000328 PARAMETER Experiment Name: At_42deg_Heat_Sub_P Parameter: Plant Line Value: WS
  misc_feature: MA Experiment 20000328 PARAMETER Experiment Name: At_42deg_Heat_Sub_P Parameter: Temperature (deg C) Value: 42 vs. 22
  misc_feature: MA Experiment 20000328 PARAMETER Experiment Name: At_42deg_Heat_Sub_P Parameter: Timepoint (hr) Value: 6
  misc_feature: MA Experiment 20000328 PARAMETER Experiment Name: At_42deg_Heat_Sub_P Parameter: Tissue Value: Aerial
  misc_feature: MA Experiment ID: 20001807 Result: Up-regulated in Transcription
  misc_feature: MA Experiment 20001807 PARAMETER Experiment Name: At_50mM_NH4NO3_L-to-H_Sub_P Parameter: Timepoint (hr) Value: 6
  misc_feature: MA Experiment 20001807 PARAMETER Experiment Name: At_50mM_NH4NO3_L-to-H_Sub_P Parameter: Tissue Value: Leaf
  misc_feature: MA Experiment 20001807 PARAMETER Experiment Name: At_50mM_NH4NO3_L-to-H_Sub_P Parameter: Treatment Value: 50mM NH4NO3 vs 100mM Mannitol

SEQ ID NO: 32697 - protein, 267 aa, Arabidopsis thaliana; identical to SEQ ID NO: 22639
  peptide (1)..(267): Ceres Seq. ID no. 13509221
  misc_feature (65)..(234): Pfam Name: Chlorophyll A-B binding protein Pfam Description: Chlorophyll A-B binding protein
  misc_feature (65)..(234): Pfam Name: Chlorophyll A-B binding protein Pfam Description: Chlorophyll A-B binding protein
  misc_feature (65)..(234): Pfam Name: Chlorophyll A-B binding protein Pfam Description: Chlorophyll A-B binding protein
  misc_feature (1)..(267): Homolog of NCBI NO: 115819 NR Description: Chlorophyll A-B binding protein 1B, chloroplast
  misc_feature (19)..(267): Homolog of NCBI NO: 12324161 NR Description: chlorophyll A-B-binding protein 2 precursor, 5'
  misc_feature (1)..(267): Homolog of NCBI NO: 21592428 NR Description: putative photosystem II type I chlorophyll a b
  misc_feature (1)..(267): Homolog of NCBI NO: 18266039 NR Description: chlorophyll a/b binding protein [Brassica
  misc_feature (1)..(267): Homolog of NCBI NO: 18403549 NR Description: photosystem II type I chlorophyll a /b binding
  misc_feature (1)..(267): Homolog of NCBI NO: 115819 NR Description: Chlorophyll A-B binding protein 1B, chloroplast
  misc_feature (1)..(267): Homolog of NCBI NO: 21592428 NR Description: putative photosystem II type I chlorophyll a b
  misc_feature (1)..(267): Homolog of NCBI NO: 18403549 NR Description: photosystem II type I chlorophyll a /b binding
  misc_feature (1)..(267): Homolog of NCBI NO: 18266039 NR Description: chlorophyll a/b binding protein [Brassica
  misc_feature (1)..(267): Homolog of NCBI NO: 21592428 NR Description: putative photosystem II type I chlorophyll a b
  misc_feature (19)..(267): Homolog of NCBI NO: 12324161 NR Description: chlorophyll A-B-binding protein 2 precursor, 5'
  misc_feature (1)..(267): Homolog of NCBI NO: 115819 NR Description: Chlorophyll A-B binding protein 1B, chloroplast
  misc_feature (1)..(267): Homolog of NCBI NO: 15220615 NR Description: light-harvesting chlorophyll a/b binding protein
  misc_feature (1)..(267): Homolog of NCBI NO: 18397286 NR Description: photosystem II type I chlorophyll a /b binding
  misc_feature (1)..(267): Homolog of NCBI NO: 17473828 NR Description: chlorophyll a/b-binding protein [Arabidopsis
  misc_feature (1)..(267): Homolog of NCBI NO: 18403546 NR Description: photosystem II type I chlorophyll a /b binding
  misc_feature (1)..(267): Homolog of NCBI NO: 115778 NR Description: Chlorophyll A-B binding protein 1, chloroplast
  misc_feature (1)..(267): Homolog of NCBI NO: 15220615 NR Description: light-harvesting chlorophyll a/b binding protein
  misc_feature (1)..(267): Homolog of NCBI NO: 18397286 NR Description: photosystem II type I chlorophyll a /b binding
  misc_feature (1)..(267): Homolog of NCBI NO: 17473828 NR Description: chlorophyll a/b-binding protein [Arabidopsis
  misc_feature (1)..(267): Homolog of NCBI NO: 18403546 NR Description: photosystem II type I chlorophyll a /b binding
  misc_feature (1)..(267): Homolog of NCBI NO: 115778 NR Description: Chlorophyll A-B binding protein 1, chloroplast
  misc_feature (1)..(267): Homolog of NCBI NO: 18403549 NR Description: photosystem II type I chlorophyll a /b binding
  misc_feature (1)..(267): Homolog of NCBI NO: 18266039 NR Description: chlorophyll a/b binding protein [Brassica
  misc_feature (19)..(267): Homolog of NCBI NO: 12324161 NR Description: chlorophyll A-B-binding protein 2 precursor, 5'
  misc_feature (1)..(267): Homolog of NCBI NO: 115778 NR Description: Chlorophyll A-B binding protein 1, chloroplast
  misc_feature (1)..(267): Homolog of NCBI NO: 18403546 NR Description: photosystem II type I chlorophyll a /b binding
  misc_feature (1)..(267): Homolog of NCBI NO: 17473828 NR Description: chlorophyll a/b-binding protein [Arabidopsis
  misc_feature (1)..(267): Homolog of NCBI NO: 18397286 NR Description: photosystem II type I chlorophyll a /b binding
  misc_feature (1)..(267): Homolog of NCBI NO: 15220615 NR Description: light-harvesting chlorophyll a/b binding protein

SEQ ID NO: 32698 - protein, 262 aa, Arabidopsis thaliana; identical to SEQ ID NO: 22640
  peptide (1)..(262): Ceres Seq. ID no. 13509222
  misc_feature (60)..(229): Pfam Name: Chlorophyll A-B binding protein Pfam Description: Chlorophyll A-B binding protein
  misc_feature (60)..(229): Pfam Name: Chlorophyll A-B binding protein Pfam Description: Chlorophyll A-B binding protein
  misc_feature (60)..(229): Pfam Name: Chlorophyll A-B binding protein Pfam Description: Chlorophyll A-B binding protein
  misc_feature (1)..(262): Homolog of NCBI NO: 115819 NR Description: Chlorophyll A-B binding protein 1B, chloroplast
  misc_feature (14)..(262): Homolog of NCBI NO: 12324161 NR Description: chlorophyll A-B-binding protein 2 precursor, 5'
  misc_feature (1)..(262): Homolog of NCBI NO: 21592428 NR Description: putative photosystem II type I chlorophyll a b
  misc_feature (1)..(262): Homolog of NCBI NO: 18266039 NR Description: chlorophyll a/b binding protein [Brassica
  misc_feature (1)..(262): Homolog of NCBI NO: 18403549 NR Description: photosystem II type I chlorophyll a /b binding
  misc_feature (1)..(262): Homolog of NCBI NO: 115819 NR Description: Chlorophyll A-B binding protein 1B, chloroplast
  misc_feature (1)..(262): Homolog of NCBI NO: 21592428 NR Description: putative photosystem II type I chlorophyll a b
  misc_feature (1)..(262): Homolog of NCBI NO: 18403549 NR Description: photosystem II type I chlorophyll a /b binding
  misc_feature (1)..(262): Homolog of NCBI NO: 18266039 NR Description: chlorophyll a/b binding protein [Brassica
  misc_feature (1)..(262): Homolog of NCBI NO: 21592428 NR Description: putative photosystem II type I chlorophyll a b
  misc_feature (14)..(262): Homolog of NCBI NO: 12324161 NR Description: chlorophyll A-B-binding protein 2 precursor, 5'
  misc_feature (1)..(262): Homolog of NCBI NO: 115819 NR Description: Chlorophyll A-B binding protein 1B, chloroplast
  misc_feature (1)..(262): Homolog of NCBI NO: 15220615 NR Description: light-harvesting chlorophyll a/b binding protein
  misc_feature (1)..(262): Homolog of NCBI NO: 18397286 NR Description: photosystem II type I chlorophyll a /b binding
  misc_feature (1)..(262): Homolog of NCBI NO: 17473828 NR Description: chlorophyll a/b-binding protein [Arabidopsis
  misc_feature (1)..(262): Homolog of NCBI NO: 18403546 NR Description: photosystem II type I chlorophyll a /b binding
  misc_feature (1)..(262): Homolog of NCBI NO: 115778 NR Description: Chlorophyll A-B binding protein 1, chloroplast
  misc_feature (1)..(262): Homolog of NCBI NO: 15220615 NR Description: light-harvesting chlorophyll a/b binding protein
  misc_feature (1)..(262): Homolog of NCBI NO: 18397286 NR Description: photosystem II type I chlorophyll a /b binding
  misc_feature (1)..(262): Homolog of NCBI NO: 17473828 NR Description: chlorophyll a/b-binding protein [Arabidopsis
  misc_feature (1)..(262): Homolog of NCBI NO: 18403546 NR Description: photosystem II type I chlorophyll a /b binding
  misc_feature (1)..(262): Homolog of NCBI NO: 115778 NR Description: Chlorophyll A-B binding protein 1, chloroplast
  misc_feature (1)..(262): Homolog of NCBI NO: 18403549 NR Description: photosystem II type I chlorophyll a /b binding
  misc_feature (1)..(262): Homolog of NCBI NO: 18266039 NR Description: chlorophyll a/b binding protein [Brassica
  misc_feature (14)..(262): Homolog of NCBI NO: 12324161 NR Description: chlorophyll A-B-binding protein 2 precursor, 5'
  misc_feature (1)..(262): Homolog of NCBI NO: 115778 NR Description: Chlorophyll A-B binding protein 1, chloroplast
  misc_feature (1)..(262): Homolog of NCBI NO: 18403546 NR Description: photosystem II type I chlorophyll a /b binding
  misc_feature (1)..(262): Homolog of NCBI NO: 17473828 NR Description: chlorophyll a/b-binding protein [Arabidopsis
  misc_feature (1)..(262): Homolog of NCBI NO: 18397286 NR Description: photosystem II type I chlorophyll a /b binding
  misc_feature (1)..(262): Homolog of NCBI NO: 15220615 NR Description: light-harvesting chlorophyll a/b binding protein

SEQ ID NO: 32699 - protein, 233 aa, Arabidopsis thaliana; identical to SEQ ID NO: 21214
  peptide (1)..(233): Ceres Seq. ID no. 13509223
  misc_feature (31)..(200): Pfam Name: Chlorophyll A-B binding protein Pfam Description: Chlorophyll A-B binding protein
  misc_feature (31)..(200): Pfam Name: Chlorophyll A-B binding protein Pfam Description: Chlorophyll A-B binding protein
  misc_feature (31)..(200): Pfam Name: Chlorophyll A-B binding protein Pfam Description: Chlorophyll A-B binding protein
  misc_feature (1)..(233): Homolog of NCBI NO: 115819 NR Description: Chlorophyll A-B binding protein 1B, chloroplast
  misc_feature (1)..(233): Homolog of NCBI NO: 12324161 NR Description: chlorophyll A-B-binding protein 2 precursor, 5'
  misc_feature (1)..(233): Homolog of NCBI NO: 21592428 NR Description: putative photosystem II type I chlorophyll a b
  misc_feature (1)..(233): Homolog of NCBI NO: 18266039 NR Description: chlorophyll a/b binding protein [Brassica
  misc_feature (1)..(233): Homolog of NCBI NO: 18403549 NR Description: photosystem II type I chlorophyll a /b binding
  misc_feature (1)..(233): Homolog of NCBI NO: 115819 NR Description: Chlorophyll A-B binding protein 1B, chloroplast
  misc_feature (1)..(233): Homolog of NCBI NO: 21592428 NR Description: putative photosystem II type I chlorophyll a b
  misc_feature (1)..(233): Homolog of NCBI NO: 18403549 NR Description: photosystem II type I chlorophyll a /b binding
  misc_feature (1)..(233): Homolog of NCBI NO: 18266039 NR Description: chlorophyll a/b binding protein [Brassica
  misc_feature (1)..(233): Homolog of NCBI NO: 21592428 NR Description: putative photosystem II type I chlorophyll a b
  misc_feature (1)..(233): Homolog of NCBI NO: 12324161 NR Description: chlorophyll A-B-binding protein 2 precursor, 5'
  misc_feature (1)..(233): Homolog of NCBI NO: 115819 NR Description: Chlorophyll A-B binding protein 1B, chloroplast
  misc_feature (1)..(233): Homolog of NCBI NO: 15220615 NR Description: light-harvesting chlorophyll a/b binding protein
  misc_feature (1)..(233): Homolog of NCBI NO: 18397286 NR Description: photosystem II type I chlorophyll a /b binding
  misc_feature (1)..(233): Homolog of NCBI NO: 17473828 NR Description: chlorophyll a/b-binding protein [Arabidopsis
  misc_feature (1)..(233): Homolog of NCBI NO: 18403546 NR Description: photosystem II type I chlorophyll a /b binding
  misc_feature (1)..(233): Homolog of NCBI NO: 115778 NR Description: Chlorophyll A-B binding protein 1, chloroplast
  misc_feature (1)..(233): Homolog of NCBI NO: 15220615 NR Description: light-harvesting chlorophyll a/b binding protein
  misc_feature (1)..(233): Homolog of NCBI NO: 18397286 NR Description: photosystem II type I chlorophyll a /b binding
  misc_feature (1)..(233): Homolog of NCBI NO: 17473828 NR Description: chlorophyll a/b-binding protein [Arabidopsis
  misc_feature (1)..(233): Homolog of NCBI NO: 18403546 NR Description: photosystem II type I chlorophyll a /b binding
  misc_feature (1)..(233): Homolog of NCBI NO: 115778 NR Description: Chlorophyll A-B binding protein 1, chloroplast
  misc_feature (1)..(233): Homolog of NCBI NO: 18403549 NR Description: photosystem II type I chlorophyll a /b binding
  misc_feature (1)..(233): Homolog of NCBI NO: 18266039 NR Description: chlorophyll a/b binding protein [Brassica
  misc_feature (1)..(233): Homolog of NCBI NO: 12324161 NR Description: chlorophyll A-B-binding protein 2 precursor, 5'
  misc_feature (1)..(233): Homolog of NCBI NO: 115778 NR Description: Chlorophyll A-B binding protein 1, chloroplast
  misc_feature (1)..(233): Homolog of NCBI NO: 18403546 NR Description: photosystem II type I chlorophyll a /b binding
  misc_feature (1)..(233): Homolog of NCBI NO: 17473828 NR Description: chlorophyll a/b-binding protein [Arabidopsis
  misc_feature (1)..(233): Homolog of NCBI NO: 18397286 NR Description: photosystem II type I chlorophyll a /b binding
  misc_feature (1)..(233): Homolog of NCBI NO: 15220615 NR Description: light-harvesting chlorophyll a/b binding protein

SEQ ID NO: 32700 - DNA, 745 bp, Arabidopsis thaliana; identical to SEQ ID NO: 29110
  misc_feature (1)..(745): Ceres Seq. ID no. 13496771
  misc_feature: MA Experiment ID: 108434 Result: Down-regulated in Transcription
  misc_feature: MA Experiment 108434 PARAMETER Experiment Name: At_Root_Tips_cDNA_P Parameter: Tissue Value: Root Tips
  misc_feature: MA Experiment ID: 108462 Result: Up-regulated in Transcription
  misc_feature: MA Experiment 108462 PARAMETER Experiment Name: At_Germinating_Seeds_cDNA_P Parameter: Age (day) Value: 2 vs. 0
  misc_feature: MA Experiment 108462 PARAMETER Experiment Name: At_Germinating_Seeds_cDNA_P Parameter: Tissue Value: Germinating Seeds
  misc_feature: MA Experiment ID: 108577 Result: Down-regulated in Transcription
  misc_feature: MA Experiment 108577 PARAMETER Experiment Name: At_42deg_Heat_cDNA_P Parameter: Temperature (deg C) Value: 42 vs. 22
  misc_feature: MA Experiment 108577 PARAMETER Experiment Name: At_42deg_Heat_cDNA_P Parameter: Timepoint (hr) Value: 6
  misc_feature: MA Experiment 108577 PARAMETER Experiment Name: At_42deg_Heat_cDNA_P Parameter: Tissue Value: Aerial
  misc_feature: MA Experiment ID: 108579 Result: Down-regulated in Transcription
  misc_feature: MA Experiment 108579 PARAMETER Experiment Name: At_4deg_Cold_cDNA_P Parameter: Temperature (deg C) Value: 4 vs. 22
  misc_feature: MA Experiment 108579 PARAMETER Experiment Name: At_4deg_Cold_cDNA_P Parameter: Timepoint (hr) Value: 6
  misc_feature: MA Experiment 108579 PARAMETER Experiment Name: At_4deg_Cold_cDNA_P Parameter: Tissue Value: Aerial
  misc_feature: MA Experiment ID: 108668 Result: Up-regulated in Transcription
  misc_feature: MA Experiment 108668 PARAMETER Experiment Name: At_2mM_SA_cDNA_P Parameter: Plant Line Value: WS
  misc_feature: MA Experiment 108668 PARAMETER Experiment Name: At_2mM_SA_cDNA_P Parameter: Timepoint (hr) Value: 6
  misc_feature: MA Experiment 108668 PARAMETER Experiment Name: At_2mM_SA_cDNA_P Parameter: Treatment Value: 2mM SA vs. No Treatment
  misc_feature: MA Experiment ID: 20000069 Result: Up-regulated in Transcription
  misc_feature: MA Experiment 20000069 PARAMETER Experiment Name: At_100uM_ABA_Mutants_cDNA_P Parameter: Plant Line Value: CS23
  misc_feature: MA Experiment 20000069 PARAMETER Experiment Name: At_100uM_ABA_Mutants_cDNA_P Parameter: Timepoint (hr) Value: 6
  misc_feature: MA Experiment 20000069 PARAMETER Experiment Name: At_100uM_ABA_Mutants_cDNA_P Parameter: Tissue Value: Aerial
  misc_feature: MA Experiment 20000069 PARAMETER Experiment Name: At_100uM_ABA_Mutants_cDNA_P Parameter: Treatment Value: 100uM ABA vs. No Treatment
  misc_feature: MA Experiment ID: 20000070 Result: Up-regulated in Transcription
  misc_feature: MA Experiment 20000070 PARAMETER Experiment Name: At_100uM_ABA_Mutants_cDNA_P Parameter: Plant Line Value: CS24
  misc_feature: MA Experiment 20000070 PARAMETER Experiment Name: At_100uM_ABA_Mutants_cDNA_P Parameter: Timepoint (hr) Value: 6
  misc_feature: MA Experiment 20000070 PARAMETER Experiment Name: At_100uM_ABA_Mutants_cDNA_P Parameter: Tissue Value: Aerial
  misc_feature: MA Experiment 20000070 PARAMETER Experiment Name: At_100uM_ABA_Mutants_cDNA_P Parameter: Treatment Value: 100uM ABA vs. No Treatment
  misc_feature: MA Experiment ID: 20000111 Result: Down-regulated in Transcription
  misc_feature: MA Experiment 20000111 PARAMETER Experiment Name: At_42deg_Heat_cDNA_P Parameter: Temperature (deg C) Value: 42 vs. 22
  misc_feature: MA Experiment 20000111 PARAMETER Experiment Name: At_42deg_Heat_cDNA_P Parameter: Timepoint (hr) Value: 6
  misc_feature: MA Experiment 20000111 PARAMETER Experiment Name: At_42deg_Heat_cDNA_P Parameter: Tissue Value: Aerial
  misc_feature: MA Experiment ID: 20000180 Result: Up-regulated in Transcription
  misc_feature: MA Experiment 20000180 PARAMETER Experiment Name: At_Germinating_Seeds_P Parameter: Age (hr) Value: 24 vs. 0
  misc_feature: MA Experiment 20000180 PARAMETER Experiment Name: At_Germinating_Seeds_P Parameter: Tissue Value: Germinating Seeds
  misc_feature: MA Experiment ID: 20000182 Result: Up-regulated in Transcription
  misc_feature: MA Experiment 20000182 PARAMETER Experiment Name: At_2mM_SA_P Parameter: Age (day) Value: 14
  misc_feature: MA Experiment 20000182 PARAMETER Experiment Name: At_2mM_SA_P Parameter: Organism Value: A. thaliana
  misc_feature: MA Experiment 20000182 PARAMETER Experiment Name: At_2mM_SA_P Parameter: Plant Line Value: WS
  misc_feature: MA Experiment 20000182 PARAMETER Experiment Name: At_2mM_SA_P Parameter: Timepoint (hr) Value: 6
  misc_feature: MA Experiment 20000182 PARAMETER Experiment Name: At_2mM_SA_P Parameter: Tissue Value: Aerial
  misc_feature: MA Experiment 20000182 PARAMETER Experiment Name: At_2mM_SA_P Parameter: Treatment Value: 2mM SA vs. No Treatment
  misc_feature: MA Experiment ID: 20000184 Result: Down-regulated in Transcription
  misc_feature: MA Experiment 20000184 PARAMETER Experiment Name: At_Shoots__P Parameter: Age (day) Value: 7
  misc_feature: MA Experiment 20000184 PARAMETER Experiment Name: At_Shoots__P Parameter: Tissue Value: Shoots vs. Whole Plant
  misc_feature: MA Experiment ID: 20000235 Result: Down-regulated in Transcription
  misc_feature: MA Experiment 20000235 PARAMETER Experiment Name: At_Siliques_P Parameter: Age (day) Value: 21
  misc_feature: MA Experiment 20000235 PARAMETER Experiment Name: At_Siliques_P Parameter: Organism Value: A. thaliana
  misc_feature: MA Experiment 20000235 PARAMETER Experiment Name: At_Siliques_P Parameter: Plant Line Value: WS
  misc_feature: MA Experiment 20000235 PARAMETER Experiment Name: At_Siliques_P Parameter: Tissue Value: 5-10mm Siliques vs. Whole Plant
  misc_feature: MA Experiment ID: 20000265 Result: Down-regulated in Transcription
  misc_feature: MA Experiment 20000265 PARAMETER Experiment Name: At_Open_Flower_P Parameter: Age (day) Value: 21
  misc_feature: MA Experiment 20000265 PARAMETER Experiment Name: At_Open_Flower_P Parameter: Plant Line Value: WS
  misc_feature: MA Experiment 20000265 PARAMETER Experiment Name: At_Open_Flower_P Parameter: Tissue Value: Closed Flower vs. Whole Plant
  misc_feature: Phenotype: INFLORESCENCE Flowering Time-Late Flowering
  misc_feature: Phenotype: INFLORESCENCE Flowering Time-Late Flowering
  misc_feature: Phenotype: SILIQUES Other
  misc_feature: Phenotype: FERTILITY Fertility-Reduced
  misc_feature: Phenotype: WHOLE PLANT Size-Small
  misc_feature: Phenotype: WHOLE PLANT Size-Small
  misc_feature: Phenotype: INFLORESCENCE Flowering Time-Late Flowering
  misc_feature: Phenotype: INFLORESCENCE Flowering Time-Late Flowering
  misc_feature: Phenotype: WHOLE PLANT Size-Small
  misc_feature: Phenotype: WHOLE PLANT Size-Small
  misc_feature: Phenotype: INFLORESCENCE Flowering Time-Late Flowering
  misc_feature: Phenotype: INFLORESCENCE Flowering Time-Late Flowering

SEQ ID NO: 32701 - protein, 191 aa, Arabidopsis thaliana; identical to SEQ ID NO: 29111
  peptide (1)..(191): Ceres Seq. ID no. 13496772
  misc_feature (31)..(140): Pfam Name: Glutathione peroxidase Pfam Description: Glutathione peroxidase
  misc_feature (22)..(187): Homolog of NCBI NO: 20138151 NR Description: Probable phospholipid hydroperoxide glutathione
  misc_feature (19)..(187): Homolog of NCBI NO: 34334012 NR Description: cytosolic glutathione peroxidase [Triticum
  misc_feature (19)..(187): Homolog of NCBI NO: 6179604 NR Description: glutathione peroxidase-like protein GPX54Hv
  misc_feature (19)..(187): Homolog of NCBI NO: 22268405 NR Description: putative glutathione peroxidase [Zea mays]
  misc_feature (21)..(188): Homolog of NCBI NO: 6179600 NR Description: GPX12Hv, glutathione peroxidase-like protein
  misc_feature (21)..(188): Homolog of NCBI NO: 27544804 NR Description: phospholipid hydroperoxide glutathione
  misc_feature (19)..(187): Homolog of NCBI NO: 11544696 NR Description: putative phospholipid hydroperoxide glutathione
  misc_feature (19)..(183): Homolog of NCBI NO: 25285637 NR Description: probable glutathione peroxidase [imported] -
  misc_feature (19)..(187): Homolog of NCBI NO: 18407538 NR Description: glutathione peroxidase, putative [Arabidopsis
  misc_feature (19)..(191): Homolog of NCBI NO: 15229378 NR Description: glutathione peroxidase, putative [Arabidopsis

SEQ ID NO: 32702 - protein, 173 aa, Arabidopsis thaliana; identical to SEQ ID NO: 29112
  peptide (1)..(173): Ceres Seq. ID no. 13496773
  misc_feature (13)..(122): Pfam Name: Glutathione peroxidase Pfam Description: Glutathione peroxidase
  misc_feature (4)..(169): Homolog of NCBI NO: 20138151 NR Description: Probable phospholipid hydroperoxide glutathione
  misc_feature (1)..(169): Homolog of NCBI NO: 34334012 NR Description: cytosolic glutathione peroxidase [Triticum
  misc_feature (1)..(169): Homolog of NCBI NO: 6179604 NR Description: glutathione peroxidase-like protein GPX54Hv
  misc_feature (1)..(169): Homolog of NCBI NO: 22268405 NR Description: putative glutathione peroxidase [Zea mays]
  misc_feature (3)..(170): Homolog of NCBI NO: 6179600 NR Description: GPX12Hv, glutathione peroxidase-like protein
  misc_feature (3)..(170): Homolog of NCBI NO: 27544804 NR Description: phospholipid hydroperoxide glutathione
  misc_feature (1)..(169): Homolog of NCBI NO: 11544696 NR Description: putative phospholipid hydroperoxide glutathione
  misc_feature (1)..(165): Homolog of NCBI NO: 25285637 NR Description: probable glutathione peroxidase [imported] -
  misc_feature (1)..(169): Homolog of NCBI NO: 18407538 NR Description: glutathione peroxidase, putative [Arabidopsis
  misc_feature (1)..(173): Homolog of NCBI NO: 15229378 NR Description: glutathione peroxidase, putative [Arabidopsis

SEQ ID NO: 32703 - protein, 118 aa, Arabidopsis thaliana; identical to SEQ ID NO: 29113
  peptide (1)..(118): Ceres Seq. ID no. 13496774

SEQ ID NO: 32704 - DNA, 648 bp, Arabidopsis thaliana; identical to SEQ ID NO: 29114
  misc_feature (1)..(648): Ceres Seq. ID no. 12738718
  misc_feature: MA Experiment ID: 108434 Result: Down-regulated in Transcription
  misc_feature: MA Experiment 108434 PARAMETER Experiment Name: At_Root_Tips_cDNA_P Parameter: Tissue Value: Root Tips
  misc_feature: MA Experiment ID: 20001557 Result: Down-regulated in Transcription
  misc_feature: MA Experiment 20001557 PARAMETER Experiment Name: At_Drought_Soil_Dry_P Parameter: Age (day) Value: 27
  misc_feature: MA Experiment 20001557 PARAMETER Experiment Name: At_Drought_Soil_Dry_P Parameter: Organism Value: A. thaliana
  misc_feature: MA Experiment 20001557 PARAMETER Experiment Name: At_Drought_Soil_Dry_P Parameter: Plant Line Value: WS
  misc_feature: MA Experiment 20001557 PARAMETER Experiment Name: At_Drought_Soil_Dry_P Parameter: Post Timepoint (hr) Value: 3
  misc_feature: MA Experiment 20001557 PARAMETER Experiment Name: At_Drought_Soil_Dry_P Parameter: Post-Treatment Value: Re-Water vs. No Drought
  misc_feature: MA Experiment 20001557 PARAMETER Experiment Name: At_Drought_Soil_Dry_P Parameter: Timepoint (day) Value: 13
  misc_feature: MA Experiment 20001557 PARAMETER Experiment Name: At_Drought_Soil_Dry_P Parameter: Treatment Value: Drought vs. No Drought
  misc_feature: MA Experiment ID: 20001558 Result: Down-regulated in Transcription
  misc_feature: MA Experiment 20001558 PARAMETER Experiment Name: At_Drought_Soil_Dry_P Parameter: Age (day) Value: 27
  misc_feature: MA Experiment 20001558 PARAMETER Experiment Name: At_Drought_Soil_Dry_P Parameter: Organism Value: A. thaliana
  misc_feature: MA Experiment 20001558 PARAMETER Experiment Name: At_Drought_Soil_Dry_P Parameter: Plant Line Value: WS
  misc_feature: MA Experiment 20001558 PARAMETER Experiment Name: At_Drought_Soil_Dry_P Parameter: Post Timepoint (hr) Value: 6
  misc_feature: MA Experiment 20001558 PARAMETER Experiment Name: At_Drought_Soil_Dry_P Parameter: Post-Treatment Value: Re-Water vs. No Drought
  misc_feature: MA Experiment 20001558 PARAMETER Experiment Name: At_Drought_Soil_Dry_P Parameter: Timepoint (day) Value: 13
  misc_feature: MA Experiment 20001558 PARAMETER Experiment Name: At_Drought_Soil_Dry_P Parameter: Treatment Value: Drought vs. No Drought
  misc_feature: MA Experiment ID: 20001560 Result: Down-regulated in Transcription
  misc_feature: MA Experiment 20001560 PARAMETER Experiment Name: At_Drought_Soil_Dry_P Parameter: Age (day) Value: 28
  misc_feature: MA Experiment 20001560 PARAMETER Experiment Name: At_Drought_Soil_Dry_P Parameter: Organism Value: A. thaliana
  misc_feature: MA Experiment 20001560 PARAMETER Experiment Name: At_Drought_Soil_Dry_P Parameter: Plant Line Value: WS
  misc_feature: MA Experiment 20001560 PARAMETER Experiment Name: At_Drought_Soil_Dry_P Parameter: Post Timepoint (hr) Value: None
  misc_feature: MA Experiment 20001560 PARAMETER Experiment Name: At_Drought_Soil_Dry_P Parameter: Post-Treatment Value: None
  misc_feature: MA Experiment 20001560 PARAMETER Experiment Name: At_Drought_Soil_Dry_P Parameter: Timepoint (day) Value: 14
  misc_feature: MA Experiment 20001560 PARAMETER Experiment Name: At_Drought_Soil_Dry_P Parameter: Treatment Value: Drought vs. No Drought
  misc_feature: MA Experiment ID: 20001911 Result: Up-regulated in Transcription
  misc_feature: MA Experiment 20001911 PARAMETER Experiment Name: At_Drought_Reproduction_P Parameter: Age (day) Value: 40
  misc_feature: MA Experiment 20001911 PARAMETER Experiment Name: At_Drought_Reproduction_P Parameter: Organism Value: A. thaliana
  misc_feature: MA Experiment 20001911 PARAMETER Experiment Name: At_Drought_Reproduction_P Parameter: Plant Line Value: WS
  misc_feature: MA Experiment 20001911 PARAMETER Experiment Name: At_Drought_Reproduction_P Parameter: Timepoint (day) Value: 10
  misc_feature: MA Experiment 20001911 PARAMETER Experiment Name: At_Drought_Reproduction_P Parameter: Tissue Value: Flowers
  misc_feature: MA Experiment 20001911 PARAMETER Experiment Name: At_Drought_Reproduction_P Parameter: Treatment Value: Drought vs. No Drought

SEQ ID NO: 32705 - protein, 118 aa, Arabidopsis thaliana; identical to SEQ ID NO: 29115
  peptide (1)..(118): Ceres Seq. ID no. 12738719
  misc_feature (1)..(111): Homolog of NCBI NO: 15230385 NR Description: thioredoxin h; protein id: At3g51030.1, supported
  misc_feature (3)..(111): Homolog of NCBI NO: 12082335 NR Description: thioredoxin h [Oryza sativa (japonica
  misc_feature (1)..(29): Homolog of NCBI NO: 25405885 NR Description: protein F27F5.21 [imported] - Arabidopsis
  misc_feature (29)..(111): Homolog of NCBI NO: 25405885 NR Description: protein F27F5.21 [imported] - Arabidopsis
  misc_feature (5)..(117): Homolog of NCBI NO: 11135129 NR Description: Thioredoxin H-type (TRX-H)
  misc_feature (5)..(117): Homolog of NCBI NO: 11494247 NR Description: thioredoxin-h-like protein 1 [Brassica oleracea
  misc_feature (5)..(117): Homolog of NCBI NO: 11135277 NR Description: Thioredoxin H-type 1 (TRX-H-1) (Pollen coat
  misc_feature (1)..(118): Homolog of NCBI NO: 15219537 NR Description: thioredoxin, putative
  misc_feature (1)..(118): Homolog of NCBI NO: 1388084 NR Description: thioredoxin h
  misc_feature (1)..(118): Homolog of NCBI NO: 15239136 NR Description: thioredoxin (clone GIF1) (pir||S58118)

SEQ ID NO: 32706 - DNA, 888 bp, Arabidopsis thaliana; identical to SEQ ID NO: 29116
  misc_feature (1)..(888): Ceres Seq. ID no. 13646051
  misc_feature: MA Experiment ID: 108461 Result: Up-regulated in Transcription
  misc_feature: MA Experiment 108461 PARAMETER Experiment Name: At_Germinating_Seeds_cDNA_P Parameter: Age (day) Value: 1 vs. 0
  misc_feature: MA Experiment 108461 PARAMETER Experiment Name: At_Germinating_Seeds_cDNA_P Parameter: Tissue Value: Germinating Seeds
  misc_feature: MA Experiment ID: 108462 Result: Up-regulated in Transcription
  misc_feature: MA Experiment 108462 PARAMETER Experiment Name: At_Germinating_Seeds_cDNA_P Parameter: Age (day) Value: 2 vs. 0
  misc_feature: MA Experiment 108462 PARAMETER Experiment Name: At_Germinating_Seeds_cDNA_P Parameter: Tissue Value: Germinating Seeds
  misc_feature: MA Experiment ID: 108488 Result: Up-regulated in Transcription
  misc_feature: MA Experiment ID: 108595 Result: Down-regulated in Transcription
  misc_feature: MA Experiment 108595 PARAMETER Experiment Name: At_Ler-pi_Ovule_cDNA_P Parameter: Plant Line Value: null
  misc_feature: MA Experiment ID: 20000070 Result: Down-regulated in Transcription
  misc_feature: MA Experiment 20000070 PARAMETER Experiment Name: At_100uM_ABA_Mutants_cDNA_P Parameter: Plant Line Value: CS24
  misc_feature: MA Experiment 20000070 PARAMETER Experiment Name: At_100uM_ABA_Mutants_cDNA_P Parameter: Timepoint (hr) Value: 6
  misc_feature: MA Experiment 20000070 PARAMETER Experiment Name: At_100uM_ABA_Mutants_cDNA_P Parameter: Tissue Value: Aerial
  misc_feature: MA Experiment 20000070 PARAMETER Experiment Name: At_100uM_ABA_Mutants_cDNA_P Parameter: Treatment Value: 100uM ABA vs. No Treatment
  misc_feature: MA Experiment ID: 20000071 Result: Down-regulated in Transcription
  misc_feature: MA Experiment 20000071 PARAMETER Experiment Name: At_100uM_ABA_Mutants_cDNA_P Parameter: Plant Line Value: CS8104
  misc_feature: MA Experiment 20000071 PARAMETER Experiment Name: At_100uM_ABA_Mutants_cDNA_P Parameter: Timepoint (hr) Value: 6
  misc_feature: MA Experiment 20000071 PARAMETER Experiment Name: At_100uM_ABA_Mutants_cDNA_P Parameter: Tissue Value: Aerial
  misc_feature: MA Experiment 20000071 PARAMETER Experiment Name: At_100uM_ABA_Mutants_cDNA_P Parameter: Treatment Value: 100uM ABA vs. No Treatment
  misc_feature: MA Experiment ID: 20000072 Result: Down-regulated in Transcription
  misc_feature: MA Experiment 20000072 PARAMETER Experiment Name: At_100uM_ABA_Mutants_cDNA_P Parameter: Plant Line Value: CS8105
  misc_feature: MA Experiment 20000072 PARAMETER Experiment Name: At_100uM_ABA_Mutants_cDNA_P Parameter: Timepoint (hr) Value: 6
  misc_feature: MA Experiment 20000072 PARAMETER Experiment Name: At_100uM_ABA_Mutants_cDNA_P Parameter: Tissue Value: Aerial
  misc_feature: MA Experiment 20000072 PARAMETER Experiment Name: At_100uM_ABA_Mutants_cDNA_P Parameter: Treatment Value: 100uM ABA vs. No Treatment
  misc_feature: MA Experiment ID: 20000086 Result: Down-regulated in Transcription
  misc_feature: MA Experiment 20000086 PARAMETER Experiment Name: At_100uM_ABA_Mutants_cDNA_P Parameter: Plant Line Value: CS22
  misc_feature: MA Experiment 20000086 PARAMETER Experiment Name: At_100uM_ABA_Mutants_cDNA_P Parameter: Timepoint (hr) Value: 6
  misc_feature: MA Experiment 20000086 PARAMETER Experiment Name: At_100uM_ABA_Mutants_cDNA_P Parameter: Tissue Value: Aerial
  misc_feature: MA Experiment 20000086 PARAMETER Experiment Name: At_100uM_ABA_Mutants_cDNA_P Parameter: Treatment Value: 100uM ABA vs. No Treatment
  misc_feature: MA Experiment ID: 20000117 Result: Down-regulated in Transcription
  misc_feature: MA Experiment 20000117 PARAMETER Experiment Name: At_100uM_ABA_Mutants_cDNA_P Parameter: Plant Line Value: Columbia
  misc_feature: MA Experiment 20000117 PARAMETER Experiment Name: At_100uM_ABA_Mutants_cDNA_P Parameter: Timepoint (hr) Value: 6
  misc_feature: MA Experiment 20000117 PARAMETER Experiment Name: At_100uM_ABA_Mutants_cDNA_P Parameter: Tissue Value: Aerial
  misc_feature: MA Experiment 20000117 PARAMETER Experiment Name: At_100uM_ABA_Mutants_cDNA_P Parameter: Treatment Value: 100uM ABA vs. No Treatment
  misc_feature: MA Experiment ID: 20000180 Result: Up-regulated in Transcription
  misc_feature: MA Experiment 20000180 PARAMETER Experiment Name: At_Germinating_Seeds_P Parameter: Age (hr) Value: 24 vs. 0
  misc_feature: MA Experiment 20000180 PARAMETER Experiment Name: At_Germinating_Seeds_P Parameter: Tissue Value: Germinating Seeds
  misc_feature: MA Experiment ID: 20000185 Result: Down-regulated in Transcription
  misc_feature: MA Experiment 20000185 PARAMETER Experiment Name: At_Roots__P Parameter: Age (day) Value: 7 vs. 21
  misc_feature: MA Experiment 20000185 PARAMETER Experiment Name: At_Roots__P Parameter: Organism Value: A. thaliana
  misc_feature: MA Experiment 20000185 PARAMETER Experiment Name: At_Roots__P Parameter: Tissue Value: Roots vs. Whole Plant
  misc_feature: MA Experiment ID: 20000437 Result: Down-regulated in Transcription
  misc_feature: MA Experiment 20000437 PARAMETER Experiment Name: At_Drought_P Parameter: Age (day) Value: 8
  misc_feature: MA Experiment 20000437 PARAMETER Experiment Name: At_Drought_P Parameter: Organism Value: A. thaliana
  misc_feature: MA Experiment 20000437 PARAMETER Experiment Name: At_Drought_P Parameter: Plant Line Value: WS
  misc_feature: MA Experiment 20000437 PARAMETER Experiment Name: At_Drought_P Parameter: Timepoint (hr) Value: 24
  misc_feature: MA Experiment 20000437 PARAMETER Experiment Name: At_Drought_P Parameter: Tissue Value: Whole Plant
  misc_feature: MA Experiment 20000437 PARAMETER Experiment Name: At_Drought_P Parameter: Treatment Value: Drought vs. No Drought
  misc_feature: MA Experiment ID: 20000438 Result: Up-regulated in Transcription
  misc_feature: MA Experiment 20000438 PARAMETER Experiment Name: At_Shoots__P Parameter: Age (day) Value: 14
  misc_feature: MA Experiment 20000438 PARAMETER Experiment Name: At_Shoots__P Parameter: Tissue Value: Shoots vs. Whole Plant
  misc_feature: MA Experiment ID: 20000439 Result: Down-regulated in Transcription
  misc_feature: MA Experiment 20000439 PARAMETER Experiment Name: At_Roots__P Parameter: Age (day) Value: 14 vs. 21
  misc_feature: MA Experiment 20000439 PARAMETER Experiment Name: At_Roots__P Parameter: Organism Value: A. thaliana
  misc_feature: MA Experiment 20000439 PARAMETER Experiment Name: At_Roots__P Parameter: Tissue Value: Roots vs. Whole Plant
  misc_feature: MA Experiment ID: 20001248 Result: Down-regulated in Transcription
  misc_feature: MA Experiment 20001248 PARAMETER Experiment Name: At_Far-red-induction_P Parameter: Age (day) Value: 7
  misc_feature: MA Experiment 20001248 PARAMETER Experiment Name: At_Far-red-induction_P Parameter: Light Value: Far-red vs. White
  misc_feature: MA Experiment 20001248 PARAMETER Experiment Name: At_Far-red-induction_P Parameter: Organism Value: A. thaliana
  misc_feature: MA Experiment 20001248 PARAMETER Experiment Name: At_Far-red-induction_P Parameter: Plant Line Value: Columbia
  misc_feature: MA Experiment 20001248 PARAMETER Experiment Name: At_Far-red-induction_P Parameter: Timepoint (hr) Value: 4
  misc_feature: MA Experiment 20001248 PARAMETER Experiment Name: At_Far-red-induction_P Parameter: Tissue Value: Whole Plant
  misc_feature: MA Experiment ID: 20001450 Result: Down-regulated in Transcription
  misc_feature: MA Experiment 20001450 PARAMETER Experiment Name: At_Far-red-induction_P Parameter: Age (day) Value: 7
  misc_feature: MA Experiment 20001450 PARAMETER Experiment Name: At_Far-red-induction_P Parameter: Light Value: Far-red vs. White
  misc_feature: MA Experiment 20001450 PARAMETER Experiment Name: At_Far-red-induction_P Parameter: Organism Value: A. thaliana
  misc_feature: MA Experiment 20001450 PARAMETER Experiment Name: At_Far-red-induction_P Parameter: Plant Line Value: Columbia
  misc_feature: MA Experiment 20001450 PARAMETER Experiment Name: At_Far-red-induction_P Parameter: Timepoint (hr) Value: 8
  misc_feature: MA Experiment 20001450 PARAMETER Experiment Name: At_Far-red-induction_P Parameter: Tissue Value: Whole Plant
  misc_feature: MA Experiment ID: 20001757 Result: Up-regulated in Transcription
  misc_feature: MA Experiment 20001757 PARAMETER Experiment Name: At_50mM_NH4NO3_L-to-H_P Parameter: Timepoint (hr) Value: 6
  misc_feature: MA Experiment 20001757 PARAMETER Experiment Name: At_50mM_NH4NO3_L-to-H_P Parameter: Tissue Value: Leaf
  misc_feature: MA Experiment 20001757 PARAMETER Experiment Name: At_50mM_NH4NO3_L-to-H_P Parameter: Treatment Value: 50mM NH4NO3 vs 100mM Mannitol
  misc_feature: MA Experiment ID: 20001905 Result: Down-regulated in Transcription
  misc_feature: MA Experiment 20001905 PARAMETER Experiment Name: At_Drought_Reproduction_P Parameter: Age (day) Value: 40
  misc_feature: MA Experiment 20001905 PARAMETER Experiment Name: At_Drought_Reproduction_P Parameter: Organism Value: A. thaliana
  misc_feature: MA Experiment 20001905 PARAMETER Experiment Name: At_Drought_Reproduction_P Parameter: Plant Line Value: WS
  misc_feature: MA Experiment 20001905 PARAMETER Experiment Name: At_Drought_Reproduction_P Parameter: Timepoint (day) Value: 10
  misc_feature: MA Experiment 20001905 PARAMETER Experiment Name: At_Drought_Reproduction_P Parameter: Tissue Value: Rosettes
  misc_feature: MA Experiment 20001905 PARAMETER Experiment Name: At_Drought_Reproduction_P Parameter: Treatment Value: Drought vs. No Drought

SEQ ID NO: 32707 - protein, 214 aa, Arabidopsis thaliana; identical to SEQ ID NO: 29117
  peptide (1)..(214): Ceres Seq. ID no. 13646052
  misc_feature (146)..(214): Pfam Name: Ribosomal protein L7/L12 C-terminal domain Pfam Description: Ribosomal protein L7/L12 C-terminal domain
  misc_feature (146)..(214): Pfam Name: Ribosomal protein L7/L12 C-terminal domain Pfam Description: Ribosomal protein L7/L12 C-terminal domain
  misc_feature (24)..(213): Homolog of NCBI NO: 133085 NR Description: 50S RIBOSOMAL PROTEIN L12, CHLOROPLAST PRECURSOR
  misc_feature (24)..(214): Homolog of NCBI NO: 548746 NR Description: 50S RIBOSOMAL PROTEIN L12, CHLOROPLAST PRECURSOR
  misc_feature (24)..(214): Homolog of NCBI NO: 133088 NR Description: 50S RIBOSOMAL PROTEIN L12, CHLOROPLAST PRECURSOR
  misc_feature (24)..(214): Homolog of NCBI NO: 20020 NR Description: ribosomal protein L12-1a [Nicotiana tabacum]
  misc_feature (24)..(213): Homolog of NCBI NO: 541896 NR Description: ribosomal protein L12.B precursor, chloroplast -
  misc_feature (24)..(213): Homolog of NCBI NO: 133085 NR Description: 50S RIBOSOMAL PROTEIN L12, CHLOROPLAST PRECURSOR
  misc_feature (24)..(214): Homolog of NCBI NO: 133088 NR Description: 50S RIBOSOMAL PROTEIN L12, CHLOROPLAST PRECURSOR
  misc_feature (24)..(213): Homolog of NCBI NO: 541896 NR Description: ribosomal protein L12.B precursor, chloroplast -
  misc_feature (24)..(214): Homolog of NCBI NO: 15232274 NR Description: 50S ribosomal protein L12-1, chloroplast
  misc_feature (24)..(214): Homolog of NCBI NO: 541897 NR Description: ribosomal protein L12.C precursor, chloroplast -
  misc_feature (24)..(214): Homolog of NCBI NO: 15232276 NR Description: 50S ribosomal protein L12-3, chloroplast
  misc_feature (24)..(214): Homolog of NCBI NO: 21592776 NR Description: 50S ribosomal protein L12-C [Arabidopsis thaliana]
  misc_feature (24)..(213): Homolog of NCBI NO: 15232275 NR Description: 50S ribosomal protein L12-2, chloroplast
  misc_feature (24)..(214): Homolog of NCBI NO: 20020 NR Description: ribosomal protein L12-1a [Nicotiana tabacum]
  misc_feature (24)..(214): Homolog of NCBI NO: 548746 NR Description: 50S RIBOSOMAL PROTEIN L12, CHLOROPLAST PRECURSOR
  misc_feature (24)..(213): Homolog of NCBI NO: 15232275 NR Description: 50S ribosomal protein L12-2, chloroplast
  misc_feature (24)..(214): Homolog of NCBI NO: 21592776 NR Description: 50S ribosomal protein L12-C [Arabidopsis thaliana]
  misc_feature (24)..(214): Homolog of NCBI NO: 15232276 NR Description: 50S ribosomal protein L12-3, chloroplast
  misc_feature (24)..(214): Homolog of NCBI NO: 541897 NR Description: ribosomal protein L12.C precursor, chloroplast -
  misc_feature (24)..(214): Homolog of NCBI NO: 15232274 NR Description: 50S ribosomal protein L12-1, chloroplast

SEQ ID NO: 32708 - protein, 191 aa, Arabidopsis thaliana; identical to SEQ ID NO: 21067
  peptide (1)..(191): Ceres Seq. ID no. 13646053
  misc_feature (123)..(191): Pfam Name: Ribosomal protein L7/L12 C-terminal domain Pfam Description: Ribosomal protein L7/L12 C-terminal domain
  misc_feature (123)..(191): Pfam Name: Ribosomal protein L7/L12 C-terminal domain Pfam Description: Ribosomal protein L7/L12 C-terminal domain
  misc_feature (1)..(190): Homolog of NCBI NO: 133085 NR Description: 50S RIBOSOMAL PROTEIN L12, CHLOROPLAST PRECURSOR
  misc_feature (1)..(191): Homolog of NCBI NO: 548746 NR Description: 50S RIBOSOMAL PROTEIN L12, CHLOROPLAST PRECURSOR
  misc_feature (1)..(191): Homolog of NCBI NO: 133088 NR Description: 50S RIBOSOMAL PROTEIN L12, CHLOROPLAST PRECURSOR
  misc_feature (1)..(191): Homolog of NCBI NO: 20020 NR Description: ribosomal protein L12-1a [Nicotiana tabacum]
  misc_feature (1)..(190): Homolog of NCBI NO: 541896 NR Description: ribosomal protein L12.B precursor, chloroplast -
  misc_feature (1)..(190): Homolog of NCBI NO: 133085 NR Description: 50S RIBOSOMAL PROTEIN L12, CHLOROPLAST PRECURSOR
  misc_feature (1)..(191): Homolog of NCBI NO: 133088 NR Description: 50S RIBOSOMAL PROTEIN L12, CHLOROPLAST PRECURSOR
  misc_feature (1)..(190): Homolog of NCBI NO: 541896 NR Description: ribosomal protein L12.B precursor, chloroplast -
  misc_feature (1)..(191): Homolog of NCBI NO: 15232274 NR Description: 50S ribosomal protein L12-1, chloroplast
  misc_feature (1)..(191): Homolog of NCBI NO: 541897 NR Description: ribosomal protein L12.C precursor, chloroplast -
  misc_feature (1)..(191): Homolog of NCBI NO: 15232276 NR Description: 50S ribosomal protein L12-3, chloroplast
  misc_feature (1)..(191): Homolog of NCBI NO: 21592776 NR Description: 50S ribosomal protein L12-C [Arabidopsis thaliana]
  misc_feature (1)..(190): Homolog of NCBI NO: 15232275 NR Description: 50S ribosomal protein L12-2, chloroplast
  misc_feature (1)..(191): Homolog of NCBI NO: 20020 NR Description: ribosomal protein L12-1a [Nicotiana tabacum]
  misc_feature (1)..(191): Homolog of NCBI NO: 548746 NR Description: 50S RIBOSOMAL PROTEIN L12, CHLOROPLAST PRECURSOR
  misc_feature (1)..(190): Homolog of NCBI NO: 15232275 NR Description: 50S ribosomal protein L12-2, chloroplast
  misc_feature (1)..(191): Homolog of NCBI NO: 21592776 NR Description: 50S ribosomal protein L12-C [Arabidopsis thaliana]
  misc_feature (1)..(191): Homolog of NCBI NO: 15232276 NR Description: 50S ribosomal protein L12-3, chloroplast
  misc_feature (1)..(191): Homolog of NCBI NO: 541897 NR Description: ribosomal protein L12.C precursor, chloroplast -
  misc_feature (1)..(191): Homolog of NCBI NO: 15232274 NR Description: 50S ribosomal protein L12-1, chloroplast

SEQ ID NO: 32709 - DNA, 1420 bp, Arabidopsis thaliana; identical to SEQ ID NO: 29119
  misc_feature (1)..(1420): Ceres Seq. ID no. 12602555
  misc_feature: MA Experiment ID: 108461 Result: Down-regulated in Transcription
  misc_feature: MA Experiment 108461 PARAMETER Experiment Name: At_Germinating_Seeds_cDNA_P Parameter: Age (day) Value: 1 vs. 0
  misc_feature: MA Experiment 108461 PARAMETER Experiment Name: At_Germinating_Seeds_cDNA_P Parameter: Tissue Value: Germinating Seeds
  misc_feature: MA Experiment ID: 108462 Result: Down-regulated in Transcription
  misc_feature: MA Experiment 108462 PARAMETER Experiment Name: At_Germinating_Seeds_cDNA_P Parameter: Age (day) Value: 2 vs. 0
  misc_feature: MA Experiment 108462 PARAMETER Experiment Name: At_Germinating_Seeds_cDNA_P Parameter: Tissue Value: Germinating Seeds
  misc_feature: MA Experiment ID: 108463 Result: Down-regulated in Transcription
  misc_feature: MA Experiment 108463 PARAMETER Experiment Name: At_Germinating_Seeds_cDNA_P Parameter: Age (day) Value: 3 vs. 0
  misc_feature: MA Experiment 108463 PARAMETER Experiment Name: At_Germinating_Seeds_cDNA_P Parameter: Tissue Value: Germinating Seeds
  misc_feature: MA Experiment ID: 108464 Result: Down-regulated in Transcription
  misc_feature: MA Experiment 108464 PARAMETER Experiment Name: At_Germinating_Seeds_cDNA_P Parameter: Age (day) Value: 4 vs. 0
  misc_feature: MA Experiment 108464 PARAMETER Experiment Name: At_Germinating_Seeds_cDNA_P Parameter: Tissue Value: Germinating Seeds
  misc_feature: MA Experiment ID: 20000113 Result: Up-regulated in Transcription
  misc_feature: MA Experiment 20000113 PARAMETER Experiment Name: At_42deg_Heat_cDNA_P Parameter: Temperature (deg C) Value: 42 vs. 22
  misc_feature: MA Experiment 20000113 PARAMETER Experiment Name: At_42deg_Heat_cDNA_P Parameter: Timepoint (hr) Value: 8
  misc_feature: MA Experiment 20000113 PARAMETER Experiment Name: At_42deg_Heat_cDNA_P Parameter: Tissue Value: Aerial
  misc_feature: MA Experiment ID: 20000180 Result: Down-regulated in Transcription
  misc_feature: MA Experiment 20000180 PARAMETER Experiment Name: At_Germinating_Seeds_P Parameter: Age (hr) Value: 24 vs. 0
  misc_feature: MA Experiment 20000180 PARAMETER Experiment Name: At_Germinating_Seeds_P Parameter: Tissue Value: Germinating Seeds
  misc_feature: MA Experiment ID: 20001911 Result: Up-regulated in Transcription
  misc_feature: MA Experiment 20001911 PARAMETER Experiment Name: At_Drought_Reproduction_P Parameter: Age (day) Value: 40
  misc_feature: MA Experiment 20001911 PARAMETER Experiment Name: At_Drought_Reproduction_P Parameter: Organism Value: A. thaliana
  misc_feature: MA Experiment 20001911 PARAMETER Experiment Name: At_Drought_Reproduction_P Parameter: Plant Line Value: WS
  misc_feature: MA Experiment 20001911 PARAMETER Experiment Name: At_Drought_Reproduction_P Parameter: Timepoint (day) Value: 10
  misc_feature: MA Experiment 20001911 PARAMETER Experiment Name: At_Drought_Reproduction_P Parameter: Tissue Value: Flowers
  misc_feature: MA Experiment 20001911 PARAMETER Experiment Name: At_Drought_Reproduction_P Parameter: Treatment Value: Drought vs. No Drought

SEQ ID NO: 32710 - protein, 341 aa, Arabidopsis thaliana; identical to SEQ ID NO: 29120
  peptide (1)..(341): Ceres Seq. ID no. 12602556
  misc_feature (1)..(341): Homolog of NCBI NO: 7433352 NR Description: ribonucleoside-diphosphate reductase (EC
  misc_feature (1)..(341): Homolog of NCBI NO: 15229476 NR Description: ribonucleoside-diphosphate reductase small chain
  misc_feature (1)..(341): Homolog of NCBI NO: 7433352 NR Description: ribonucleoside-diphosphate reductase (EC
  misc_feature (1)..(341): Homolog of NCBI NO: 15229476 NR Description: ribonucleoside-diphosphate reductase small chain
  misc_feature (1)..(341): Homolog of NCBI NO: 7433352 NR Description: ribonucleoside-diphosphate reductase (EC
  misc_feature (1)..(341): Homolog of NCBI NO: 15229476 NR Description: ribonucleoside-diphosphate reductase small chain

SEQ ID NO: 32711 - protein, 330 aa, Arabidopsis thaliana; identical to SEQ ID NO: 29121
  peptide (1)..(330): Ceres Seq. ID no. 12602557
  misc_feature (1)..(330): Homolog of NCBI NO: 7433352 NR Description: ribonucleoside-diphosphate reductase (EC
  misc_feature (1)..(330): Homolog of NCBI NO: 15229476 NR Description: ribonucleoside-diphosphate reductase small chain
  misc_feature (1)..(330): Homolog of NCBI NO: 7433352 NR Description: ribonucleoside-diphosphate reductase (EC
  misc_feature (1)..(330): Homolog of NCBI NO: 15229476 NR Description: ribonucleoside-diphosphate reductase small chain
  misc_feature (1)..(330): Homolog of NCBI NO: 7433352 NR Description: ribonucleoside-diphosphate reductase (EC
  misc_feature (1)..(330): Homolog of NCBI NO: 15229476 NR Description: ribonucleoside-diphosphate reductase small chain

SEQ ID NO: 32712 - protein, 319 aa, Arabidopsis thaliana; identical to SEQ ID NO: 29122
  peptide (1)..(319): Ceres Seq. ID no. 12602558
  misc_feature (1)..(319): Homolog of NCBI NO: 7433352 NR Description: ribonucleoside-diphosphate reductase (EC
  misc_feature (1)..(319): Homolog of NCBI NO: 15229476 NR Description: ribonucleoside-diphosphate reductase small chain
  misc_feature (1)..(319): Homolog of NCBI NO: 7433352 NR Description: ribonucleoside-diphosphate reductase (EC
  misc_feature (1)..(319): Homolog of NCBI NO: 15229476 NR Description: ribonucleoside-diphosphate reductase small chain
  misc_feature (1)..(319): Homolog of NCBI NO: 7433352 NR Description: ribonucleoside-diphosphate reductase (EC
  misc_feature (1)..(319): Homolog of NCBI NO: 15229476 NR Description: ribonucleoside-diphosphate reductase small chain

SEQ ID NO: 32713 - DNA, 748 bp, Arabidopsis thaliana; identical to SEQ ID NO: 29123
  misc_feature (1)..(748): Ceres Seq. ID no. 12580430
  misc_feature: MA Experiment ID: 20000184 Result: Down-regulated in Transcription
  misc_feature: MA Experiment 20000184 PARAMETER Experiment Name: At_Shoots__P Parameter: Age (day) Value: 7
  misc_feature: MA Experiment 20000184 PARAMETER Experiment Name: At_Shoots__P Parameter: Tissue Value: Shoots vs. Whole Plant
  misc_feature: MA Experiment ID: 20001248 Result: Up-regulated in Transcription
  misc_feature: MA Experiment 20001248 PARAMETER Experiment Name: At_Far-red-induction_P Parameter: Age (day) Value: 7
  misc_feature: MA Experiment 20001248 PARAMETER Experiment Name: At_Far-red-induction_P Parameter: Light Value: Far-red vs. White
  misc_feature: MA Experiment 20001248 PARAMETER Experiment Name: At_Far-red-induction_P Parameter: Organism Value: A. thaliana
  misc_feature: MA Experiment 20001248 PARAMETER Experiment Name: At_Far-red-induction_P Parameter: Plant Line Value: Columbia
  misc_feature: MA Experiment 20001248 PARAMETER Experiment Name: At_Far-red-induction_P Parameter: Timepoint (hr) Value: 4
  misc_feature: MA Experiment 20001248 PARAMETER Experiment Name: At_Far-red-induction_P Parameter: Tissue Value: Whole Plant

SEQ ID NO: 32714 - protein, 134 aa, Arabidopsis thaliana; identical to SEQ ID NO: 29124
  peptide (1)..(134): Ceres Seq. ID no. 12580431
  misc_feature (1)..(67): Homolog of NCBI NO: 26453208 NR Description: putative kinesin [Arabidopsis thaliana]
  misc_feature (1)..(134): Homolog of NCBI NO: 7428718 NR Description: probable kinesin - Arabidopsis thaliana
  misc_feature (1)..(134): Homolog of NCBI NO: 22328612 NR Description: similar to kinesin like protein {Arabidopsis

SEQ ID NO: 32715 - protein, 86 aa, Arabidopsis thaliana; identical to SEQ ID NO: 29125
  peptide (1)..(86): Ceres Seq. ID no. 12580432
  misc_feature (1)..(19): Homolog of NCBI NO: 26453208 NR Description: putative kinesin [Arabidopsis thaliana]
  misc_feature (1)..(86): Homolog of NCBI NO: 7428718 NR Description: probable kinesin - Arabidopsis thaliana
  misc_feature (1)..(86): Homolog of NCBI NO: 22328612 NR Description: similar to kinesin like protein {Arabidopsis

SEQ ID NO: 32716 - protein, 76 aa, Arabidopsis thaliana; identical to SEQ ID NO: 29126
  peptide (1)..(76): Ceres Seq. ID no. 12580433

SEQ ID NO: 32717 - DNA, 1016 bp, Arabidopsis thaliana; identical to SEQ ID NO: 29127
  misc_feature (1)..(1016): Ceres Seq. ID no. 12337966
  misc_feature: MA Experiment ID: 20000111 Result: Up-regulated in Transcription
  misc_feature: MA Experiment 20000111 PARAMETER Experiment Name: At_42deg_Heat_cDNA_P Parameter: Temperature (deg C) Value: 42 vs. 22
  misc_feature: MA Experiment 20000111 PARAMETER Experiment Name: At_42deg_Heat_cDNA_P Parameter: Timepoint (hr) Value: 6
  misc_feature: MA Experiment 20000111 PARAMETER Experiment Name: At_42deg_Heat_cDNA_P Parameter: Tissue Value: Aerial
  misc_feature: MA Experiment ID: 20000113 Result: Up-regulated in Transcription
  misc_feature: MA Experiment 20000113 PARAMETER Experiment Name: At_42deg_Heat_cDNA_P Parameter: Temperature (deg C) Value: 42 vs. 22
  misc_feature: MA Experiment 20000113 PARAMETER Experiment Name: At_42deg_Heat_cDNA_P Parameter: Timepoint (hr) Value: 8
  misc_feature: MA Experiment 20000113 PARAMETER Experiment Name: At_42deg_Heat_cDNA_P Parameter: Tissue Value: Aerial
  misc_feature: MA Experiment ID: 20001911 Result: Up-regulated in Transcription
  misc_feature: MA Experiment 20001911 PARAMETER Experiment Name: At_Drought_Reproduction_P Parameter: Age (day) Value: 40
  misc_feature: MA Experiment 20001911 PARAMETER Experiment Name: At_Drought_Reproduction_P Parameter: Organism Value: A. thaliana
  misc_feature: MA Experiment 20001911 PARAMETER Experiment Name: At_Drought_Reproduction_P Parameter: Plant Line Value: WS
  misc_feature: MA Experiment 20001911 PARAMETER Experiment Name: At_Drought_Reproduction_P Parameter: Timepoint (day) Value: 10
  misc_feature: MA Experiment 20001911 PARAMETER Experiment Name: At_Drought_Reproduction_P Parameter: Tissue Value: Flowers
  misc_feature: MA Experiment 20001911 PARAMETER Experiment Name: At_Drought_Reproduction_P Parameter: Treatment Value: Drought vs. No Drought

SEQ ID NO: 32718 - protein, 218 aa, Arabidopsis thaliana; identical to SEQ ID NO: 29128
  peptide (1)..(218): Ceres Seq. ID no. 12337967
  misc_feature (96)..(203): Pfam Name: NADH ubiquinone oxidoreductase, 20 Kd subunit Pfam Description: NADH ubiquinone oxidoreductase, 20 Kd subunit
  misc_feature (20)..(218): Homolog of NCBI NO: 34862315 NR Description: similar to NADH dehydrogenase (ubiquinone) Fe-S
  misc_feature (58)..(218): Homolog of NCBI NO: 34328788 NR Description: NADH:ubiquinone oxidoreductase subunit 10;
  misc_feature (9)..(218): Homolog of NCBI NO: 1171865 NR Description: NADH-ubiquinone oxidoreductase 20 kDa subunit,
  misc_feature (33)..(218): Homolog of NCBI NO: 34910678 NR Description: putative NADH dehydrogenase (ubiquinone) chain
  misc_feature (1)..(218): Homolog of NCBI NO: 2499328 NR Description: NADH-ubiquinone oxidoreductase 20 kDa subunit,
  misc_feature (30)..(218): Homolog of NCBI NO: 9652190 NR Description: NADH-ubiquinone oxidoreductase subunit PSST
  misc_feature (1)..(218): Homolog of NCBI NO: 9652180 NR Description: NADH-ubiquinone oxidoreductase subunit PSST
  misc_feature (1)..(218): Homolog of NCBI NO: 11277624 NR Description: NADH2 dehydrogenase (ubiquinone) (EC 1.6.5.3)
  misc_feature (1)..(218): Homolog of NCBI NO: 1171866 NR Description: NADH-ubiquinone oxidoreductase 20 kDa subunit,
  misc_feature (1)..(218): Homolog of NCBI NO: 15239782 NR Description: NADH dehydrogenase (ubiquinone)

SEQ ID NO: 32719 - protein, 216 aa, Arabidopsis thaliana; identical to SEQ ID NO: 29129
  peptide (1)..(216): Ceres Seq. ID no. 12337968
  misc_feature (94)..(201): Pfam Name: NADH ubiquinone oxidoreductase, 20 Kd subunit Pfam Description: NADH ubiquinone oxidoreductase, 20 Kd subunit
  misc_feature (18)..(216): Homolog of NCBI NO: 34862315 NR Description: similar to NADH dehydrogenase (ubiquinone) Fe-S
  misc_feature (56)..(216): Homolog of NCBI NO: 34328788 NR Description: NADH:ubiquinone oxidoreductase subunit 10;
  misc_feature (7)..(216): Homolog of NCBI NO: 1171865 NR Description: NADH-ubiquinone oxidoreductase 20 kDa subunit,
  misc_feature (31)..(216): Homolog of NCBI NO: 34910678 NR Description: putative NADH dehydrogenase (ubiquinone) chain
  misc_feature (1)..(216): Homolog of NCBI NO: 2499328 NR Description: NADH-ubiquinone oxidoreductase 20 kDa subunit,
  misc_feature (28)..(216): Homolog of NCBI NO: 9652190 NR Description: NADH-ubiquinone oxidoreductase subunit PSST
  misc_feature (1)..(216): Homolog of NCBI NO: 9652180 NR Description: NADH-ubiquinone oxidoreductase subunit PSST
  misc_feature (1)..(216): Homolog of NCBI NO: 11277624 NR Description: NADH2 dehydrogenase (ubiquinone) (EC 1.6.5.3)
  misc_feature (1)..(216): Homolog of NCBI NO: 1171866 NR Description: NADH-ubiquinone oxidoreductase 20 kDa subunit,
  misc_feature (1)..(216): Homolog of NCBI NO: 15239782 NR Description: NADH dehydrogenase (ubiquinone)

SEQ ID NO: 32720 - protein, 143 aa, Arabidopsis thaliana; identical to SEQ ID NO: 29130
  peptide (1)..(143): Ceres Seq. ID no. 12337969
  misc_feature (21)..(128): Pfam Name: NADH ubiquinone oxidoreductase, 20 Kd subunit Pfam Description: NADH ubiquinone oxidoreductase, 20 Kd subunit
  misc_feature (1)..(143): Homolog of NCBI NO: 34862315 NR Description: similar to NADH dehydrogenase (ubiquinone) Fe-S
  misc_feature (1)..(143): Homolog of NCBI NO: 34328788 NR Description: NADH:ubiquinone oxidoreductase subunit 10;
  misc_feature (1)..(143): Homolog of NCBI NO: 1171865 NR Description: NADH-ubiquinone oxidoreductase 20 kDa subunit,
  misc_feature (1)..(143): Homolog of NCBI NO: 34910678 NR Description: putative NADH dehydrogenase (ubiquinone) chain
  misc_feature (1)..(143): Homolog of NCBI NO: 2499328 NR Description: NADH-ubiquinone oxidoreductase 20 kDa subunit,
  misc_feature (1)..(143): Homolog of NCBI NO: 9652190 NR Description: NADH-ubiquinone oxidoreductase subunit PSST
  misc_feature (1)..(143): Homolog of NCBI NO: 9652180 NR Description: NADH-ubiquinone oxidoreductase subunit PSST
  misc_feature (1)..(143): Homolog of NCBI NO: 11277624 NR Description: NADH2 dehydrogenase (ubiquinone) (EC 1.6.5.3)
  misc_feature (1)..(143): Homolog of NCBI NO: 1171866 NR Description: NADH-ubiquinone oxidoreductase 20 kDa subunit,
  misc_feature (1)..(143): Homolog of NCBI NO: 15239782 NR Description: NADH dehydrogenase (ubiquinone)

SEQ ID NO: 32721 - DNA, 1273 bp, Arabidopsis thaliana; identical to SEQ ID NO: 29131
  misc_feature (1)..(1273): Ceres Seq. ID no. 12334392
  misc_feature: MA Experiment ID: 108577 Result: Down-regulated in Transcription
  misc_feature: MA Experiment 108577 PARAMETER Experiment Name: At_42deg_Heat_cDNA_P Parameter: Temperature (deg C) Value: 42 vs. 22
  misc_feature: MA Experiment 108577 PARAMETER Experiment Name: At_42deg_Heat_cDNA_P Parameter: Timepoint (hr) Value: 6
  misc_feature: MA Experiment 108577 PARAMETER Experiment Name: At_42deg_Heat_cDNA_P Parameter: Tissue Value: Aerial
  misc_feature: MA Experiment ID: 20000069 Result: Up-regulated in Transcription
  misc_feature: MA Experiment 20000069 PARAMETER Experiment Name: At_100uM_ABA_Mutants_cDNA_P Parameter: Plant Line Value: CS23
  misc_feature: MA Experiment 20000069 PARAMETER Experiment Name: At_100uM_ABA_Mutants_cDNA_P Parameter: Timepoint (hr) Value: 6
  misc_feature: MA Experiment 20000069 PARAMETER Experiment Name: At_100uM_ABA_Mutants_cDNA_P Parameter: Tissue Value: Aerial
  misc_feature: MA Experiment 20000069 PARAMETER Experiment Name: At_100uM_ABA_Mutants_cDNA_P Parameter: Treatment Value: 100uM ABA vs. No Treatment
  misc_feature: MA Experiment ID: 20000070 Result: Up-regulated in Transcription
  misc_feature: MA Experiment 20000070 PARAMETER Experiment Name: At_100uM_ABA_Mutants_cDNA_P Parameter: Plant Line Value: CS24
  misc_feature: MA Experiment 20000070 PARAMETER Experiment Name: At_100uM_ABA_Mutants_cDNA_P Parameter: Timepoint (hr) Value: 6
  misc_feature: MA Experiment 20000070 PARAMETER Experiment Name: At_100uM_ABA_Mutants_cDNA_P Parameter: Tissue Value: Aerial
  misc_feature: MA Experiment 20000070 PARAMETER Experiment Name: At_100uM_ABA_Mutants_cDNA_P Parameter: Treatment Value: 100uM ABA vs. No Treatment
  misc_feature: MA Experiment ID: 20000071 Result: Up-regulated in Transcription
  misc_feature: MA Experiment 20000071 PARAMETER Experiment Name: At_100uM_ABA_Mutants_cDNA_P Parameter: Plant Line Value: CS8104
  misc_feature: MA Experiment 20000071 PARAMETER Experiment Name: At_100uM_ABA_Mutants_cDNA_P Parameter: Timepoint (hr) Value: 6
  misc_feature: MA Experiment 20000071 PARAMETER Experiment Name: At_100uM_ABA_Mutants_cDNA_P Parameter: Tissue Value: Aerial
  misc_feature: MA Experiment 20000071 PARAMETER Experiment Name: At_100uM_ABA_Mutants_cDNA_P Parameter: Treatment Value: 100uM ABA vs. No Treatment
  misc_feature: MA Experiment ID: 20000072 Result: Up-regulated in Transcription
  misc_feature: MA Experiment 20000072 PARAMETER Experiment Name: At_100uM_ABA_Mutants_cDNA_P Parameter: Plant Line Value: CS8105
  misc_feature: MA Experiment 20000072 PARAMETER Experiment Name: At_100uM_ABA_Mutants_cDNA_P Parameter: Timepoint (hr) Value: 6
  misc_feature: MA Experiment 20000072 PARAMETER Experiment Name: At_100uM_ABA_Mutants_cDNA_P Parameter: Tissue Value: Aerial
  misc_feature: MA Experiment 20000072 PARAMETER Experiment Name: At_100uM_ABA_Mutants_cDNA_P Parameter: Treatment Value: 100uM ABA vs. No Treatment
  misc_feature: MA Experiment ID: 20000088 Result: Up-regulated in Transcription
  misc_feature: MA Experiment 20000088 PARAMETER Experiment Name: At_100uM_ABA_Mutants_cDNA_P Parameter: Plant Line Value: Landsberg
  misc_feature: MA Experiment 20000088 PARAMETER Experiment Name: At_100uM_ABA_Mutants_cDNA_P Parameter: Timepoint (hr) Value: 6
  misc_feature: MA Experiment 20000088 PARAMETER Experiment Name: At_100uM_ABA_Mutants_cDNA_P Parameter: Tissue Value: Aerial
  misc_feature: MA Experiment 20000088 PARAMETER Experiment Name: At_100uM_ABA_Mutants_cDNA_P Parameter: Treatment Value: 100uM ABA vs. No Treatment
  misc_feature: MA Experiment ID: 20000089 Result: Up-regulated in Transcription
  misc_feature: MA Experiment ID: 20000090 Result: Up-regulated in Transcription
  misc_feature: MA Experiment ID: 20000224 Result: Down-regulated in Transcription

SEQ ID NO: 32722 - protein, 268 aa, Arabidopsis thaliana; identical to SEQ ID NO: 29132
  peptide (1)..(268): Ceres Seq. ID no. 12334393
  misc_feature (180)..(242): Pfam Name: SNARE domain Pfam Description: SNARE domain
  misc_feature (1)..(268): Homolog of NCBI NO: 18422725 NR Description: syntaxin SYP22 (VAM3)

SEQ ID NO: 32723 - DNA, 1381 bp, Arabidopsis thaliana; identical to SEQ ID NO: 29133
  misc_feature (1)..(1381): Ceres Seq. ID no. 12333866
  misc_feature: Phenotype: INFLORESCENCE Internode Length-Short Internode
  misc_feature: Phenotype: INFLORESCENCE Other
  misc_feature: Phenotype: SILIQUES Other
  misc_feature: Phenotype: ROSETTE LEAVES Curled-Curled 5
  misc_feature: Phenotype: ROSETTE LEAVES Disorganized Rosette-Disorganized Rosette
  misc_feature: Phenotype: ROSETTE LEAVES Shape-Lanceolate
  misc_feature: Phenotype: ROSETTE LEAVES Other
  misc_feature: Phenotype: WHOLE PLANT Size-Small
  misc_feature: Phenotype: CAULINE LEAVES Curled-Curled 5
  misc_feature: Phenotype: CAULINE LEAVES Shape-Lanceolate
  misc_feature: Phenotype: CAULINE LEAVES Other
  misc_feature: Phenotype: FLOWERS Other
  misc_feature: Phenotype: INFLORESCENCE Height-Short
  misc_feature: Phenotype: INFLORESCENCE Internode Length-Short Internode
  misc_feature: Phenotype: INFLORESCENCE Other
  misc_feature: Phenotype: SILIQUES Other
  misc_feature: Phenotype: ROSETTE LEAVES Curled-Curled 5
  misc_feature: Phenotype: ROSETTE LEAVES Disorganized Rosette-Disorganized Rosette
  misc_feature: Phenotype: ROSETTE LEAVES Shape-Lanceolate
  misc_feature: Phenotype: ROSETTE LEAVES Other
  misc_feature: Phenotype: WHOLE PLANT Size-Small
  misc_feature: Phenotype: CAULINE LEAVES Curled-Curled 5
  misc_feature: Phenotype: CAULINE LEAVES Shape-Lanceolate
  misc_feature: Phenotype: CAULINE LEAVES Other
  misc_feature: Phenotype: FLOWERS Other
  misc_feature: Phenotype: INFLORESCENCE Height-Short
  misc_feature: Phenotype: INFLORESCENCE Internode Length-Short Internode
  misc_feature: Phenotype: INFLORESCENCE Other
  misc_feature: Phenotype: SILIQUES Other
  misc_feature: Phenotype: ROSETTE LEAVES Curled-Curled 5
  misc_feature: Phenotype: ROSETTE LEAVES Disorganized Rosette-Disorganized Rosette
  misc_feature: Phenotype: ROSETTE LEAVES Shape-Lanceolate
  misc_feature: Phenotype: ROSETTE LEAVES Other
  misc_feature: Phenotype: WHOLE PLANT Size-Small
  misc_feature: Phenotype: CAULINE LEAVES Curled-Curled 5
  misc_feature: Phenotype: CAULINE LEAVES Shape-Lanceolate
  misc_feature: Phenotype: CAULINE LEAVES Other
  misc_feature: Phenotype: FLOWERS Other
  misc_feature: Phenotype: INFLORESCENCE Height-Short
  misc_feature: Phenotype: INFLORESCENCE Internode Length-Short Internode
  misc_feature: Phenotype: INFLORESCENCE Other
  misc_feature: Phenotype: SILIQUES Other
  misc_feature: Phenotype: ROSETTE LEAVES Curled-Curled 5
  misc_feature: Phenotype: ROSETTE LEAVES Disorganized Rosette-Disorganized Rosette
  misc_feature: Phenotype: ROSETTE LEAVES Shape-Lanceolate
  misc_feature: Phenotype: ROSETTE LEAVES Other
  misc_feature: Phenotype: WHOLE PLANT Size-Small
  misc_feature: Phenotype: WHOLE PLANT Other
  misc_feature: Phenotype: CAULINE LEAVES Curled-Curled 5
  misc_feature: Phenotype: CAULINE LEAVES Shape-Lanceolate
  misc_feature: Phenotype: CAULINE LEAVES Other
  misc_feature: Phenotype: FLOWERS Other
  misc_feature: Phenotype: INFLORESCENCE Height-Short
  misc_feature: Phenotype: INFLORESCENCE Internode Length-Short Internode
  misc_feature: Phenotype: INFLORESCENCE Other
  misc_feature: Phenotype: SILIQUES Other
  misc_feature: Phenotype: ROSETTE LEAVES Curled-Curled 5
  misc_feature: Phenotype: ROSETTE LEAVES Disorganized Rosette-Disorganized Rosette
  misc_feature: Phenotype: ROSETTE LEAVES Shape-Lanceolate
  misc_feature: Phenotype: ROSETTE LEAVES Other
  misc_feature: Phenotype: WHOLE PLANT Size-Small
  misc_feature: Phenotype: WHOLE PLANT Other
  misc_feature: Phenotype: CAULINE LEAVES Curled-Curled 5
  misc_feature: Phenotype: CAULINE LEAVES Shape-Lanceolate
  misc_feature: Phenotype: CAULINE LEAVES Other
  misc_feature: Phenotype: FLOWERS Other
  misc_feature: Phenotype: INFLORESCENCE Height-Short
  misc_feature: Phenotype: INFLORESCENCE Internode Length-Short Internode
  misc_feature: Phenotype: INFLORESCENCE Other
  misc_feature: Phenotype: SILIQUES Other
  misc_feature: Phenotype: ROSETTE LEAVES Curled-Curled 5
  misc_feature: Phenotype: ROSETTE LEAVES Disorganized Rosette-Disorganized Rosette
  misc_feature: Phenotype: ROSETTE LEAVES Shape-Lanceolate
  misc_feature: Phenotype: ROSETTE LEAVES Other
  misc_feature: Phenotype: WHOLE PLANT Size-Small
  misc_feature: Phenotype: WHOLE PLANT Other
  misc_feature: Phenotype: CAULINE LEAVES Curled-Curled 5
  misc_feature: Phenotype: CAULINE LEAVES Shape-Lanceolate
  misc_feature: Phenotype: CAULINE LEAVES Other
  misc_feature: Phenotype: FLOWERS Other
  misc_feature: Phenotype: INFLORESCENCE Height-Short
  misc_feature: Phenotype: INFLORESCENCE Internode Length-Short Internode
  misc_feature: Phenotype: INFLORESCENCE Other
  misc_feature: Phenotype: SILIQUES Other
  misc_feature: Phenotype: ROSETTE LEAVES Curled-Curled 5
  misc_feature: Phenotype: ROSETTE LEAVES Disorganized Rosette-Disorganized Rosette
  misc_feature: Phenotype: ROSETTE LEAVES Shape-Lanceolate
  misc_feature: Phenotype: ROSETTE LEAVES Other
  misc_feature: Phenotype: WHOLE PLANT Size-Small
  misc_feature: Phenotype: WHOLE PLANT Other
  misc_feature: Phenotype: CAULINE LEAVES Curled-Curled 5
  misc_feature: Phenotype: CAULINE LEAVES Shape-Lanceolate
  misc_feature: Phenotype: CAULINE LEAVES Other
  misc_feature: Phenotype: FLOWERS Other
  misc_feature: Phenotype: INFLORESCENCE Height-Short
  misc_feature: Phenotype: INFLORESCENCE Internode Length-Short Internode
  misc_feature: Phenotype: INFLORESCENCE Other
  misc_feature: Phenotype: SILIQUES Other
  misc_feature: Phenotype: ROSETTE LEAVES Curled-Curled 5
  misc_feature: Phenotype: ROSETTE LEAVES Disorganized Rosette-Disorganized Rosette
  misc_feature: Phenotype: ROSETTE LEAVES Shape-Lanceolate
  misc_feature: Phenotype: ROSETTE LEAVES Other
  misc_feature: Phenotype: WHOLE PLANT Size-Small
  misc_feature: Phenotype: WHOLE PLANT Other
  misc_feature: Phenotype: CAULINE LEAVES Curled-Curled 5
  misc_feature: Phenotype: CAULINE LEAVES Shape-Lanceolate
  misc_feature: Phenotype: CAULINE LEAVES Other
  misc_feature: Phenotype: FLOWERS Other
  misc_feature: Phenotype: INFLORESCENCE Height-Short
  misc_feature: Phenotype: INFLORESCENCE Internode Length-Short Internode
  misc_feature: Phenotype: INFLORESCENCE Other
  misc_feature: Phenotype: SILIQUES Other
  misc_feature: Phenotype: ROSETTE LEAVES Curled-Curled 5
  misc_feature: Phenotype: ROSETTE LEAVES Disorganized Rosette-Disorganized Rosette
  misc_feature: Phenotype: ROSETTE LEAVES Shape-Lanceolate
  misc_feature: Phenotype: ROSETTE LEAVES Other
  misc_feature: Phenotype: WHOLE PLANT Size-Small
  misc_feature: Phenotype: WHOLE PLANT Other
  misc_feature: Phenotype: CAULINE LEAVES Curled-Curled 5
  misc_feature: Phenotype: CAULINE LEAVES Shape-Lanceolate
  misc_feature: Phenotype: CAULINE LEAVES Other
  misc_feature: Phenotype: FLOWERS Other
  misc_feature: Phenotype: INFLORESCENCE Height-Short
  misc_feature: Phenotype: INFLORESCENCE Internode Length-Short Internode
  misc_feature: Phenotype: INFLORESCENCE Other
  misc_feature: Phenotype: SILIQUES Other
  misc_feature: Phenotype: ROSETTE LEAVES Curled-Curled 5
  misc_feature: Phenotype: ROSETTE LEAVES Disorganized Rosette-Disorganized Rosette
  misc_feature: Phenotype: ROSETTE LEAVES Shape-Lanceolate
  misc_feature: Phenotype: ROSETTE LEAVES Other
  misc_feature: Phenotype: WHOLE PLANT Size-Small
  misc_feature: Phenotype: WHOLE PLANT Other
  misc_feature: Phenotype: CAULINE LEAVES Curled-Curled 5
  misc_feature: Phenotype: CAULINE LEAVES Shape-Lanceolate
  misc_feature: Phenotype: CAULINE LEAVES Other
  misc_feature: Phenotype: FLOWERS Other
  misc_feature: Phenotype: INFLORESCENCE Height-Short
  misc_feature: Phenotype: INFLORESCENCE Internode Length-Short Internode
  misc_feature: Phenotype: INFLORESCENCE Other
  misc_feature: Phenotype: SILIQUES Other
  misc_feature: Phenotype: ROSETTE LEAVES Curled-Curled 5
  misc_feature: Phenotype: ROSETTE LEAVES Disorganized Rosette-Disorganized Rosette
  misc_feature: Phenotype: ROSETTE LEAVES Shape-Lanceolate
  misc_feature: Phenotype: ROSETTE LEAVES Other
  misc_feature: Phenotype: WHOLE PLANT Size-Small
  misc_feature: Phenotype: WHOLE PLANT Other
  misc_feature: Phenotype: CAULINE LEAVES Curled-Curled 5
  misc_feature: Phenotype: CAULINE LEAVES Shape-Lanceolate
  misc_feature: Phenotype: CAULINE LEAVES Other
  misc_feature: Phenotype: FLOWERS Other
  misc_feature: Phenotype: INFLORESCENCE Height-Short
  misc_feature: Phenotype: INFLORESCENCE Internode Length-Short Internode
  misc_feature: Phenotype: INFLORESCENCE Other
  misc_feature: Phenotype: SILIQUES Other
  misc_feature: Phenotype: ROSETTE LEAVES Curled-Curled 5
  misc_feature: Phenotype: ROSETTE LEAVES Disorganized Rosette-Disorganized Rosette
  misc_feature: Phenotype: ROSETTE LEAVES Shape-Lanceolate
  misc_feature: Phenotype: ROSETTE LEAVES Other
  misc_feature: Phenotype: WHOLE PLANT Size-Small
  misc_feature: Phenotype: WHOLE PLANT Other
  misc_feature: Phenotype: CAULINE LEAVES Curled-Curled 5
  misc_feature: Phenotype: CAULINE LEAVES Shape-Lanceolate
  misc_feature: Phenotype: CAULINE LEAVES Other
  misc_feature: Phenotype: FLOWERS Other
  misc_feature: Phenotype: INFLORESCENCE Height-Short
  misc_feature: Phenotype: INFLORESCENCE Internode Length-Short Internode
  misc_feature: Phenotype: INFLORESCENCE Other
  misc_feature: Phenotype: SILIQUES Other
  misc_feature: Phenotype: ROSETTE LEAVES Curled-Curled 5
  misc_feature: Phenotype: ROSETTE LEAVES Disorganized Rosette-Disorganized Rosette
  misc_feature: Phenotype: ROSETTE LEAVES Shape-Lanceolate
  misc_feature: Phenotype: ROSETTE LEAVES Other
  misc_feature: Phenotype: WHOLE PLANT Size-Small
  misc_feature: Phenotype: WHOLE PLANT Other
  misc_feature: Phenotype: CAULINE LEAVES Curled-Curled 5
  misc_feature: Phenotype: CAULINE LEAVES Shape-Lanceolate
  misc_feature: Phenotype: CAULINE LEAVES Other
  misc_feature: Phenotype: FLOWERS Other
  misc_feature: Phenotype: INFLORESCENCE Height-Short
  misc_feature: Phenotype: INFLORESCENCE Internode Length-Short Internode
  misc_feature: Phenotype: INFLORESCENCE Other
  misc_feature: Phenotype: SILIQUES Other
  misc_feature: Phenotype: ROSETTE LEAVES Disorganized Rosette-Disorganized Rosette
  misc_feature: Phenotype: ROSETTE LEAVES Other
  misc_feature: Phenotype: FLOWERS Other
  misc_feature: Phenotype: INFLORESCENCE Branching-Reduced Apical Dominance
  misc_feature: Phenotype: INFLORESCENCE Height-Short
  misc_feature: Phenotype: FERTILITY Fertility-Reduced
  misc_feature: Phenotype: ROSETTE LEAVES Disorganized Rosette-Disorganized Rosette
  misc_feature: Phenotype: ROSETTE LEAVES Other
  misc_feature: Phenotype: FLOWERS Other
  misc_feature: Phenotype: INFLORESCENCE Branching-Reduced Apical Dominance
  misc_feature: Phenotype: INFLORESCENCE Height-Short
  misc_feature: Phenotype: ROSETTE LEAVES Curled-Curled 4
  misc_feature: Phenotype: ROSETTE LEAVES Other
  misc_feature: Phenotype: WHOLE PLANT Size-Small
  misc_feature: Phenotype: ROSETTE LEAVES Curled-Curled 4
  misc_feature: Phenotype: ROSETTE LEAVES Other
  misc_feature: Phenotype: WHOLE PLANT Size-Small
  misc_feature: Phenotype: ROSETTE LEAVES Curled-Curled 4
  misc_feature: Phenotype: ROSETTE LEAVES Other
  misc_feature: Phenotype: WHOLE PLANT Size-Small
  misc_feature: Phenotype: ROSETTE LEAVES Curled-Curled 4
  misc_feature: Phenotype: ROSETTE LEAVES Other
  misc_feature: Phenotype: WHOLE PLANT Size-Small
  misc_feature: Phenotype: ROSETTE LEAVES Curled-Curled 5
  misc_feature: Phenotype: ROSETTE LEAVES Disorganized Rosette-Disorganized Rosette
  misc_feature: Phenotype: ROSETTE LEAVES Shape-Lanceolate
  misc_feature: Phenotype: ROSETTE LEAVES Other
  misc_feature: Phenotype: WHOLE PLANT Size-Small
  misc_feature: Phenotype: CAULINE LEAVES Curled-Curled 5
  misc_feature: Phenotype: CAULINE LEAVES Shape-Lanceolate
  misc_feature: Phenotype: CAULINE LEAVES Other
  misc_feature: Phenotype: FLOWERS Other
  misc_feature: Phenotype: INFLORESCENCE Height-Short
  misc_feature: Phenotype: INFLORESCENCE Internode Length-Short Internode
  misc_feature: Phenotype: INFLORESCENCE Other
  misc_feature: Phenotype: SILIQUES Other
  misc_feature: Phenotype: ROSETTE LEAVES Curled-Curled 5
  misc_feature: Phenotype: ROSETTE LEAVES Disorganized Rosette-Disorganized Rosette
  misc_feature: Phenotype: ROSETTE LEAVES Shape-Lanceolate
  misc_feature: Phenotype: ROSETTE LEAVES Other
  misc_feature: Phenotype: WHOLE PLANT Size-Small
  misc_feature: Phenotype: CAULINE LEAVES Curled-Curled 5
  misc_feature: Phenotype: CAULINE LEAVES Shape-Lanceolate
  misc_feature: Phenotype: CAULINE LEAVES Other
  misc_feature: Phenotype: FLOWERS Other
  misc_feature: Phenotype: INFLORESCENCE Height-Short
  misc_feature: Phenotype: INFLORESCENCE Internode Length-Short Internode
  misc_feature: Phenotype: INFLORESCENCE Other
  misc_feature: Phenotype: SILIQUES Other
  misc_feature: Phenotype: ROSETTE LEAVES Curled-Curled 5
  misc_feature: Phenotype: ROSETTE LEAVES Disorganized Rosette-Disorganized Rosette
  misc_feature: Phenotype: ROSETTE LEAVES Shape-Lanceolate
  misc_feature: Phenotype: ROSETTE LEAVES Other
  misc_feature: Phenotype: WHOLE PLANT Size-Small
  misc_feature: Phenotype: CAULINE LEAVES Curled-Curled 5
  misc_feature: Phenotype: CAULINE LEAVES Shape-Lanceolate
  misc_feature: Phenotype: CAULINE LEAVES Other
  misc_feature: Phenotype: FLOWERS Other
  misc_feature: Phenotype: INFLORESCENCE Height-Short
  misc_feature: Phenotype: INFLORESCENCE Internode Length-Short Internode
  misc_feature: Phenotype: INFLORESCENCE Other
  misc_feature: Phenotype: SILIQUES Other
  misc_feature: Phenotype: ROSETTE LEAVES Curled-Curled 5
  misc_feature: Phenotype: ROSETTE LEAVES Disorganized Rosette-Disorganized Rosette
  misc_feature: Phenotype: ROSETTE LEAVES Shape-Lanceolate
  misc_feature: Phenotype: ROSETTE LEAVES Other
  misc_feature: Phenotype: WHOLE PLANT Size-Small
  misc_feature: Phenotype: CAULINE LEAVES Curled-Curled 5
  misc_feature: Phenotype: CAULINE LEAVES Shape-Lanceolate
  misc_feature: Phenotype: CAULINE LEAVES Other
  misc_feature: Phenotype: FLOWERS Other
  misc_feature: Phenotype: INFLORESCENCE Height-Short
  misc_feature: Phenotype: INFLORESCENCE Internode Length-Short Internode
  misc_feature: Phenotype: INFLORESCENCE Other
  misc_feature: Phenotype: SILIQUES Other
  misc_feature: Phenotype: ROSETTE LEAVES Curled-Curled 5
  misc_feature: Phenotype: ROSETTE LEAVES Disorganized Rosette-Disorganized Rosette
  misc_feature: Phenotype: ROSETTE LEAVES Shape-Lanceolate
  misc_feature: Phenotype: ROSETTE LEAVES Other
  misc_feature: Phenotype: WHOLE PLANT Size-Small
  misc_feature: Phenotype: CAULINE LEAVES Curled-Curled 5
  misc_feature: Phenotype: CAULINE LEAVES Shape-Lanceolate
  misc_feature: Phenotype: CAULINE LEAVES Other
  misc_feature: Phenotype: FLOWERS Other
  misc_feature: Phenotype: INFLORESCENCE Height-Short
  misc_feature: Phenotype: INFLORESCENCE Internode Length-Short Internode
  misc_feature: Phenotype: INFLORESCENCE Other
  misc_feature: Phenotype: SILIQUES Other
  misc_feature: Phenotype: ROSETTE LEAVES Curled-Curled 5
  misc_feature: Phenotype: ROSETTE LEAVES Disorganized Rosette-Disorganized Rosette
  misc_feature: Phenotype: ROSETTE LEAVES Shape-Lanceolate
  misc_feature: Phenotype: ROSETTE LEAVES Other
  misc_feature: Phenotype: WHOLE PLANT Size-Small
  misc_feature: Phenotype: CAULINE LEAVES Curled-Curled 5
  misc_feature: Phenotype: CAULINE LEAVES Shape-Lanceolate
  misc_feature: Phenotype: CAULINE LEAVES Other
  misc_feature: Phenotype: FLOWERS Other
  misc_feature: Phenotype: INFLORESCENCE Height-Short
  misc_feature: Phenotype: INFLORESCENCE Internode Length-Short Internode
  misc_feature: Phenotype: INFLORESCENCE Other
  misc_feature: Phenotype: SILIQUES Other
  misc_feature: Phenotype: ROSETTE LEAVES Curled-Curled 5
  misc_feature: Phenotype: ROSETTE LEAVES Disorganized Rosette-Disorganized Rosette
  misc_feature: Phenotype: ROSETTE LEAVES Shape-Lanceolate
  misc_feature: Phenotype: ROSETTE LEAVES Other
  misc_feature: Phenotype: WHOLE PLANT Size-Small
  misc_feature: Phenotype: CAULINE LEAVES Curled-Curled 5
  misc_feature: Phenotype: CAULINE LEAVES Shape-Lanceolate
  misc_feature: Phenotype: CAULINE LEAVES Other
  misc_feature: Phenotype: FLOWERS Other
  misc_feature: Phenotype: INFLORESCENCE Height-Short

SEQ ID NO: 32724 - protein, 199 aa, Arabidopsis thaliana; identical to SEQ ID NO: 29134
  peptide (1)..(199): Ceres Seq. ID no. 12333867
  misc_feature (9)..(109): Pfam Name: Protein of unknown function DUF260 Pfam Description: Protein of unknown function DUF260
  misc_feature (7)..(112): Homolog of NCBI NO: 15227870 NR Description: hypothetical protein; protein id: At2g23660.1
  misc_feature (3)..(112): Homolog of NCBI NO: 9294470 NR Description: gb|AAB60912.1~gene_id:MGF10.6~similar to unknown
  misc_feature (1)..(112): Homolog of NCBI NO: 29427827 NR Description: LOB domain protein 25
  misc_feature (1)..(112): Homolog of NCBI NO: 21618134 NR Description: unknown [Arabidopsis thaliana]
  misc_feature (1)..(112): Homolog of NCBI NO: 18405472 NR Description: expressed protein
  misc_feature (1)..(112): Homolog of NCBI NO: 34896184 NR Description: contains ESTs C98868(E3203),C98869(E3203)~similar
  misc_feature (1)..(112): Homolog of NCBI NO: 15242624 NR Description: putative protein
  misc_feature (1)..(152): Homolog of NCBI NO: 15240110 NR Description: putative protein; protein id: At5g66870.1
  misc_feature (2)..(128): Homolog of NCBI NO: 34907508 NR Description: B1099D03.24 [Oryza sativa (japonica
  misc_feature (1)..(199): Homolog of NCBI NO: 15218746 NR Description: unknown protein

SEQ ID NO: 32725 - protein, 125 aa, Arabidopsis thaliana; identical to SEQ ID NO: 29135
  peptide (1)..(125): Ceres Seq. ID no. 12333868
  misc_feature (1)..(38): Homolog of NCBI NO: 15227870 NR Description: hypothetical protein; protein id: At2g23660.1
  misc_feature (1)..(38): Homolog of NCBI NO: 9294470 NR Description: gb|AAB60912.1~gene_id:MGF10.6~similar to unknown
  misc_feature (1)..(38): Homolog of NCBI NO: 29427827 NR Description: LOB domain protein 25
  misc_feature (1)..(38): Homolog of NCBI NO: 21618134 NR Description: unknown [Arabidopsis thaliana]
  misc_feature (1)..(38): Homolog of NCBI NO: 18405472 NR Description: expressed protein
  misc_feature (1)..(38): Homolog of NCBI NO: 34896184 NR Description: contains ESTs C98868(E3203),C98869(E3203)~similar
  misc_feature (1)..(38): Homolog of NCBI NO: 15242624 NR Description: putative protein
  misc_feature (1)..(78): Homolog of NCBI NO: 15240110 NR Description: putative protein; protein id: At5g66870.1
  misc_feature (1)..(54): Homolog of NCBI NO: 34907508 NR Description: B1099D03.24 [Oryza sativa (japonica
  misc_feature (1)..(125): Homolog of NCBI NO: 15218746 NR Description: unknown protein

SEQ ID NO: 32726 - DNA, 1026 bp, Arabidopsis thaliana; identical to SEQ ID NO: 26128
  misc_feature (1)..(1026): Ceres Seq. ID no. 13488738
  misc_feature: MA Experiment ID: 20000087 Result: Up-regulated in Transcription
  misc_feature: MA Experiment 20000087 PARAMETER Experiment Name: At_100uM_ABA_Mutants_cDNA_P Parameter: Plant Line Value: WS
  misc_feature: MA Experiment 20000087 PARAMETER Experiment Name: At_100uM_ABA_Mutants_cDNA_P Parameter: Timepoint (hr) Value: 6
  misc_feature: MA Experiment 20000087 PARAMETER Experiment Name: At_100uM_ABA_Mutants_cDNA_P Parameter: Tissue Value: Aerial
  misc_feature: MA Experiment 20000087 PARAMETER Experiment Name: At_100uM_ABA_Mutants_cDNA_P Parameter: Treatment Value: 100uM ABA vs. No Treatment

SEQ ID NO: 32727 - protein, 231 aa, Arabidopsis thaliana; identical to SEQ ID NO: 26129
  peptide (1)..(231): Ceres Seq. ID no. 13488739
  misc_feature (68)..(187): Homolog of NCBI NO: 2398533 NR Description: Transcription factor [Arabidopsis thaliana]
  misc_feature (52)..(183): Homolog of NCBI NO: 5257260 NR Description: Similar to sequence of BAC F7G19 from Arabidopsis
  misc_feature (1)..(187): Homolog of NCBI NO: 21554704 NR Description: transcription factor, putative [Arabidopsis
  misc_feature (23)..(223): Homolog of NCBI NO: 15242784 NR Description: transcription factor Hap5a, putative [Arabidopsis
  misc_feature (23)..(220): Homolog of NCBI NO: 15228405 NR Description: transcription factor Hap5a, putative [Arabidopsis
  misc_feature (1)..(187): Homolog of NCBI NO: 15223482 NR Description: transcription factor Hap5a, putative [Arabidopsis
  misc_feature (1)..(231): Homolog of NCBI NO: 15221912 NR Description: transcription factor Hap5a, putative [Arabidopsis
  misc_feature (24)..(231): Homolog of NCBI NO: 25372763 NR Description: hypothetical protein [imported] - Arabidopsis
  misc_feature (1)..(231): Homolog of NCBI NO: 6289057 NR Description: heme activated protein [Arabidopsis thaliana]
  misc_feature (1)..(231): Homolog of NCBI NO: 15223986 NR Description: transcription factor Hap5a, putative [Arabidopsis
  misc_feature (68)..(187): Homolog of NCBI NO: 2398533 NR Description: Transcription factor [Arabidopsis thaliana]
  misc_feature (52)..(183): Homolog of NCBI NO: 5257260 NR Description: Similar to sequence of BAC F7G19 from Arabidopsis
  misc_feature (1)..(187): Homolog of NCBI NO: 21554704 NR Description: transcription factor, putative [Arabidopsis
  misc_feature (23)..(223): Homolog of NCBI NO: 15242784 NR Description: transcription factor Hap5a, putative [Arabidopsis
  misc_feature (23)..(220): Homolog of NCBI NO: 15228405 NR Description: transcription factor Hap5a, putative [Arabidopsis
  misc_feature (1)..(187): Homolog of NCBI NO: 15223482 NR Description: transcription factor Hap5a, putative [Arabidopsis
  misc_feature (1)..(231): Homolog of NCBI NO: 15221912 NR Description: transcription factor Hap5a, putative [Arabidopsis
  misc_feature (24)..(231): Homolog of NCBI NO: 25372763 NR Description: hypothetical protein [imported] - Arabidopsis
  misc_feature (1)..(231): Homolog of NCBI NO: 6289057 NR Description: heme activated protein [Arabidopsis thaliana]
  misc_feature (1)..(231): Homolog of NCBI NO: 15223986 NR Description: transcription factor Hap5a, putative [Arabidopsis

SEQ ID NO: 32728 - protein, 220 aa, Arabidopsis thaliana; identical to SEQ ID NO: 26130
  peptide (1)..(220): Ceres Seq. ID no. 13488740
  misc_feature (57)..(176): Homolog of NCBI NO: 2398533 NR Description: Transcription factor [Arabidopsis thaliana]
  misc_feature (41)..(172): Homolog of NCBI NO: 5257260 NR Description: Similar to sequence of BAC F7G19 from Arabidopsis
  misc_feature (1)..(176): Homolog of NCBI NO: 21554704 NR Description: transcription factor, putative [Arabidopsis
  misc_feature (12)..(212): Homolog of NCBI NO: 15242784 NR Description: transcription factor Hap5a, putative [Arabidopsis
  misc_feature (12)..(209): Homolog of NCBI NO: 15228405 NR Description: transcription factor Hap5a, putative [Arabidopsis
  misc_feature (1)..(176): Homolog of NCBI NO: 15223482 NR Description: transcription factor Hap5a, putative [Arabidopsis
  misc_feature (1)..(220): Homolog of NCBI NO: 15221912 NR Description: transcription factor Hap5a, putative [Arabidopsis
  misc_feature (13)..(220): Homolog of NCBI NO: 25372763 NR Description: hypothetical protein [imported] - Arabidopsis
  misc_feature (1)..(220): Homolog of NCBI NO: 6289057 NR Description: heme activated protein [Arabidopsis thaliana]
  misc_feature (1)..(220): Homolog of NCBI NO: 15223986 NR Description: transcription factor Hap5a, putative [Arabidopsis
  misc_feature (57)..(176): Homolog of NCBI NO: 2398533 NR Description: Transcription factor [Arabidopsis thaliana]
  misc_feature (41)..(172): Homolog of NCBI NO: 5257260 NR Description: Similar to sequence of BAC F7G19 from Arabidopsis
  misc_feature (1)..(176): Homolog of NCBI NO: 21554704 NR Description: transcription factor, putative [Arabidopsis
  misc_feature (12)..(212): Homolog of NCBI NO: 15242784 NR Description: transcription factor Hap5a, putative [Arabidopsis
  misc_feature (12)..(209): Homolog of NCBI NO: 15228405 NR Description: transcription factor Hap5a, putative [Arabidopsis
  misc_feature (1)..(176): Homolog of NCBI NO: 15223482 NR Description: transcription factor Hap5a, putative [Arabidopsis
  misc_feature (1)..(220): Homolog of NCBI NO: 15221912 NR Description: transcription factor Hap5a, putative [Arabidopsis
  misc_feature (13)..(220): Homolog of NCBI NO: 25372763 NR Description: hypothetical protein [imported] - Arabidopsis
  misc_feature (1)..(220): Homolog of NCBI NO: 6289057 NR Description: heme activated protein [Arabidopsis thaliana]
  misc_feature (1)..(220): Homolog of NCBI NO: 15223986 NR Description: transcription factor Hap5a, putative [Arabidopsis

SEQ ID NO: 32729 - protein, 208 aa, Arabidopsis thaliana; identical to SEQ ID NO: 26131
  peptide (1)..(208): Ceres Seq. ID no. 13488741
  misc_feature (45)..(164): Homolog of NCBI NO: 2398533 NR Description: Transcription factor [Arabidopsis thaliana]
  misc_feature (29)..(160): Homolog of NCBI NO: 5257260 NR Description: Similar to sequence of BAC F7G19 from Arabidopsis
  misc_feature (1)..(164): Homolog of NCBI NO: 21554704 NR Description: transcription factor, putative [Arabidopsis
  misc_feature (1)..(200): Homolog of NCBI NO: 15242784 NR Description: transcription factor Hap5a, putative [Arabidopsis
  misc_feature (1)..(197): Homolog of NCBI NO: 15228405 NR Description: transcription factor Hap5a, putative [Arabidopsis
  misc_feature (1)..(164): Homolog of NCBI NO: 15223482 NR Description: transcription factor Hap5a, putative [Arabidopsis
  misc_feature (1)..(208): Homolog of NCBI NO: 15221912 NR Description: transcription factor Hap5a, putative [Arabidopsis
  misc_feature (1)..(208): Homolog of NCBI NO: 25372763 NR Description: hypothetical protein [imported] - Arabidopsis
  misc_feature (1)..(208): Homolog of NCBI NO: 6289057 NR Description: heme activated protein [Arabidopsis thaliana]
  misc_feature (1)..(208): Homolog of NCBI NO: 15223986 NR Description: transcription factor Hap5a, putative [Arabidopsis
  misc_feature (1)..(208): Homolog of NCBI NO: 15221912 NR Description: transcription factor Hap5a, putative [Arabidopsis
  misc_feature (1)..(208): Homolog of NCBI NO: 25372763 NR Description: hypothetical protein [imported] - Arabidopsis
  misc_feature (1)..(208): Homolog of NCBI NO: 6289057 NR Description: heme activated protein [Arabidopsis thaliana]
  misc_feature (1)..(208): Homolog of NCBI NO: 15223986 NR Description: transcription factor Hap5a, putative [Arabidopsis
  misc_feature (45)..(164): Homolog of NCBI NO: 2398533 NR Description: Transcription factor [Arabidopsis thaliana]
  misc_feature (29)..(160): Homolog of NCBI NO: 5257260 NR Description: Similar to sequence of BAC F7G19 from Arabidopsis
  misc_feature (1)..(164): Homolog of NCBI NO: 21554704 NR Description: transcription factor, putative [Arabidopsis
  misc_feature (1)..(200): Homolog of NCBI NO: 15242784 NR Description: transcription factor Hap5a, putative [Arabidopsis
  misc_feature (1)..(197): Homolog of NCBI NO: 15228405 NR Description: transcription factor Hap5a, putative [Arabidopsis
  misc_feature (1)..(164): Homolog of NCBI NO: 15223482 NR Description: transcription factor Hap5a, putative [Arabidopsis

SEQ ID NO: 32730 - DNA, 992 bp, Arabidopsis thaliana; identical to SEQ ID NO: 29140
  misc_feature (1)..(992): Ceres Seq. ID no. 12394136
  misc_feature: MA Experiment ID: 108434 Result: Down-regulated in Transcription
  misc_feature: MA Experiment 108434 PARAMETER Experiment Name: At_Root_Tips_cDNA_P Parameter: Tissue Value: Root Tips
  misc_feature: MA Experiment ID: 108435 Result: Down-regulated in Transcription
  misc_feature: MA Experiment 108435 PARAMETER Experiment Name: At_stm_Mutants_cDNA_P Parameter: Plant Line Value: wt Landsburg vs stm
  misc_feature: MA Experiment 108435 PARAMETER Experiment Name: At_stm_Mutants_cDNA_P Parameter: Tissue Value: Shoot Apical Meristem Region
  misc_feature: MA Experiment ID: 108461 Result: Up-regulated in Transcription
  misc_feature: MA Experiment 108461 PARAMETER Experiment Name: At_Germinating_Seeds_cDNA_P Parameter: Age (day) Value: 1 vs. 0
  misc_feature: MA Experiment 108461 PARAMETER Experiment Name: At_Germinating_Seeds_cDNA_P Parameter: Tissue Value: Germinating Seeds
  misc_feature: MA Experiment ID: 108462 Result: Up-regulated in Transcription
  misc_feature: MA Experiment 108462 PARAMETER Experiment Name: At_Germinating_Seeds_cDNA_P Parameter: Age (day) Value: 2 vs. 0
  misc_feature: MA Experiment 108462 PARAMETER Experiment Name: At_Germinating_Seeds_cDNA_P Parameter: Tissue Value: Germinating Seeds
  misc_feature: MA Experiment ID: 108463 Result: Up-regulated in Transcription
  misc_feature: MA Experiment 108463 PARAMETER Experiment Name: At_Germinating_Seeds_cDNA_P Parameter: Age (day) Value: 3 vs. 0
  misc_feature: MA Experiment 108463 PARAMETER Experiment Name: At_Germinating_Seeds_cDNA_P Parameter: Tissue Value: Germinating Seeds
  misc_feature: MA Experiment ID: 20000180 Result: Up-regulated in Transcription
  misc_feature: MA Experiment 20000180 PARAMETER Experiment Name: At_Germinating_Seeds_P Parameter: Age (hr) Value: 24 vs. 0
  misc_feature: MA Experiment 20000180 PARAMETER Experiment Name: At_Germinating_Seeds_P Parameter: Tissue Value: Germinating Seeds
  misc_feature: MA Experiment ID: 20000185 Result: Down-regulated in Transcription
  misc_feature: MA Experiment 20000185 PARAMETER Experiment Name: At_Roots__P Parameter: Age (day) Value: 7 vs. 21
  misc_feature: MA Experiment 20000185 PARAMETER Experiment Name: At_Roots__P Parameter: Organism Value: A. thaliana
  misc_feature: MA Experiment 20000185 PARAMETER Experiment Name: At_Roots__P Parameter: Tissue Value: Roots vs. Whole Plant
  misc_feature: MA Experiment ID: 20000224 Result: Up-regulated in Transcription
  misc_feature: MA Experiment ID: 20000227 Result: Down-regulated in Transcription
  misc_feature: MA Experiment 20000227 PARAMETER Experiment Name: At_Root-Tips-vs-Tops_P Parameter: Tissue Value: Root Tips vs. Root Tops
  misc_feature: MA Experiment ID: 20000439 Result: Down-regulated in Transcription
  misc_feature: MA Experiment 20000439 PARAMETER Experiment Name: At_Roots__P Parameter: Age (day) Value: 14 vs. 21
  misc_feature: MA Experiment 20000439 PARAMETER Experiment Name: At_Roots__P Parameter: Organism Value: A. thaliana
  misc_feature: MA Experiment 20000439 PARAMETER Experiment Name: At_Roots__P Parameter: Tissue Value: Roots vs. Whole Plant
  misc_feature: MA Experiment ID: 20001248 Result: Down-regulated in Transcription
  misc_feature: MA Experiment 20001248 PARAMETER Experiment Name: At_Far-red-induction_P Parameter: Age (day) Value: 7
  misc_feature: MA Experiment 20001248 PARAMETER Experiment Name: At_Far-red-induction_P Parameter: Light Value: Far-red vs. White
  misc_feature: MA Experiment 20001248 PARAMETER Experiment Name: At_Far-red-induction_P Parameter: Organism Value: A. thaliana
  misc_feature: MA Experiment 20001248 PARAMETER Experiment Name: At_Far-red-induction_P Parameter: Plant Line Value: Columbia
  misc_feature: MA Experiment 20001248 PARAMETER Experiment Name: At_Far-red-induction_P Parameter: Timepoint (hr) Value: 4
  misc_feature: MA Experiment 20001248 PARAMETER Experiment Name: At_Far-red-induction_P Parameter: Tissue Value: Whole Plant
  misc_feature: MA Experiment ID: 20001451 Result: Down-regulated in Transcription
  misc_feature: MA Experiment 20001451 PARAMETER Experiment Name: At_Far-red-induction_P Parameter: Age (day) Value: 7
  misc_feature: MA Experiment 20001451 PARAMETER Experiment Name: At_Far-red-induction_P Parameter: Light Value: Far-red vs. White
  misc_feature: MA Experiment 20001451 PARAMETER Experiment Name: At_Far-red-induction_P Parameter: Organism Value: A. thaliana
  misc_feature: MA Experiment 20001451 PARAMETER Experiment Name: At_Far-red-induction_P Parameter: Plant Line Value: Columbia
  misc_feature: MA Experiment 20001451 PARAMETER Experiment Name: At_Far-red-induction_P Parameter: Timepoint (hr) Value: 24
  misc_feature: MA Experiment 20001451 PARAMETER Experiment Name: At_Far-red-induction_P Parameter: Tissue Value: Whole Plant
  misc_feature: MA Experiment ID: 20001557 Result: Down-regulated in Transcription
  misc_feature: MA Experiment 20001557 PARAMETER Experiment Name: At_Drought_Soil_Dry_P Parameter: Age (day) Value: 27
  misc_feature: MA Experiment 20001557 PARAMETER Experiment Name: At_Drought_Soil_Dry_P Parameter: Organism Value: A. thaliana
  misc_feature: MA Experiment 20001557 PARAMETER Experiment Name: At_Drought_Soil_Dry_P Parameter: Plant Line Value: WS
  misc_feature: MA Experiment 20001557 PARAMETER Experiment Name: At_Drought_Soil_Dry_P Parameter: Post Timepoint (hr) Value: 3
  misc_feature: MA Experiment 20001557 PARAMETER Experiment Name: At_Drought_Soil_Dry_P Parameter: Post-Treatment Value: Re-Water vs. No Drought
  misc_feature: MA Experiment 20001557 PARAMETER Experiment Name: At_Drought_Soil_Dry_P Parameter: Timepoint (day) Value: 13
  misc_feature: MA Experiment 20001557 PARAMETER Experiment Name: At_Drought_Soil_Dry_P Parameter: Treatment Value: Drought vs. No Drought
  misc_feature: MA Experiment ID: 20001558 Result: Down-regulated in Transcription
  misc_feature: MA Experiment 20001558 PARAMETER Experiment Name: At_Drought_Soil_Dry_P Parameter: Age (day) Value: 27
  misc_feature: MA Experiment 20001558 PARAMETER Experiment Name: At_Drought_Soil_Dry_P Parameter: Organism Value: A. thaliana
  misc_feature: MA Experiment 20001558 PARAMETER Experiment Name: At_Drought_Soil_Dry_P Parameter: Plant Line Value: WS
  misc_feature: MA Experiment 20001558 PARAMETER Experiment Name: At_Drought_Soil_Dry_P Parameter: Post Timepoint (hr) Value: 6
  misc_feature: MA Experiment 20001558 PARAMETER Experiment Name: At_Drought_Soil_Dry_P Parameter: Post-Treatment Value: Re-Water vs. No Drought
  misc_feature: MA Experiment 20001558 PARAMETER Experiment Name: At_Drought_Soil_Dry_P Parameter: Timepoint (day) Value: 13
  misc_feature: MA Experiment 20001558 PARAMETER Experiment Name: At_Drought_Soil_Dry_P Parameter: Treatment Value: Drought vs. No Drought
  misc_feature: MA Experiment ID: 20001560 Result: Down-regulated in Transcription
  misc_feature: MA Experiment 20001560 PARAMETER Experiment Name: At_Drought_Soil_Dry_P Parameter: Age (day) Value: 28
  misc_feature: MA Experiment 20001560 PARAMETER Experiment Name: At_Drought_Soil_Dry_P Parameter: Organism Value: A. thaliana
  misc_feature: MA Experiment 20001560 PARAMETER Experiment Name: At_Drought_Soil_Dry_P Parameter: Plant Line Value: WS
  misc_feature: MA Experiment 20001560 PARAMETER Experiment Name: At_Drought_Soil_Dry_P Parameter: Post Timepoint (hr) Value: None
  misc_feature: MA Experiment 20001560 PARAMETER Experiment Name: At_Drought_Soil_Dry_P Parameter: Post-Treatment Value: None
  misc_feature: MA Experiment 20001560 PARAMETER Experiment Name: At_Drought_Soil_Dry_P Parameter: Timepoint (day) Value: 14
  misc_feature: MA Experiment 20001560 PARAMETER Experiment Name: At_Drought_Soil_Dry_P Parameter: Treatment Value: Drought vs. No Drought

SEQ ID NO: 32731 - protein, 235 aa, Arabidopsis thaliana; identical to SEQ ID NO: 29141
  peptide (1)..(235): Ceres Seq. ID no. 12394137
  misc_feature (144)..(214): Pfam Name: Glutathione S-transferase, C-terminal domain Pfam Description: Glutathione S-transferase, C-terminal domain
  misc_feature (1)..(235): Homolog of NCBI NO: 30679765 NR Description: In2-1 protein, putative [Arabidopsis thaliana]
  misc_feature (1)..(235): Homolog of NCBI NO: 11357919 NR Description: hypothetical protein F9G14.90 - Arabidopsis
  misc_feature (1)..(235): Homolog of NCBI NO: 21537338 NR Description: In2-1 protein [Arabidopsis thaliana]
  misc_feature (1)..(235): Homolog of NCBI NO: 15241956 NR Description: In2-1 protein, putative

SEQ ID NO: 32732 - DNA, 1247 bp, Arabidopsis thaliana; identical to SEQ ID NO: 29142
  misc_feature (1)..(1247): Ceres Seq. ID no. 13489989
  misc_feature: MA Experiment ID: 108463 Result: Down-regulated in Transcription
  misc_feature: MA Experiment 108463 PARAMETER Experiment Name: At_Germinating_Seeds_cDNA_P Parameter: Age (day) Value: 3 vs. 0
  misc_feature: MA Experiment 108463 PARAMETER Experiment Name: At_Germinating_Seeds_cDNA_P Parameter: Tissue Value: Germinating Seeds
  misc_feature: MA Experiment ID: 108488 Result: Up-regulated in Transcription
  misc_feature: MA Experiment ID: 108573 Result: Down-regulated in Transcription
  misc_feature: MA Experiment 108573 PARAMETER Experiment Name: At_Drought_cDNA_P Parameter: Timepoint (hr) Value: 6
  misc_feature: MA Experiment 108573 PARAMETER Experiment Name: At_Drought_cDNA_P Parameter: Tissue Value: Aerial
  misc_feature: MA Experiment 108573 PARAMETER Experiment Name: At_Drought_cDNA_P Parameter: Treatment Value: Drought vs. No Drought
  misc_feature: MA Experiment ID: 108577 Result: Down-regulated in Transcription
  misc_feature: MA Experiment 108577 PARAMETER Experiment Name: At_42deg_Heat_cDNA_P Parameter: Temperature (deg C) Value: 42 vs. 22
  misc_feature: MA Experiment 108577 PARAMETER Experiment Name: At_42deg_Heat_cDNA_P Parameter: Timepoint (hr) Value: 6
  misc_feature: MA Experiment 108577 PARAMETER Experiment Name: At_42deg_Heat_cDNA_P Parameter: Tissue Value: Aerial
  misc_feature: MA Experiment ID: 108585 Result: Down-regulated in Transcription
  misc_feature: MA Experiment 108585 PARAMETER Experiment Name: At_5mM_NaNP_cDNA_P Parameter: Timepoint (hr) Value: 6
  misc_feature: MA Experiment 108585 PARAMETER Experiment Name: At_5mM_NaNP_cDNA_P Parameter: Tissue Value: Aerial
  misc_feature: MA Experiment 108585 PARAMETER Experiment Name: At_5mM_NaNP_cDNA_P Parameter: Treatment Value: null
  misc_feature: MA Experiment ID: 108595 Result: Down-regulated in Transcription
  misc_feature: MA Experiment 108595 PARAMETER Experiment Name: At_Ler-pi_Ovule_cDNA_P Parameter: Plant Line Value: null
  misc_feature: MA Experiment ID: 20000117 Result: Down-regulated in Transcription
  misc_feature: MA Experiment 20000117 PARAMETER Experiment Name: At_100uM_ABA_Mutants_cDNA_P Parameter: Plant Line Value: Columbia
  misc_feature: MA Experiment 20000117 PARAMETER Experiment Name: At_100uM_ABA_Mutants_cDNA_P Parameter: Timepoint (hr) Value: 6
  misc_feature: MA Experiment 20000117 PARAMETER Experiment Name: At_100uM_ABA_Mutants_cDNA_P Parameter: Tissue Value: Aerial
  misc_feature: MA Experiment 20000117 PARAMETER Experiment Name: At_100uM_ABA_Mutants_cDNA_P Parameter: Treatment Value: 100uM ABA vs. No Treatment
  misc_feature: MA Experiment ID: 20000173 Result: Down-regulated in Transcription
  misc_feature: MA Experiment 20000173 PARAMETER Experiment Name: At_42deg_Heat_P Parameter: Age (day) Value: 14
  misc_feature: MA Experiment 20000173 PARAMETER Experiment Name: At_42deg_Heat_P Parameter: Organism Value: A. thaliana
  misc_feature: MA Experiment 20000173 PARAMETER Experiment Name: At_42deg_Heat_P Parameter: Plant Line Value: WS
  misc_feature: MA Experiment 20000173 PARAMETER Experiment Name: At_42deg_Heat_P Parameter: Temperature (deg C) Value: 42 vs. 22
  misc_feature: MA Experiment 20000173 PARAMETER Experiment Name: At_42deg_Heat_P Parameter: Timepoint (hr) Value: 6
  misc_feature: MA Experiment 20000173 PARAMETER Experiment Name: At_42deg_Heat_P Parameter: Tissue Value: Aerial
  misc_feature: MA Experiment ID: 20000185 Result: Down-regulated in Transcription
  misc_feature: MA Experiment 20000185 PARAMETER Experiment Name: At_Roots__P Parameter: Age (day) Value: 7 vs. 21
  misc_feature: MA Experiment 20000185 PARAMETER Experiment Name: At_Roots__P Parameter: Organism Value: A. thaliana
  misc_feature: MA Experiment 20000185 PARAMETER Experiment Name: At_Roots__P Parameter: Tissue Value: Roots vs. Whole Plant
  misc_feature: MA Experiment ID: 20000264 Result: Down-regulated in Transcription
  misc_feature: MA Experiment 20000264 PARAMETER Experiment Name: At_Open_Flower_P Parameter: Age (day) Value: 21
  misc_feature: MA Experiment 20000264 PARAMETER Experiment Name: At_Open_Flower_P Parameter: Plant Line Value: WS
  misc_feature: MA Experiment 20000264 PARAMETER Experiment Name: At_Open_Flower_P Parameter: Tissue Value: Open Flower vs. Whole Plant
  misc_feature: MA Experiment ID: 20000286 Result: Down-regulated in Transcription
  misc_feature: MA Experiment 20000286 PARAMETER Experiment Name: At_Open_Flower_P Parameter: Age (day) Value: 21
  misc_feature: MA Experiment 20000286 PARAMETER Experiment Name: At_Open_Flower_P Parameter: Plant Line Value: WS
  misc_feature: MA Experiment 20000286 PARAMETER Experiment Name: At_Open_Flower_P Parameter: Tissue Value: Half Open vs. Whole Plant
  misc_feature: MA Experiment ID: 20000437 Result: Down-regulated in Transcription
  misc_feature: MA Experiment 20000437 PARAMETER Experiment Name: At_Drought_P Parameter: Age (day) Value: 8
  misc_feature: MA Experiment 20000437 PARAMETER Experiment Name: At_Drought_P Parameter: Organism Value: A. thaliana
  misc_feature: MA Experiment 20000437 PARAMETER Experiment Name: At_Drought_P Parameter: Plant Line Value: WS
  misc_feature: MA Experiment 20000437 PARAMETER Experiment Name: At_Drought_P Parameter: Timepoint (hr) Value: 24
  misc_feature: MA Experiment 20000437 PARAMETER Experiment Name: At_Drought_P Parameter: Tissue Value: Whole Plant
  misc_feature: MA Experiment 20000437 PARAMETER Experiment Name: At_Drought_P Parameter: Treatment Value: Drought vs. No Drought
  misc_feature: MA Experiment ID: 20000439 Result: Down-regulated in Transcription
  misc_feature: MA Experiment 20000439 PARAMETER Experiment Name: At_Roots__P Parameter: Age (day) Value: 14 vs. 21
  misc_feature: MA Experiment 20000439 PARAMETER Experiment Name: At_Roots__P Parameter: Organism Value: A. thaliana
  misc_feature: MA Experiment 20000439 PARAMETER Experiment Name: At_Roots__P Parameter: Tissue Value: Roots vs. Whole Plant
  misc_feature: MA Experiment ID: 20000794 Result: Down-regulated in Transcription
  misc_feature: MA Experiment 20000794 PARAMETER Experiment Name: At_Petals_P Parameter: Age (day) Value: 23-25 days
  misc_feature: MA Experiment 20000794 PARAMETER Experiment Name: At_Petals_P Parameter: Plant Line Value: WS
  misc_feature: MA Experiment 20000794 PARAMETER Experiment Name: At_Petals_P Parameter: Tissue Value: Petals vs. Whole plant
  misc_feature: MA Experiment ID: 20001905 Result: Down-regulated in Transcription
  misc_feature: MA Experiment 20001905 PARAMETER Experiment Name: At_Drought_Reproduction_P Parameter: Age (day) Value: 40
  misc_feature: MA Experiment 20001905 PARAMETER Experiment Name: At_Drought_Reproduction_P Parameter: Organism Value: A. thaliana
  misc_feature: MA Experiment 20001905 PARAMETER Experiment Name: At_Drought_Reproduction_P Parameter: Plant Line Value: WS
  misc_feature: MA Experiment 20001905 PARAMETER Experiment Name: At_Drought_Reproduction_P Parameter: Timepoint (day) Value: 10
  misc_feature: MA Experiment 20001905 PARAMETER Experiment Name: At_Drought_Reproduction_P Parameter: Tissue Value: Rosettes
  misc_feature: MA Experiment 20001905 PARAMETER Experiment Name: At_Drought_Reproduction_P Parameter: Treatment Value: Drought vs. No Drought
  misc_feature: MA Experiment ID: 20001911 Result: Down-regulated in Transcription
  misc_feature: MA Experiment 20001911 PARAMETER Experiment Name: At_Drought_Reproduction_P Parameter: Age (day) Value: 40
  misc_feature: MA Experiment 20001911 PARAMETER Experiment Name: At_Drought_Reproduction_P Parameter: Organism Value: A. thaliana
  misc_feature: MA Experiment 20001911 PARAMETER Experiment Name: At_Drought_Reproduction_P Parameter: Plant Line Value: WS
  misc_feature: MA Experiment 20001911 PARAMETER Experiment Name: At_Drought_Reproduction_P Parameter: Timepoint (day) Value: 10
  misc_feature: MA Experiment 20001911 PARAMETER Experiment Name: At_Drought_Reproduction_P Parameter: Tissue Value: Flowers
  misc_feature: MA Experiment 20001911 PARAMETER Experiment Name: At_Drought_Reproduction_P Parameter: Treatment Value: Drought vs. No Drought

SEQ ID NO: 32733 - protein, 379 aa, Arabidopsis thaliana; identical to SEQ ID NO: 29143
  peptide (1)..(379): Ceres Seq. ID no. 13489990
  misc_feature (7)..(97): Pfam Name: Rpp14 family Pfam Description: Rpp14 family
  misc_feature (140)..(336): Homolog of NCBI NO: 32565879 NR Description: LiPoate Ligase (27.4 kD) (lpl-1) [Caenorhabditis
  misc_feature (151)..(358): Homolog of NCBI NO: 31203215 NR Description: ENSANGP00000017330 [Anopheles gambiae]
  misc_feature (150)..(363): Homolog of NCBI NO: 6685619 NR Description: Lipoate-protein ligase B (Lipoate biosynthesis
  misc_feature (153)..(358): Homolog of NCBI NO: 21355483 NR Description: CG9804-PA [Drosophila melanogaster]
  misc_feature (1)..(117): Homolog of NCBI NO: 38343977 NR Description: OSJNBa0041M21.1 [Oryza sativa (japonica
  misc_feature (138)..(361): Homolog of NCBI NO: 22971103 NR Description: hypothetical protein [Chloroflexus aurantiacus]
  misc_feature (1)..(152): Homolog of NCBI NO: 22329330 NR Description: Probable lipoate-protein ligase B -related
  misc_feature (145)..(379): Homolog of NCBI NO: 15219770 NR Description: lipoyltransferase [Arabidopsis thaliana]
  misc_feature (1)..(97): Homolog of NCBI NO: 3122357 NR Description: Probable lipoate-protein ligase (Lipoate
  misc_feature (144)..(379): Homolog of NCBI NO: 3122357 NR Description: Probable lipoate-protein ligase (Lipoate

SEQ ID NO: 32734 - protein, 371 aa, Arabidopsis thaliana; identical to SEQ ID NO: 29144
  peptide (1)..(371): Ceres Seq. ID no. 13489991
  misc_feature (1)..(89): Pfam Name: Rpp14 family Pfam Description: Rpp14 family
  misc_feature (132)..(328): Homolog of NCBI NO: 32565879 NR Description: LiPoate Ligase (27.4 kD) (lpl-1) [Caenorhabditis
  misc_feature (143)..(350): Homolog of NCBI NO: 31203215 NR Description: ENSANGP00000017330 [Anopheles gambiae]
  misc_feature (142)..(355): Homolog of NCBI NO: 6685619 NR Description: Lipoate-protein ligase B (Lipoate biosynthesis
  misc_feature (145)..(350): Homolog of NCBI NO: 21355483 NR Description: CG9804-PA [Drosophila melanogaster]
  misc_feature (1)..(109): Homolog of NCBI NO: 38343977 NR Description: OSJNBa0041M21.1 [Oryza sativa (japonica
  misc_feature (130)..(353): Homolog of NCBI NO: 22971103 NR Description: hypothetical protein [Chloroflexus aurantiacus]
  misc_feature (1)..(144): Homolog of NCBI NO: 22329330 NR Description: Probable lipoate-protein ligase B -related
  misc_feature (137)..(371): Homolog of NCBI NO: 15219770 NR Description: lipoyltransferase [Arabidopsis thaliana]
  misc_feature (1)..(89): Homolog of NCBI NO: 3122357 NR Description: Probable lipoate-protein ligase (Lipoate
  misc_feature (136)..(371): Homolog of NCBI NO: 3122357 NR Description: Probable lipoate-protein ligase (Lipoate

SEQ ID NO: 32735 - protein, 369 aa, Arabidopsis thaliana; identical to SEQ ID NO: 29145
  peptide (1)..(369): Ceres Seq. ID no. 13489992
  misc_feature (1)..(87): Pfam Name: Rpp14 family Pfam Description: Rpp14 family
  misc_feature (130)..(326): Homolog of NCBI NO: 32565879 NR Description: LiPoate Ligase (27.4 kD) (lpl-1) [Caenorhabditis
  misc_feature (141)..(348): Homolog of NCBI NO: 31203215 NR Description: ENSANGP00000017330 [Anopheles gambiae]
  misc_feature (140)..(353): Homolog of NCBI NO: 6685619 NR Description: Lipoate-protein ligase B (Lipoate biosynthesis
  misc_feature (143)..(348): Homolog of NCBI NO: 21355483 NR Description: CG9804-PA [Drosophila melanogaster]
  misc_feature (1)..(107): Homolog of NCBI NO: 38343977 NR Description: OSJNBa0041M21.1 [Oryza sativa (japonica
  misc_feature (128)..(351): Homolog of NCBI NO: 22971103 NR Description: hypothetical protein [Chloroflexus aurantiacus]
  misc_feature (1)..(142): Homolog of NCBI NO: 22329330 NR Description: Probable lipoate-protein ligase B -related
  misc_feature (135)..(369): Homolog of NCBI NO: 15219770 NR Description: lipoyltransferase [Arabidopsis thaliana]
  misc_feature (1)..(87): Homolog of NCBI NO: 3122357 NR Description: Probable lipoate-protein ligase (Lipoate
  misc_feature (134)..(369): Homolog of NCBI NO: 3122357 NR Description: Probable lipoate-protein ligase (Lipoate

SEQ ID NO: 32736 - DNA, 709 bp, Arabidopsis thaliana; identical to SEQ ID NO: 29146
  misc_feature (1)..(709): Ceres Seq. ID no. 12331898
  misc_feature: MA Experiment ID: 20000112 Result: Up-regulated in Transcription
  misc_feature: MA Experiment 20000112 PARAMETER Experiment Name: At_42deg_Heat_cDNA_P Parameter: Temperature (deg C) Value: 42 vs. 22
  misc_feature: MA Experiment 20000112 PARAMETER Experiment Name: At_42deg_Heat_cDNA_P Parameter: Timepoint (hr) Value: 2
  misc_feature: MA Experiment 20000112 PARAMETER Experiment Name: At_42deg_Heat_cDNA_P Parameter: Tissue Value: Aerial
  misc_feature: MA Experiment ID: 20001451 Result: Up-regulated in Transcription
  misc_feature: MA Experiment 20001451 PARAMETER Experiment Name: At_Far-red-induction_P Parameter: Age (day) Value: 7
  misc_feature: MA Experiment 20001451 PARAMETER Experiment Name: At_Far-red-induction_P Parameter: Light Value: Far-red vs. White
  misc_feature: MA Experiment 20001451 PARAMETER Experiment Name: At_Far-red-induction_P Parameter: Organism Value: A. thaliana
  misc_feature: MA Experiment 20001451 PARAMETER Experiment Name: At_Far-red-induction_P Parameter: Plant Line Value: Columbia
  misc_feature: MA Experiment 20001451 PARAMETER Experiment Name: At_Far-red-induction_P Parameter: Timepoint (hr) Value: 24
  misc_feature: MA Experiment 20001451 PARAMETER Experiment Name: At_Far-red-induction_P Parameter: Tissue Value: Whole Plant

SEQ ID NO: 32737 - protein, 93 aa, Arabidopsis thaliana; identical to SEQ ID NO: 29147
  peptide (1)..(93): Ceres Seq. ID no. 12331899
  misc_feature (1)..(74): Pfam Name: Clathrin adaptor complex small chain Pfam Description: Clathrin adaptor complex small chain
  misc_feature (1)..(73): Homolog of NCBI NO: 30983940 NR Description: clathrin coat assembly protein [Gossypium
  misc_feature (1)..(73): Homolog of NCBI NO: 17149110 NR Description: clathrin assembly protein AP17-like protein
  misc_feature (1)..(77): Homolog of NCBI NO: 21541959 NR Description: Adapter-related protein complex 1 sigma 1C (Sigma-adaptin 1C) (Adaptor protein complex AP-1 sigma-1C (Golgi adaptor HA1/AP1 adaptin sigma-1C subunit) (Clathrin
  misc_feature (1)..(41): Homolog of NCBI NO: 30690340 NR Description: clathrin assembly protein AP19 homolog
  misc_feature (1)..(88): Homolog of NCBI NO: 23480730 NR Description: clathrin assembly protein AP19, small subunit
  misc_feature (1)..(93): Homolog of NCBI NO: 34897116 NR Description: putative clathrin assembly protein [Oryza sativa]
  misc_feature (1)..(93): Homolog of NCBI NO: 1762309 NR Description: AP-1 Golgi-related complex component
  misc_feature (1)..(92): Homolog of NCBI NO: 15237005 NR Description: clathrin assembly protein AP19 homolog
  misc_feature (1)..(93): Homolog of NCBI NO: 2231698 NR Description: clathrin assembly protein AP19 [Arabidopsis
  misc_feature (1)..(93): Homolog of NCBI NO: 18398407 NR Description: clathrin assembly protein AP19, small subunit

SEQ ID NO: 32738 - protein, 71 aa, Arabidopsis thaliana; identical to SEQ ID NO: 29148
  peptide (1)..(71): Ceres Seq. ID no. 12331900
  misc_feature (1)..(65): Pfam Name: Clathrin adaptor complex small chain Pfam Description: Clathrin adaptor complex small chain
  misc_feature (1)..(65): Homolog of NCBI NO: 30983940 NR Description: clathrin coat assembly protein [Gossypium
  misc_feature (1)..(65): Homolog of NCBI NO: 17149110 NR Description: clathrin assembly protein AP17-like protein
  misc_feature (1)..(65): Homolog of NCBI NO: 21541959 NR Description: Adapter-related protein complex 1 sigma 1C (Sigma-adaptin 1C) (Adaptor protein complex AP-1 sigma-1C (Golgi adaptor HA1/AP1 adaptin sigma-1C subunit) (Clathrin
  misc_feature (1)..(65): Homolog of NCBI NO: 30690340 NR Description: clathrin assembly protein AP19 homolog
  misc_feature (1)..(68): Homolog of NCBI NO: 23480730 NR Description: clathrin assembly protein AP19, small subunit
  misc_feature (1)..(65): Homolog of NCBI NO: 34897116 NR Description: putative clathrin assembly protein [Oryza sativa]
  misc_feature (1)..(65): Homolog of NCBI NO: 1762309 NR Description: AP-1 Golgi-related complex component
  misc_feature (1)..(65): Homolog of NCBI NO: 15237005 NR Description: clathrin assembly protein AP19 homolog
  misc_feature (1)..(65): Homolog of NCBI NO: 2231698 NR Description: clathrin assembly protein AP19 [Arabidopsis
  misc_feature (1)..(65): Homolog of NCBI NO: 18398407 NR Description: clathrin assembly protein AP19, small subunit

SEQ ID NO: 32739 - protein, 100 aa, Arabidopsis thaliana; identical to SEQ ID NO: 29149
  peptide (1)..(100): Ceres Seq. ID no. 12331901
  misc_feature (1)..(81): Pfam Name: Clathrin adaptor complex small chain Pfam Description: Clathrin adaptor complex small chain
  misc_feature (3)..(80): Homolog of NCBI NO: 30983940 NR Description: clathrin coat assembly protein [Gossypium
  misc_feature (3)..(80): Homolog of NCBI NO: 17149110 NR Description: clathrin assembly protein AP17-like protein
  misc_feature (1)..(84): Homolog of NCBI NO: 21541959 NR Description: Adapter-related protein complex 1 sigma 1C (Sigma-adaptin 1C) (Adaptor protein complex AP-1 sigma-1C (Golgi adaptor HA1/AP1 adaptin sigma-1C subunit) (Clathrin
  misc_feature (1)..(48): Homolog of NCBI NO: 30690340 NR Description: clathrin assembly protein AP19 homolog
  misc_feature (4)..(95): Homolog of NCBI NO: 23480730 NR Description: clathrin assembly protein AP19, small subunit
  misc_feature (4)..(100): Homolog of NCBI NO: 34897116 NR Description: putative clathrin assembly protein [Oryza sativa]
  misc_feature (1)..(100): Homolog of NCBI NO: 1762309 NR Description: AP-1 Golgi-related complex component
  misc_feature (1)..(99): Homolog of NCBI NO: 15237005 NR Description: clathrin assembly protein AP19 homolog
  misc_feature (1)..(100): Homolog of NCBI NO: 2231698 NR Description: clathrin assembly protein AP19 [Arabidopsis
  misc_feature (1)..(100): Homolog of NCBI NO: 18398407 NR Description: clathrin assembly protein AP19, small subunit

SEQ ID NO: 32740 - DNA, 1087 bp, Arabidopsis thaliana; identical to SEQ ID NO: 29150
  misc_feature (1)..(1087): Ceres Seq. ID no. 12334939
  misc_feature: MA Experiment ID: 108573 Result: Up-regulated in Transcription
  misc_feature: MA Experiment 108573 PARAMETER Experiment Name: At_Drought_cDNA_P Parameter: Timepoint (hr) Value: 6
  misc_feature: MA Experiment 108573 PARAMETER Experiment Name: At_Drought_cDNA_P Parameter: Tissue Value: Aerial
  misc_feature: MA Experiment 108573 PARAMETER Experiment Name: At_Drought_cDNA_P Parameter: Treatment Value: Drought vs. No Drought
  misc_feature: MA Experiment ID: 108595 Result: Down-regulated in Transcription
  misc_feature: MA Experiment 108595 PARAMETER Experiment Name: At_Ler-pi_Ovule_cDNA_P Parameter: Plant Line Value: null
  misc_feature: MA Experiment ID: 108668 Result: Up-regulated in Transcription
  misc_feature: MA Experiment 108668 PARAMETER Experiment Name: At_2mM_SA_cDNA_P Parameter: Plant Line Value: WS
  misc_feature: MA Experiment 108668 PARAMETER Experiment Name: At_2mM_SA_cDNA_P Parameter: Timepoint (hr) Value: 6
  misc_feature: MA Experiment 108668 PARAMETER Experiment Name: At_2mM_SA_cDNA_P Parameter: Treatment Value: 2mM SA vs. No Treatment
  misc_feature: MA Experiment ID: 20000224 Result: Down-regulated in Transcription
  misc_feature: MA Experiment ID: 20000437 Result: Up-regulated in Transcription
  misc_feature: MA Experiment 20000437 PARAMETER Experiment Name: At_Drought_P Parameter: Age (day) Value: 8
  misc_feature: MA Experiment 20000437 PARAMETER Experiment Name: At_Drought_P Parameter: Organism Value: A. thaliana
  misc_feature: MA Experiment 20000437 PARAMETER Experiment Name: At_Drought_P Parameter: Plant Line Value: WS
  misc_feature: MA Experiment 20000437 PARAMETER Experiment Name: At_Drought_P Parameter: Timepoint (hr) Value: 24
  misc_feature: MA Experiment 20000437 PARAMETER Experiment Name: At_Drought_P Parameter: Tissue Value: Whole Plant
  misc_feature: MA Experiment 20000437 PARAMETER Experiment Name: At_Drought_P Parameter: Treatment Value: Drought vs. No Drought

SEQ ID NO: 32741 - protein, 236 aa, Arabidopsis thaliana; identical to SEQ ID NO: 29151
  peptide (1)..(236): Ceres Seq. ID no. 12334940
  misc_feature (91)..(233): Homolog of NCBI NO: 15228970 NR Description: hypothetical protein
  misc_feature (1)..(172): Homolog of NCBI NO: 30678287 NR Description: expressed protein [Arabidopsis thaliana]
  misc_feature (1)..(236): Homolog of NCBI NO: 25372617 NR Description: T6A9.7 protein - Arabidopsis thaliana
  misc_feature (1)..(236): Homolog of NCBI NO: 15235188 NR Description: PITSLRE protein kinase family

SEQ ID NO: 32742 - protein, 170 aa, Arabidopsis thaliana; identical to SEQ ID NO: 29152
  peptide (1)..(170): Ceres Seq. ID no. 12334941
  misc_feature (25)..(167): Homolog of NCBI NO: 15228970 NR Description: hypothetical protein
  misc_feature (1)..(106): Homolog of NCBI NO: 30678287 NR Description: expressed protein [Arabidopsis thaliana]
  misc_feature (1)..(170): Homolog of NCBI NO: 25372617 NR Description: T6A9.7 protein - Arabidopsis thaliana
  misc_feature (1)..(170): Homolog of NCBI NO: 15235188 NR Description: PITSLRE protein kinase family

SEQ ID NO: 32743 - protein, 152 aa, Arabidopsis thaliana; identical to SEQ ID NO: 29153
  peptide (1)..(152): Ceres Seq. ID no. 12334942
  misc_feature (7)..(149): Homolog of NCBI NO: 15228970 NR Description: hypothetical protein
  misc_feature (1)..(88): Homolog of NCBI NO: 30678287 NR Description: expressed protein [Arabidopsis thaliana]
  misc_feature (1)..(152): Homolog of NCBI NO: 25372617 NR Description: T6A9.7 protein - Arabidopsis thaliana
  misc_feature (1)..(152): Homolog of NCBI NO: 15235188 NR Description: PITSLRE protein kinase family

SEQ ID NO: 32744 - DNA, 1856 bp, Arabidopsis thaliana; identical to SEQ ID NO: 29154
  misc_feature (1)..(1856): Ceres Seq. ID no. 13490623
  misc_feature: MA Experiment ID: 108434 Result: Down-regulated in Transcription
  misc_feature: MA Experiment 108434 PARAMETER Experiment Name: At_Root_Tips_cDNA_P Parameter: Tissue Value: Root Tips
  misc_feature: MA Experiment ID: 108573 Result: Up-regulated in Transcription
  misc_feature: MA Experiment 108573 PARAMETER Experiment Name: At_Drought_cDNA_P Parameter: Timepoint (hr) Value: 6
  misc_feature: MA Experiment 108573 PARAMETER Experiment Name: At_Drought_cDNA_P Parameter: Tissue Value: Aerial
  misc_feature: MA Experiment 108573 PARAMETER Experiment Name: At_Drought_cDNA_P Parameter: Treatment Value: Drought vs. No Drought
  misc_feature: MA Experiment ID: 108585 Result: Up-regulated in Transcription
  misc_feature: MA Experiment 108585 PARAMETER Experiment Name: At_5mM_NaNP_cDNA_P Parameter: Timepoint (hr) Value: 6
  misc_feature: MA Experiment 108585 PARAMETER Experiment Name: At_5mM_NaNP_cDNA_P Parameter: Tissue Value: Aerial
  misc_feature: MA Experiment 108585 PARAMETER Experiment Name: At_5mM_NaNP_cDNA_P Parameter: Treatment Value: null
  misc_feature: MA Experiment ID: 108668 Result: Up-regulated in Transcription
  misc_feature: MA Experiment 108668 PARAMETER Experiment Name: At_2mM_SA_cDNA_P Parameter: Plant Line Value: WS
  misc_feature: MA Experiment 108668 PARAMETER Experiment Name: At_2mM_SA_cDNA_P Parameter: Timepoint (hr) Value: 6
  misc_feature: MA Experiment 108668 PARAMETER Experiment Name: At_2mM_SA_cDNA_P Parameter: Treatment Value: 2mM SA vs. No Treatment
  misc_feature: MA Experiment ID: 20000111 Result: Down-regulated in Transcription
  misc_feature: MA Experiment 20000111 PARAMETER Experiment Name: At_42deg_Heat_cDNA_P Parameter: Temperature (deg C) Value: 42 vs. 22
  misc_feature: MA Experiment 20000111 PARAMETER Experiment Name: At_42deg_Heat_cDNA_P Parameter: Timepoint (hr) Value: 6
  misc_feature: MA Experiment 20000111 PARAMETER Experiment Name: At_42deg_Heat_cDNA_P Parameter: Tissue Value: Aerial
  misc_feature: MA Experiment ID: 20000182 Result: Up-regulated in Transcription
  misc_feature: MA Experiment 20000182 PARAMETER Experiment Name: At_2mM_SA_P Parameter: Age (day) Value: 14
  misc_feature: MA Experiment 20000182 PARAMETER Experiment Name: At_2mM_SA_P Parameter: Organism Value: A. thaliana
  misc_feature: MA Experiment 20000182 PARAMETER Experiment Name: At_2mM_SA_P Parameter: Plant Line Value: WS
  misc_feature: MA Experiment 20000182 PARAMETER Experiment Name: At_2mM_SA_P Parameter: Timepoint (hr) Value: 6
  misc_feature: MA Experiment 20000182 PARAMETER Experiment Name: At_2mM_SA_P Parameter: Tissue Value: Aerial
  misc_feature: MA Experiment 20000182 PARAMETER Experiment Name: At_2mM_SA_P Parameter: Treatment Value: 2mM SA vs. No Treatment
  misc_feature: MA Experiment ID: 20000227 Result: Down-regulated in Transcription
  misc_feature: MA Experiment 20000227 PARAMETER Experiment Name: At_Root-Tips-vs-Tops_P Parameter: Tissue Value: Root Tips vs. Root Tops
  misc_feature: MA Experiment ID: 20000265 Result: Down-regulated in Transcription
  misc_feature: MA Experiment 20000265 PARAMETER Experiment Name: At_Open_Flower_P Parameter: Age (day) Value: 21
  misc_feature: MA Experiment 20000265 PARAMETER Experiment Name: At_Open_Flower_P Parameter: Plant Line Value: WS
  misc_feature: MA Experiment 20000265 PARAMETER Experiment Name: At_Open_Flower_P Parameter: Tissue Value: Closed Flower vs. Whole Plant
  misc_feature: MA Experiment ID: 20000286 Result: Down-regulated in Transcription
  misc_feature: MA Experiment 20000286 PARAMETER Experiment Name: At_Open_Flower_P Parameter: Age (day) Value: 21
  misc_feature: MA Experiment 20000286 PARAMETER Experiment Name: At_Open_Flower_P Parameter: Plant Line Value: WS
  misc_feature: MA Experiment 20000286 PARAMETER Experiment Name: At_Open_Flower_P Parameter: Tissue Value: Half Open vs. Whole Plant
  misc_feature: MA Experiment ID: 20000495 Result: Down-regulated in Transcription
  misc_feature: MA Experiment 20000495 PARAMETER Experiment Name: At_Guard_Cells_P Parameter: Harvest Date Value: 8/2/2002
  misc_feature: MA Experiment 20000495 PARAMETER Experiment Name: At_Guard_Cells_P Parameter: Organism Value: A. thaliana
  misc_feature: MA Experiment 20000495 PARAMETER Experiment Name: At_Guard_Cells_P Parameter: Tissue Value: Guard Cells vs. Leaves
  misc_feature: MA Experiment ID: 20001905 Result: Up-regulated in Transcription
  misc_feature: MA Experiment 20001905 PARAMETER Experiment Name: At_Drought_Reproduction_P Parameter: Age (day) Value: 40
  misc_feature: MA Experiment 20001905 PARAMETER Experiment Name: At_Drought_Reproduction_P Parameter: Organism Value: A. thaliana
  misc_feature: MA Experiment 20001905 PARAMETER Experiment Name: At_Drought_Reproduction_P Parameter: Plant Line Value: WS
  misc_feature: MA Experiment 20001905 PARAMETER Experiment Name: At_Drought_Reproduction_P Parameter: Timepoint (day) Value: 10
  misc_feature: MA Experiment 20001905 PARAMETER Experiment Name: At_Drought_Reproduction_P Parameter: Tissue Value: Rosettes
  misc_feature: MA Experiment 20001905 PARAMETER Experiment Name: At_Drought_Reproduction_P Parameter: Treatment Value: Drought vs. No Drought

SEQ ID NO: 32745 - protein, 414 aa, Arabidopsis thaliana; identical to SEQ ID NO: 29155
  peptide (1)..(414): Ceres Seq. ID no. 13490624
  misc_feature (74)..(398): Homolog of NCBI NO: 30699159 NR Description: protein kinase, putative [Arabidopsis thaliana]
  misc_feature (31)..(371): Homolog of NCBI NO: 34906046 NR Description: putative serine/threonine-specific protein kinase
  misc_feature (62)..(398): Homolog of NCBI NO: 25287650 NR Description: hypothetical protein F15M4.14 [imported] -
  misc_feature (1)..(397): Homolog of NCBI NO: 30690422 NR Description: protein kinase family [Arabidopsis thaliana]
  misc_feature (1)..(397): Homolog of NCBI NO: 25287611 NR Description: protein kinase-like protein [imported] -
  misc_feature (38)..(398): Homolog of NCBI NO: 20503002 NR Description: Putative protein kinase [Oryza sativa (japonica
  misc_feature (7)..(407): Homolog of NCBI NO: 38345396 NR Description: OSJNBa0017B10.2 [Oryza sativa (japonica
  misc_feature (1)..(414): Homolog of NCBI NO: 21537344 NR Description: putative protein kinase [Arabidopsis thaliana]
  misc_feature (1)..(414): Homolog of NCBI NO: 25287605 NR Description: probable protein kinase [imported] - Arabidopsis
  misc_feature (1)..(414): Homolog of NCBI NO: 18398350 NR Description: protein kinase -related [Arabidopsis thaliana]

SEQ ID NO: 32746 - protein, 244 aa, Arabidopsis thaliana; identical to SEQ ID NO: 29156
  peptide (1)..(244): Ceres Seq. ID no. 13490625
  misc_feature (1)..(228): Homolog of NCBI NO: 30699159 NR Description: protein kinase, putative [Arabidopsis thaliana]
  misc_feature (1)..(201): Homolog of NCBI NO: 34906046 NR Description: putative serine/threonine-specific protein kinase
  misc_feature (1)..(228): Homolog of NCBI NO: 25287650 NR Description: hypothetical protein F15M4.14 [imported] -
  misc_feature (1)..(227): Homolog of NCBI NO: 30690422 NR Description: protein kinase family [Arabidopsis thaliana]
  misc_feature (1)..(227): Homolog of NCBI NO: 25287611 NR Description: protein kinase-like protein [imported] -
  misc_feature (1)..(228): Homolog of NCBI NO: 20503002 NR Description: Putative protein kinase [Oryza sativa (japonica
  misc_feature (1)..(237): Homolog of NCBI NO: 38345396 NR Description: OSJNBa0017B10.2 [Oryza sativa (japonica
  misc_feature (1)..(244): Homolog of NCBI NO: 21537344 NR Description: putative protein kinase [Arabidopsis thaliana]
  misc_feature (1)..(244): Homolog of NCBI NO: 25287605 NR Description: probable protein kinase [imported] - Arabidopsis
  misc_feature (1)..(244): Homolog of NCBI NO: 18398350 NR Description: protein kinase -related [Arabidopsis thaliana]

SEQ ID NO: 32747 - DNA, 2034 bp, Arabidopsis thaliana; identical to SEQ ID NO: 29157
  misc_feature (1)..(2034): Ceres Seq. ID no. 12324566
  misc_feature: MA Experiment ID: 108434 Result: Up-regulated in Transcription
  misc_feature: MA Experiment 108434 PARAMETER Experiment Name: At_Root_Tips_cDNA_P Parameter: Tissue Value: Root Tips
  misc_feature: MA Experiment ID: 108462 Result: Down-regulated in Transcription
  misc_feature: MA Experiment 108462 PARAMETER Experiment Name: At_Germinating_Seeds_cDNA_P Parameter: Age (day) Value: 2 vs. 0
  misc_feature: MA Experiment 108462 PARAMETER Experiment Name: At_Germinating_Seeds_cDNA_P Parameter: Tissue Value: Germinating Seeds
  misc_feature: MA Experiment ID: 108463 Result: Down-regulated in Transcription
  misc_feature: MA Experiment 108463 PARAMETER Experiment Name: At_Germinating_Seeds_cDNA_P Parameter: Age (day) Value: 3 vs. 0
  misc_feature: MA Experiment 108463 PARAMETER Experiment Name: At_Germinating_Seeds_cDNA_P Parameter: Tissue Value: Germinating Seeds
  misc_feature: MA Experiment ID: 108464 Result: Down-regulated in Transcription
  misc_feature: MA Experiment 108464 PARAMETER Experiment Name: At_Germinating_Seeds_cDNA_P Parameter: Age (day) Value: 4 vs. 0
  misc_feature: MA Experiment 108464 PARAMETER Experiment Name: At_Germinating_Seeds_cDNA_P Parameter: Tissue Value: Germinating Seeds
  misc_feature: MA Experiment ID: 108569 Result: Up-regulated in Transcription
  misc_feature: MA Experiment 108569 PARAMETER Experiment Name: At_0.001%_MeJA__cDNA_P Parameter: Timepoint (hr) Value: 6
  misc_feature: MA Experiment 108569 PARAMETER Experiment Name: At_0.001%_MeJA__cDNA_P Parameter: Tissue Value: Aerial
  misc_feature: MA Experiment 108569 PARAMETER Experiment Name: At_0.001%_MeJA__cDNA_P Parameter: Treatment Value: 0.001% MeJA vs. No Treatment
  misc_feature: MA Experiment ID: 108577 Result: Down-regulated in Transcription
  misc_feature: MA Experiment 108577 PARAMETER Experiment Name: At_42deg_Heat_cDNA_P Parameter: Temperature (deg C) Value: 42 vs. 22
  misc_feature: MA Experiment 108577 PARAMETER Experiment Name: At_42deg_Heat_cDNA_P Parameter: Timepoint (hr) Value: 6
  misc_feature: MA Experiment 108577 PARAMETER Experiment Name: At_42deg_Heat_cDNA_P Parameter: Tissue Value: Aerial
  misc_feature: MA Experiment ID: 108595 Result: Down-regulated in Transcription
  misc_feature: MA Experiment 108595 PARAMETER Experiment Name: At_Ler-pi_Ovule_cDNA_P Parameter: Plant Line Value: null
  misc_feature: MA Experiment ID: 108607 Result: Down-regulated in Transcription
  misc_feature: MA Experiment 108607 PARAMETER Experiment Name: At_100uM_ABA_cDNA_P Parameter: Timepoint (hr) Value: 4
  misc_feature: MA Experiment 108607 PARAMETER Experiment Name: At_100uM_ABA_cDNA_P Parameter: Tissue Value: Aerial
  misc_feature: MA Experiment 108607 PARAMETER Experiment Name: At_100uM_ABA_cDNA_P Parameter: Treatment Value: 100uM ABA vs. No Treatment
  misc_feature: MA Experiment ID: 108608 Result: Down-regulated in Transcription
  misc_feature: MA Experiment 108608 PARAMETER Experiment Name: At_100uM_ABA_cDNA_P Parameter: Timepoint (hr) Value: 1
  misc_feature: MA Experiment 108608 PARAMETER Experiment Name: At_100uM_ABA_cDNA_P Parameter: Tissue Value: Aerial
  misc_feature: MA Experiment 108608 PARAMETER Experiment Name: At_100uM_ABA_cDNA_P Parameter: Treatment Value: 100uM ABA vs. No Treatment
  misc_feature: MA Experiment ID: 20000072 Result: Up-regulated in Transcription
  misc_feature: MA Experiment 20000072 PARAMETER Experiment Name: At_100uM_ABA_Mutants_cDNA_P Parameter: Plant Line Value: CS8105
  misc_feature: MA Experiment 20000072 PARAMETER Experiment Name: At_100uM_ABA_Mutants_cDNA_P Parameter: Timepoint (hr) Value: 6
  misc_feature: MA Experiment 20000072 PARAMETER Experiment Name: At_100uM_ABA_Mutants_cDNA_P Parameter: Tissue Value: Aerial
  misc_feature: MA Experiment 20000072 PARAMETER Experiment Name: At_100uM_ABA_Mutants_cDNA_P Parameter: Treatment Value: 100uM ABA vs. No Treatment
  misc_feature: MA Experiment ID: 20000088 Result: Up-regulated in Transcription
  misc_feature: MA Experiment 20000088 PARAMETER Experiment Name: At_100uM_ABA_Mutants_cDNA_P Parameter: Plant Line Value: Landsberg
  misc_feature: MA Experiment 20000088 PARAMETER Experiment Name: At_100uM_ABA_Mutants_cDNA_P Parameter: Timepoint (hr) Value: 6
  misc_feature: MA Experiment 20000088 PARAMETER Experiment Name: At_100uM_ABA_Mutants_cDNA_P Parameter: Tissue Value: Aerial
  misc_feature: MA Experiment 20000088 PARAMETER Experiment Name: At_100uM_ABA_Mutants_cDNA_P Parameter: Treatment Value: 100uM ABA vs. No Treatment
  misc_feature: MA Experiment ID: 20000089 Result: Up-regulated in Transcription
  misc_feature: MA Experiment ID: 20000090 Result: Up-regulated in Transcription
  misc_feature: MA Experiment ID: 20000111 Result: Down-regulated in Transcription
  misc_feature: MA Experiment 20000111 PARAMETER Experiment Name: At_42deg_Heat_cDNA_P Parameter: Temperature (deg C) Value: 42 vs. 22
  misc_feature: MA Experiment 20000111 PARAMETER Experiment Name: At_42deg_Heat_cDNA_P Parameter: Timepoint (hr) Value: 6
  misc_feature: MA Experiment 20000111 PARAMETER Experiment Name: At_42deg_Heat_cDNA_P Parameter: Tissue Value: Aerial
  misc_feature: MA Experiment ID: 20000112 Result: Down-regulated in Transcription
  misc_feature: MA Experiment 20000112 PARAMETER Experiment Name: At_42deg_Heat_cDNA_P Parameter: Temperature (deg C) Value: 42 vs. 22
  misc_feature: MA Experiment 20000112 PARAMETER Experiment Name: At_42deg_Heat_cDNA_P Parameter: Timepoint (hr) Value: 2
  misc_feature: MA Experiment 20000112 PARAMETER Experiment Name: At_42deg_Heat_cDNA_P Parameter: Tissue Value: Aerial
  misc_feature: MA Experiment ID: 20000113 Result: Down-regulated in Transcription
  misc_feature: MA Experiment 20000113 PARAMETER Experiment Name: At_42deg_Heat_cDNA_P Parameter: Temperature (deg C) Value: 42 vs. 22
  misc_feature: MA Experiment 20000113 PARAMETER Experiment Name: At_42deg_Heat_cDNA_P Parameter: Timepoint (hr) Value: 8
  misc_feature: MA Experiment 20000113 PARAMETER Experiment Name: At_42deg_Heat_cDNA_P Parameter: Tissue Value: Aerial
  misc_feature: MA Experiment ID: 20000144 Result: Down-regulated in Transcription
  misc_feature: MA Experiment 20000144 PARAMETER Experiment Name: At_42deg_Heat_cDNA_P Parameter: Temperature (deg C) Value: 42 vs. 22
  misc_feature: MA Experiment 20000144 PARAMETER Experiment Name: At_42deg_Heat_cDNA_P Parameter: Timepoint (hr) Value: 1
  misc_feature: MA Experiment 20000144 PARAMETER Experiment Name: At_42deg_Heat_cDNA_P Parameter: Tissue Value: Aerial
  misc_feature: MA Experiment ID: 20000268 Result: Down-regulated in Transcription
  misc_feature: MA Experiment 20000268 PARAMETER Experiment Name: At_100mM_NaCl__P Parameter: Age (day) Value: 14
  misc_feature: MA Experiment 20000268 PARAMETER Experiment Name: At_100mM_NaCl__P Parameter: Organism Value: A. thaliana
  misc_feature: MA Experiment 20000268 PARAMETER Experiment Name: At_100mM_NaCl__P Parameter: Plant Line Value: WS
  misc_feature: MA Experiment 20000268 PARAMETER Experiment Name: At_100mM_NaCl__P Parameter: Timepoint (hr) Value: 6
  misc_feature: MA Experiment 20000268 PARAMETER Experiment Name: At_100mM_NaCl__P Parameter: Tissue Value: Whole Plant
  misc_feature: MA Experiment 20000268 PARAMETER Experiment Name: At_100mM_NaCl__P Parameter: Treatment Value: 100mM NaCl vs. No Treatment
  misc_feature: MA Experiment ID: 20000436 Result: Down-regulated in Transcription
  misc_feature: MA Experiment 20000436 PARAMETER Experiment Name: At_Drought_P Parameter: Age (day) Value: 7
  misc_feature: MA Experiment 20000436 PARAMETER Experiment Name: At_Drought_P Parameter: Organism Value: A. thaliana
  misc_feature: MA Experiment 20000436 PARAMETER Experiment Name: At_Drought_P Parameter: Plant Line Value: WS
  misc_feature: MA Experiment 20000436 PARAMETER Experiment Name: At_Drought_P Parameter: Timepoint (hr) Value: 12
  misc_feature: MA Experiment 20000436 PARAMETER Experiment Name: At_Drought_P Parameter: Tissue Value: Whole Plant
  misc_feature: MA Experiment 20000436 PARAMETER Experiment Name: At_Drought_P Parameter: Treatment Value: Drought vs. No Drought
  misc_feature: MA Experiment ID: 20000437 Result: Down-regulated in Transcription
  misc_feature: MA Experiment 20000437 PARAMETER Experiment Name: At_Drought_P Parameter: Age (day) Value: 8
  misc_feature: MA Experiment 20000437 PARAMETER Experiment Name: At_Drought_P Parameter: Organism Value: A. thaliana
  misc_feature: MA Experiment 20000437 PARAMETER Experiment Name: At_Drought_P Parameter: Plant Line Value: WS
  misc_feature: MA Experiment 20000437 PARAMETER Experiment Name: At_Drought_P Parameter: Timepoint (hr) Value: 24
  misc_feature: MA Experiment 20000437 PARAMETER Experiment Name: At_Drought_P Parameter: Tissue Value: Whole Plant
  misc_feature: MA Experiment 20000437 PARAMETER Experiment Name: At_Drought_P Parameter: Treatment Value: Drought vs. No Drought
  misc_feature: MA Experiment ID: 20000438 Result: Down-regulated in Transcription
  misc_feature: MA Experiment 20000438 PARAMETER Experiment Name: At_Shoots__P Parameter: Age (day) Value: 14
  misc_feature: MA Experiment 20000438 PARAMETER Experiment Name: At_Shoots__P Parameter: Tissue Value: Shoots vs. Whole Plant
  misc_feature: MA Experiment ID: 20000455 Result: Down-regulated in Transcription
  misc_feature: MA Experiment 20000455 PARAMETER Experiment Name: At_100uM_ABA_P Parameter: Age (day) Value: 16
  misc_feature: MA Experiment 20000455 PARAMETER Experiment Name: At_100uM_ABA_P Parameter: Organism Value: A. thaliana
  misc_feature: MA Experiment 20000455 PARAMETER Experiment Name: At_100uM_ABA_P Parameter: Plant Line Value: WS
  misc_feature: MA Experiment 20000455 PARAMETER Experiment Name: At_100uM_ABA_P Parameter: Timepoint (hr) Value: 48
  misc_feature: MA Experiment 20000455 PARAMETER Experiment Name: At_100uM_ABA_P Parameter: Tissue Value: Aerial
  misc_feature: MA Experiment 20000455 PARAMETER Experiment Name: At_100uM_ABA_P Parameter: Treatment Value: 100uM ABA vs. No Treatment
  misc_feature: MA Experiment ID: 20000527 Result: Down-regulated in Transcription
  misc_feature: MA Experiment 20000527 PARAMETER Experiment Name: At_10percent_PEG_P Parameter: Age (day) Value: 20
  misc_feature: MA Experiment 20000527 PARAMETER Experiment Name: At_10percent_PEG_P Parameter: Organism Value: A. thaliana
  misc_feature: MA Experiment 20000527 PARAMETER Experiment Name: At_10percent_PEG_P Parameter: Plant Line Value: WS
  misc_feature: MA Experiment 20000527 PARAMETER Experiment Name: At_10percent_PEG_P Parameter: Timepoint (day) Value: 20
  misc_feature: MA Experiment 20000527 PARAMETER Experiment Name: At_10percent_PEG_P Parameter: Tissue Value: Whole Plant
  misc_feature: MA Experiment 20000527 PARAMETER Experiment Name: At_10percent_PEG_P Parameter: Treatment Value: 10percent PEG vs. No Treatment
  misc_feature: MA Experiment ID: 20001248 Result: Up-regulated in Transcription
  misc_feature: MA Experiment 20001248 PARAMETER Experiment Name: At_Far-red-induction_P Parameter: Age (day) Value: 7
  misc_feature: MA Experiment 20001248 PARAMETER Experiment Name: At_Far-red-induction_P Parameter: Light Value: Far-red vs. White
  misc_feature: MA Experiment 20001248 PARAMETER Experiment Name: At_Far-red-induction_P Parameter: Organism Value: A. thaliana
  misc_feature: MA Experiment 20001248 PARAMETER Experiment Name: At_Far-red-induction_P Parameter: Plant Line Value: Columbia
  misc_feature: MA Experiment 20001248 PARAMETER Experiment Name: At_Far-red-induction_P Parameter: Timepoint (hr) Value: 4
  misc_feature: MA Experiment 20001248 PARAMETER Experiment Name: At_Far-red-induction_P Parameter: Tissue Value: Whole Plant
  misc_feature: MA Experiment ID: 20001905 Result: Down-regulated in Transcription
  misc_feature: MA Experiment 20001905 PARAMETER Experiment Name: At_Drought_Reproduction_P Parameter: Age (day) Value: 40
  misc_feature: MA Experiment 20001905 PARAMETER Experiment Name: At_Drought_Reproduction_P Parameter: Organism Value: A. thaliana
  misc_feature: MA Experiment 20001905 PARAMETER Experiment Name: At_Drought_Reproduction_P Parameter: Plant Line Value: WS
  misc_feature: MA Experiment 20001905 PARAMETER Experiment Name: At_Drought_Reproduction_P Parameter: Timepoint (day) Value: 10
  misc_feature: MA Experiment 20001905 PARAMETER Experiment Name: At_Drought_Reproduction_P Parameter: Tissue Value: Rosettes
  misc_feature: MA Experiment 20001905 PARAMETER Experiment Name: At_Drought_Reproduction_P Parameter: Treatment Value: Drought vs. No Drought
  misc_feature: MA Experiment ID: 20001906 Result: Down-regulated in Transcription
  misc_feature: MA Experiment 20001906 PARAMETER Experiment Name: At_Drought_Reproduction_P Parameter: Age (day) Value: 35
  misc_feature: MA Experiment 20001906 PARAMETER Experiment Name: At_Drought_Reproduction_P Parameter: Organism Value: A. thaliana
  misc_feature: MA Experiment 20001906 PARAMETER Experiment Name: At_Drought_Reproduction_P Parameter: Plant Line Value: WS
  misc_feature: MA Experiment 20001906 PARAMETER Experiment Name: At_Drought_Reproduction_P Parameter: Timepoint (day) Value: 5
  misc_feature: MA Experiment 20001906 PARAMETER Experiment Name: At_Drought_Reproduction_P Parameter: Tissue Value: Siliques
  misc_feature: MA Experiment 20001906 PARAMETER Experiment Name: At_Drought_Reproduction_P Parameter: Treatment Value: Drought vs. No Drought
  misc_feature: MA Experiment ID: 20001908 Result: Down-regulated in Transcription
  misc_feature: MA Experiment 20001908 PARAMETER Experiment Name: At_Drought_Reproduction_P Parameter: Age (day) Value: 40
  misc_feature: MA Experiment 20001908 PARAMETER Experiment Name: At_Drought_Reproduction_P Parameter: Organism Value: A. thaliana
  misc_feature: MA Experiment 20001908 PARAMETER Experiment Name: At_Drought_Reproduction_P Parameter: Plant Line Value: WS
  misc_feature: MA Experiment 20001908 PARAMETER Experiment Name: At_Drought_Reproduction_P Parameter: Timepoint (day) Value: 10
  misc_feature: MA Experiment 20001908 PARAMETER Experiment Name: At_Drought_Reproduction_P Parameter: Tissue Value: Siliques
  misc_feature: MA Experiment 20001908 PARAMETER Experiment Name: At_Drought_Reproduction_P Parameter: Treatment Value: Drought vs. No Drought
  misc_feature: MA Experiment ID: 20001911 Result: Down-regulated in Transcription
  misc_feature: MA Experiment 20001911 PARAMETER Experiment Name: At_Drought_Reproduction_P Parameter: Age (day) Value: 40
  misc_feature: MA Experiment 20001911 PARAMETER Experiment Name: At_Drought_Reproduction_P Parameter: Organism Value: A. thaliana
  misc_feature: MA Experiment 20001911 PARAMETER Experiment Name: At_Drought_Reproduction_P Parameter: Plant Line Value: WS
  misc_feature: MA Experiment 20001911 PARAMETER Experiment Name: At_Drought_Reproduction_P Parameter: Timepoint (day) Value: 10
  misc_feature: MA Experiment 20001911 PARAMETER Experiment Name: At_Drought_Reproduction_P Parameter: Tissue Value: Flowers
  misc_feature: MA Experiment 20001911 PARAMETER Experiment Name: At_Drought_Reproduction_P Parameter: Treatment Value: Drought vs. No Drought

SEQ ID NO: 32748 - protein, 592 aa, Arabidopsis thaliana; identical to SEQ ID NO: 29158
  peptide (1)..(592): Ceres Seq. ID no. 12324567
  misc_feature (281)..(578): Pfam Name: Pectinesterase Pfam Description: Pectinesterase
  misc_feature (1)..(592): Homolog of NCBI NO: 24250746 NR Description: putative thermostable pectinesterase [Citrus
  misc_feature (29)..(223): Homolog of NCBI NO: 10441573 NR Description: putative pectin methylesterase 3 [Linum
  misc_feature (245)..(592): Homolog of NCBI NO: 10441573 NR Description: putative pectin methylesterase 3 [Linum
  misc_feature (205)..(592): Homolog of NCBI NO: 16604545 NR Description: AT3g14310/MLN21_9 [Arabidopsis thaliana]
  misc_feature (15)..(242): Homolog of NCBI NO: 9716271 NR Description: putative pectin methylesterase
  misc_feature (229)..(592): Homolog of NCBI NO: 9716271 NR Description: putative pectin methylesterase
  misc_feature (7)..(592): Homolog of NCBI NO: 2129667 NR Description: pectinesterase (EC 3.1.1.11) 2 precursor -
  misc_feature (1)..(592): Homolog of NCBI NO: 15220955 NR Description: pectin methylesterase (PMEU1), putative
  misc_feature (1)..(592): Homolog of NCBI NO: 2895510 NR Description: putative pectin methylesterase [Arabidopsis
  misc_feature (1)..(592): Homolog of NCBI NO: 15231828 NR Description: putative pectin methylesterase

SEQ ID NO: 32749 - protein, 588 aa, Arabidopsis thaliana; identical to SEQ ID NO: 29159
  peptide (1)..(588): Ceres Seq. ID no. 12324568
  misc_feature (277)..(574): Pfam Name: Pectinesterase Pfam Description: Pectinesterase
  misc_feature (1)..(588): Homolog of NCBI NO: 24250746 NR Description: putative thermostable pectinesterase [Citrus
  misc_feature (25)..(219): Homolog of NCBI NO: 10441573 NR Description: putative pectin methylesterase 3 [Linum
  misc_feature (241)..(588): Homolog of NCBI NO: 10441573 NR Description: putative pectin methylesterase 3 [Linum
  misc_feature (201)..(588): Homolog of NCBI NO: 16604545 NR Description: AT3g14310/MLN21_9 [Arabidopsis thaliana]
  misc_feature (11)..(238): Homolog of NCBI NO: 9716271 NR Description: putative pectin methylesterase
  misc_feature (225)..(588): Homolog of NCBI NO: 9716271 NR Description: putative pectin methylesterase
  misc_feature (3)..(588): Homolog of NCBI NO: 2129667 NR Description: pectinesterase (EC 3.1.1.11) 2 precursor -
  misc_feature (1)..(588): Homolog of NCBI NO: 15220955 NR Description: pectin methylesterase (PMEU1), putative
  misc_feature (1)..(588): Homolog of NCBI NO: 2895510 NR Description: putative pectin methylesterase [Arabidopsis
  misc_feature (1)..(588): Homolog of NCBI NO: 15231828 NR Description: putative pectin methylesterase

SEQ ID NO: 32750 - protein, 388 aa, Arabidopsis thaliana; identical to SEQ ID NO: 29160
  peptide (1)..(388): Ceres Seq. ID no. 12324569
  misc_feature (77)..(374): Pfam Name: Pectinesterase Pfam Description: Pectinesterase
  misc_feature (1)..(388): Homolog of NCBI NO: 24250746 NR Description: putative thermostable pectinesterase [Citrus
  misc_feature (1)..(19): Homolog of NCBI NO: 10441573 NR Description: putative pectin methylesterase 3 [Linum
  misc_feature (41)..(388): Homolog of NCBI NO: 10441573 NR Description: putative pectin methylesterase 3 [Linum
  misc_feature (1)..(388): Homolog of NCBI NO: 16604545 NR Description: AT3g14310/MLN21_9 [Arabidopsis thaliana]
  misc_feature (1)..(38): Homolog of NCBI NO: 9716271 NR Description: putative pectin methylesterase
  misc_feature (25)..(388): Homolog of NCBI NO: 9716271 NR Description: putative pectin methylesterase
  misc_feature (1)..(388): Homolog of NCBI NO: 2129667 NR Description: pectinesterase (EC 3.1.1.11) 2 precursor -
  misc_feature (1)..(388): Homolog of NCBI NO: 15220955 NR Description: pectin methylesterase (PMEU1), putative
  misc_feature (1)..(388): Homolog of NCBI NO: 2895510 NR Description: putative pectin methylesterase [Arabidopsis
  misc_feature (1)..(388): Homolog of NCBI NO: 15231828 NR Description: putative pectin methylesterase

SEQ ID NO: 32751 - DNA, 1203 bp, Arabidopsis thaliana; identical to SEQ ID NO: 29161
  misc_feature (1)..(1203): Ceres Seq. ID no. 12334431
  misc_feature: MA Experiment ID: 108462 Result: Down-regulated in Transcription
  misc_feature: MA Experiment 108462 PARAMETER Experiment Name: At_Germinating_Seeds_cDNA_P Parameter: Age (day) Value: 2 vs. 0
  misc_feature: MA Experiment 108462 PARAMETER Experiment Name: At_Germinating_Seeds_cDNA_P Parameter: Tissue Value: Germinating Seeds
  misc_feature: MA Experiment ID: 108463 Result: Down-regulated in Transcription
  misc_feature: MA Experiment 108463 PARAMETER Experiment Name: At_Germinating_Seeds_cDNA_P Parameter: Age (day) Value: 3 vs. 0
  misc_feature: MA Experiment 108463 PARAMETER Experiment Name: At_Germinating_Seeds_cDNA_P Parameter: Tissue Value: Germinating Seeds
  misc_feature: MA Experiment ID: 108464 Result: Down-regulated in Transcription
  misc_feature: MA Experiment 108464 PARAMETER Experiment Name: At_Germinating_Seeds_cDNA_P Parameter: Age (day) Value: 4 vs. 0
  misc_feature: MA Experiment 108464 PARAMETER Experiment Name: At_Germinating_Seeds_cDNA_P Parameter: Tissue Value: Germinating Seeds
  misc_feature: MA Experiment ID: 108576 Result: Down-regulated in Transcription
  misc_feature: MA Experiment 108576 PARAMETER Experiment Name: At_42deg_Heat_cDNA_P Parameter: Temperature (deg C) Value: 42 vs. 22
  misc_feature: MA Experiment 108576 PARAMETER Experiment Name: At_42deg_Heat_cDNA_P Parameter: Timepoint (hr) Value: 1
  misc_feature: MA Experiment 108576 PARAMETER Experiment Name: At_42deg_Heat_cDNA_P Parameter: Tissue Value: Aerial
  misc_feature: MA Experiment ID: 108595 Result: Down-regulated in Transcription
  misc_feature: MA Experiment 108595 PARAMETER Experiment Name: At_Ler-pi_Ovule_cDNA_P Parameter: Plant Line Value: null
  misc_feature: MA Experiment ID: 20000184 Result: Up-regulated in Transcription
  misc_feature: MA Experiment 20000184 PARAMETER Experiment Name: At_Shoots__P Parameter: Age (day) Value: 7
  misc_feature: MA Experiment 20000184 PARAMETER Experiment Name: At_Shoots__P Parameter: Tissue Value: Shoots vs. Whole Plant
  misc_feature: MA Experiment ID: 20000185 Result: Down-regulated in Transcription
  misc_feature: MA Experiment 20000185 PARAMETER Experiment Name: At_Roots__P Parameter: Age (day) Value: 7 vs. 21
  misc_feature: MA Experiment 20000185 PARAMETER Experiment Name: At_Roots__P Parameter: Organism Value: A. thaliana
  misc_feature: MA Experiment 20000185 PARAMETER Experiment Name: At_Roots__P Parameter: Tissue Value: Roots vs. Whole Plant
  misc_feature: MA Experiment ID: 20000234 Result: Down-regulated in Transcription
  misc_feature: MA Experiment 20000234 PARAMETER Experiment Name: At_Siliques_P Parameter: Age (day) Value: 21
  misc_feature: MA Experiment 20000234 PARAMETER Experiment Name: At_Siliques_P Parameter: Organism Value: A. thaliana
  misc_feature: MA Experiment 20000234 PARAMETER Experiment Name: At_Siliques_P Parameter: Plant Line Value: WS
  misc_feature: MA Experiment 20000234 PARAMETER Experiment Name: At_Siliques_P Parameter: Tissue Value: Less Than 5mm Siliques vs. Whole Plant
  misc_feature: MA Experiment ID: 20000235 Result: Down-regulated in Transcription
  misc_feature: MA Experiment 20000235 PARAMETER Experiment Name: At_Siliques_P Parameter: Age (day) Value: 21
  misc_feature: MA Experiment 20000235 PARAMETER Experiment Name: At_Siliques_P Parameter: Organism Value: A. thaliana
  misc_feature: MA Experiment 20000235 PARAMETER Experiment Name: At_Siliques_P Parameter: Plant Line Value: WS
  misc_feature: MA Experiment 20000235 PARAMETER Experiment Name: At_Siliques_P Parameter: Tissue Value: 5-10mm Siliques vs. Whole Plant
  misc_feature: MA Experiment ID: 20000265 Result: Up-regulated in Transcription
  misc_feature: MA Experiment 20000265 PARAMETER Experiment Name: At_Open_Flower_P Parameter: Age (day) Value: 21
  misc_feature: MA Experiment 20000265 PARAMETER Experiment Name: At_Open_Flower_P Parameter: Plant Line Value: WS
  misc_feature: MA Experiment 20000265 PARAMETER Experiment Name: At_Open_Flower_P Parameter: Tissue Value: Closed Flower vs. Whole Plant
  misc_feature: MA Experiment ID: 20000438 Result: Up-regulated in Transcription
  misc_feature: MA Experiment 20000438 PARAMETER Experiment Name: At_Shoots__P Parameter: Age (day) Value: 14
  misc_feature: MA Experiment 20000438 PARAMETER Experiment Name: At_Shoots__P Parameter: Tissue Value: Shoots vs. Whole Plant
  misc_feature: MA Experiment ID: 20000439 Result: Down-regulated in Transcription
  misc_feature: MA Experiment 20000439 PARAMETER Experiment Name: At_Roots__P Parameter: Age (day) Value: 14 vs. 21
  misc_feature: MA Experiment 20000439 PARAMETER Experiment Name: At_Roots__P Parameter: Organism Value: A. thaliana
  misc_feature: MA Experiment 20000439 PARAMETER Experiment Name: At_Roots__P Parameter: Tissue Value: Roots vs. Whole Plant
  misc_feature: MA Experiment ID: 20001451 Result: Up-regulated in Transcription
  misc_feature: MA Experiment 20001451 PARAMETER Experiment Name: At_Far-red-induction_P Parameter: Age (day) Value: 7
  misc_feature: MA Experiment 20001451 PARAMETER Experiment Name: At_Far-red-induction_P Parameter: Light Value: Far-red vs. White
  misc_feature: MA Experiment 20001451 PARAMETER Experiment Name: At_Far-red-induction_P Parameter: Organism Value: A. thaliana
  misc_feature: MA Experiment 20001451 PARAMETER Experiment Name: At_Far-red-induction_P Parameter: Plant Line Value: Columbia
  misc_feature: MA Experiment 20001451 PARAMETER Experiment Name: At_Far-red-induction_P Parameter: Timepoint (hr) Value: 24
  misc_feature: MA Experiment 20001451 PARAMETER Experiment Name: At_Far-red-induction_P Parameter: Tissue Value: Whole Plant
  misc_feature: MA Experiment ID: 20001904 Result: Down-regulated in Transcription
  misc_feature: MA Experiment 20001904 PARAMETER Experiment Name: At_Drought_Reproduction_P Parameter: Age (day) Value: 37
  misc_feature: MA Experiment 20001904 PARAMETER Experiment Name: At_Drought_Reproduction_P Parameter: Organism Value: A. thaliana
  misc_feature: MA Experiment 20001904 PARAMETER Experiment Name: At_Drought_Reproduction_P Parameter: Plant Line Value: WS
  misc_feature: MA Experiment 20001904 PARAMETER Experiment Name: At_Drought_Reproduction_P Parameter: Timepoint (day) Value: 7
  misc_feature: MA Experiment 20001904 PARAMETER Experiment Name: At_Drought_Reproduction_P Parameter: Tissue Value: Rosettes
  misc_feature: MA Experiment 20001904 PARAMETER Experiment Name: At_Drought_Reproduction_P Parameter: Treatment Value: Drought vs. No Drought
  misc_feature: MA Experiment ID: 20001905 Result: Down-regulated in Transcription
  misc_feature: MA Experiment 20001905 PARAMETER Experiment Name: At_Drought_Reproduction_P Parameter: Age (day) Value: 40
  misc_feature: MA Experiment 20001905 PARAMETER Experiment Name: At_Drought_Reproduction_P Parameter: Organism Value: A. thaliana
  misc_feature: MA Experiment 20001905 PARAMETER Experiment Name: At_Drought_Reproduction_P Parameter: Plant Line Value: WS
  misc_feature: MA Experiment 20001905 PARAMETER Experiment Name: At_Drought_Reproduction_P Parameter: Timepoint (day) Value: 10
  misc_feature: MA Experiment 20001905 PARAMETER Experiment Name: At_Drought_Reproduction_P Parameter: Tissue Value: Rosettes
  misc_feature: MA Experiment 20001905 PARAMETER Experiment Name: At_Drought_Reproduction_P Parameter: Treatment Value: Drought vs. No Drought
  misc_feature: Phenotype: ROSETTE LEAVES Curled-Curled 5
  misc_feature: Phenotype: ROSETTE LEAVES Shape-Lanceolate
  misc_feature: Phenotype: ROSETTE LEAVES Shape-Lanceolate
  misc_feature: Phenotype: ROSETTE LEAVES Other
  misc_feature: Phenotype: ROSETTE LEAVES Other
  misc_feature: Phenotype: WHOLE PLANT Color-Dark Green
  misc_feature: Phenotype: INFLORESCENCE Flowering Time-Late Flowering
  misc_feature: Phenotype: SENESCENCE TIME Senescence Time-Late Senescence
  misc_feature: Phenotype: ROSETTE LEAVES Curled-Curled 5
  misc_feature: Phenotype: ROSETTE LEAVES Shape-Lanceolate
  misc_feature: Phenotype: ROSETTE LEAVES Shape-Lanceolate
  misc_feature: Phenotype: ROSETTE LEAVES Other
  misc_feature: Phenotype: ROSETTE LEAVES Other
  misc_feature: Phenotype: WHOLE PLANT Color-Dark Green
  misc_feature: Phenotype: INFLORESCENCE Flowering Time-Late Flowering
  misc_feature: Phenotype: SENESCENCE TIME Senescence Time-Late Senescence
  misc_feature: Phenotype: SILIQUES Length-Short
  misc_feature: Phenotype: SILIQUES Other
  misc_feature: Phenotype: FERTILITY Fertility-Reduced
  misc_feature: Phenotype: SENESCENCE TIME Senescence Time-Late Senescence
  misc_feature: Phenotype: ROSETTE LEAVES Curled-Curled 5
  misc_feature: Phenotype: ROSETTE LEAVES Shape-Lanceolate
  misc_feature: Phenotype: ROSETTE LEAVES Shape-Lanceolate
  misc_feature: Phenotype: ROSETTE LEAVES Other
  misc_feature: Phenotype: ROSETTE LEAVES Other
  misc_feature: Phenotype: WHOLE PLANT Color-Dark Green
  misc_feature: Phenotype: WHOLE PLANT Color-High Anthocyanin
  misc_feature: Phenotype: INFLORESCENCE Flowering Time-Late Flowering
  misc_feature: Phenotype: SENESCENCE TIME Senescence Time-Late Senescence
  misc_feature: Phenotype: SILIQUES Length-Short
  misc_feature: Phenotype: SILIQUES Other
  misc_feature: Phenotype: FERTILITY Fertility-Reduced
  misc_feature: Phenotype: SENESCENCE TIME Senescence Time-Late Senescence
  misc_feature: Phenotype: ROSETTE LEAVES Curled-Curled 5
  misc_feature: Phenotype: ROSETTE LEAVES Shape-Lanceolate
  misc_feature: Phenotype: ROSETTE LEAVES Shape-Lanceolate
  misc_feature: Phenotype: ROSETTE LEAVES Other
  misc_feature: Phenotype: ROSETTE LEAVES Other
  misc_feature: Phenotype: WHOLE PLANT Color-Dark Green
  misc_feature: Phenotype: WHOLE PLANT Color-High Anthocyanin
  misc_feature: Phenotype: INFLORESCENCE Flowering Time-Late Flowering
  misc_feature: Phenotype: SENESCENCE TIME Senescence Time-Late Senescence
  misc_feature: Phenotype: ROSETTE LEAVES Curled-Curled 5
  misc_feature: Phenotype: ROSETTE LEAVES Shape-Lanceolate
  misc_feature: Phenotype: ROSETTE LEAVES Shape-Lanceolate
  misc_feature: Phenotype: ROSETTE LEAVES Other
  misc_feature: Phenotype: ROSETTE LEAVES Other
  misc_feature: Phenotype: WHOLE PLANT Color-Dark Green
  misc_feature: Phenotype: INFLORESCENCE Flowering Time-Late Flowering
  misc_feature: Phenotype: INFLORESCENCE Height-Short
  misc_feature: Phenotype: FERTILITY Fertility-Sterile
  misc_feature: Phenotype: SENESCENCE TIME Senescence Time-Late Senescence
  misc_feature: Phenotype: SILIQUES Length-Short
  misc_feature: Phenotype: SILIQUES Other
  misc_feature: Phenotype: FERTILITY Fertility-Reduced
  misc_feature: Phenotype: SENESCENCE TIME Senescence Time-Late Senescence

SEQ ID NO: 32752 - protein, 240 aa, Arabidopsis thaliana; identical to SEQ ID NO: 29162
  peptide (1)..(240): Ceres Seq. ID no. 12334432
  misc_feature (16)..(201): Pfam Name: YABBY protein Pfam Description: YABBY protein
  misc_feature (147)..(213): Homolog of NCBI NO: 30683176 NR Description: expressed protein [Arabidopsis thaliana]
  misc_feature (1)..(238): Homolog of NCBI NO: 38605890 NR Description: OSJNBb0020O11.2 [Oryza sativa (japonica
  misc_feature (4)..(238): Homolog of NCBI NO: 27804377 NR Description: MADS-box transcription factor CDM51
  misc_feature (20)..(92): Homolog of NCBI NO: 37535908 NR Description: hypothetical protein [Oryza sativa (japonica
  misc_feature (73)..(240): Homolog of NCBI NO: 37535908 NR Description: hypothetical protein [Oryza sativa (japonica
  misc_feature (1)..(237): Homolog of NCBI NO: 18406725 NR Description: expressed protein
  misc_feature (216)..(240): Homolog of NCBI NO: 7486543 NR Description: hypothetical protein F6N15.22 - Arabidopsis
  misc_feature (150)..(217): Homolog of NCBI NO: 7486543 NR Description: hypothetical protein F6N15.22 - Arabidopsis
  misc_feature (1)..(77): Homolog of NCBI NO: 7486543 NR Description: hypothetical protein F6N15.22 - Arabidopsis
  misc_feature (1)..(240): Homolog of NCBI NO: 18411242 NR Description: putative YABBY3 axial regulator

SEQ ID NO: 32753 - protein, 237 aa, Arabidopsis thaliana; identical to SEQ ID NO: 29163
  peptide (1)..(237): Ceres Seq. ID no. 12334433
  misc_feature (13)..(198): Pfam Name: YABBY protein Pfam Description: YABBY protein
  misc_feature (144)..(210): Homolog of NCBI NO: 30683176 NR Description: expressed protein [Arabidopsis thaliana]
  misc_feature (1)..(235): Homolog of NCBI NO: 38605890 NR Description: OSJNBb0020O11.2 [Oryza sativa (japonica
  misc_feature (1)..(235): Homolog of NCBI NO: 27804377 NR Description: MADS-box transcription factor CDM51
  misc_feature (17)..(89): Homolog of NCBI NO: 37535908 NR Description: hypothetical protein [Oryza sativa (japonica
  misc_feature (70)..(237): Homolog of NCBI NO: 37535908 NR Description: hypothetical protein [Oryza sativa (japonica
  misc_feature (1)..(234): Homolog of NCBI NO: 18406725 NR Description: expressed protein
  misc_feature (213)..(237): Homolog of NCBI NO: 7486543 NR Description: hypothetical protein F6N15.22 - Arabidopsis
  misc_feature (147)..(214): Homolog of NCBI NO: 7486543 NR Description: hypothetical protein F6N15.22 - Arabidopsis
  misc_feature (1)..(74): Homolog of NCBI NO: 7486543 NR Description: hypothetical protein F6N15.22 - Arabidopsis
  misc_feature (1)..(237): Homolog of NCBI NO: 18411242 NR Description: putative YABBY3 axial regulator

SEQ ID NO: 32754 - protein, 235 aa, Arabidopsis thaliana; identical to SEQ ID NO: 29164
  peptide (1)..(235): Ceres Seq. ID no. 12334434
  misc_feature (11)..(196): Pfam Name: YABBY protein Pfam Description: YABBY protein
  misc_feature (142)..(208): Homolog of NCBI NO: 30683176 NR Description: expressed protein [Arabidopsis thaliana]
  misc_feature (1)..(233): Homolog of NCBI NO: 38605890 NR Description: OSJNBb0020O11.2 [Oryza sativa (japonica
  misc_feature (1)..(233): Homolog of NCBI NO: 27804377 NR Description: MADS-box transcription factor CDM51
  misc_feature (15)..(87): Homolog of NCBI NO: 37535908 NR Description: hypothetical protein [Oryza sativa (japonica
  misc_feature (68)..(235): Homolog of NCBI NO: 37535908 NR Description: hypothetical protein [Oryza sativa (japonica
  misc_feature (1)..(232): Homolog of NCBI NO: 18406725 NR Description: expressed protein
  misc_feature (211)..(235): Homolog of NCBI NO: 7486543 NR Description: hypothetical protein F6N15.22 - Arabidopsis
  misc_feature (145)..(212): Homolog of NCBI NO: 7486543 NR Description: hypothetical protein F6N15.22 - Arabidopsis
  misc_feature (1)..(72): Homolog of NCBI NO: 7486543 NR Description: hypothetical protein F6N15.22 - Arabidopsis
  misc_feature (1)..(235): Homolog of NCBI NO: 18411242 NR Description: putative YABBY3 axial regulator

SEQ ID NO: 32755 - DNA, 1384 bp, Arabidopsis thaliana; identical to SEQ ID NO: 29165
  misc_feature (1)..(1384): Ceres Seq. ID no. 13487636
  misc_feature: MA Experiment ID: 108434 Result: Up-regulated in Transcription
  misc_feature: MA Experiment 108434 PARAMETER Experiment Name: At_Root_Tips_cDNA_P Parameter: Tissue Value: Root Tips
  misc_feature: MA Experiment ID: 108561 Result: Up-regulated in Transcription
  misc_feature: MA Experiment 108561 PARAMETER Experiment Name: At_100uM_ABA_cDNA_P Parameter: Timepoint (hr) Value: 6
  misc_feature: MA Experiment 108561 PARAMETER Experiment Name: At_100uM_ABA_cDNA_P Parameter: Tissue Value: Aerial
  misc_feature: MA Experiment 108561 PARAMETER Experiment Name: At_100uM_ABA_cDNA_P Parameter: Treatment Value: 100uM ABA vs. No Treatment
  misc_feature: MA Experiment ID: 20000184 Result: Down-regulated in Transcription
  misc_feature: MA Experiment 20000184 PARAMETER Experiment Name: At_Shoots__P Parameter: Age (day) Value: 7
  misc_feature: MA Experiment 20000184 PARAMETER Experiment Name: At_Shoots__P Parameter: Tissue Value: Shoots vs. Whole Plant
  misc_feature: MA Experiment ID: 20001248 Result: Up-regulated in Transcription
  misc_feature: MA Experiment 20001248 PARAMETER Experiment Name: At_Far-red-induction_P Parameter: Age (day) Value: 7
  misc_feature: MA Experiment 20001248 PARAMETER Experiment Name: At_Far-red-induction_P Parameter: Light Value: Far-red vs. White
  misc_feature: MA Experiment 20001248 PARAMETER Experiment Name: At_Far-red-induction_P Parameter: Organism Value: A. thaliana
  misc_feature: MA Experiment 20001248 PARAMETER Experiment Name: At_Far-red-induction_P Parameter: Plant Line Value: Columbia
  misc_feature: MA Experiment 20001248 PARAMETER Experiment Name: At_Far-red-induction_P Parameter: Timepoint (hr) Value: 4
  misc_feature: MA Experiment 20001248 PARAMETER Experiment Name: At_Far-red-induction_P Parameter: Tissue Value: Whole Plant
  misc_feature: MA Experiment ID: 20001450 Result: Up-regulated in Transcription
  misc_feature: MA Experiment 20001450 PARAMETER Experiment Name: At_Far-red-induction_P Parameter: Age (day) Value: 7
  misc_feature: MA Experiment 20001450 PARAMETER Experiment Name: At_Far-red-induction_P Parameter: Light Value: Far-red vs. White
  misc_feature: MA Experiment 20001450 PARAMETER Experiment Name: At_Far-red-induction_P Parameter: Organism Value: A. thaliana
  misc_feature: MA Experiment 20001450 PARAMETER Experiment Name: At_Far-red-induction_P Parameter: Plant Line Value: Columbia
  misc_feature: MA Experiment 20001450 PARAMETER Experiment Name: At_Far-red-induction_P Parameter: Timepoint (hr) Value: 8
  misc_feature: MA Experiment 20001450 PARAMETER Experiment Name: At_Far-red-induction_P Parameter: Tissue Value: Whole Plant
  misc_feature: MA Experiment ID: 20001451 Result: Up-regulated in Transcription
  misc_feature: MA Experiment 20001451 PARAMETER Experiment Name: At_Far-red-induction_P Parameter: Age (day) Value: 7
  misc_feature: MA Experiment 20001451 PARAMETER Experiment Name: At_Far-red-induction_P Parameter: Light Value: Far-red vs. White
  misc_feature: MA Experiment 20001451 PARAMETER Experiment Name: At_Far-red-induction_P Parameter: Organism Value: A. thaliana
  misc_feature: MA Experiment 20001451 PARAMETER Experiment Name: At_Far-red-induction_P Parameter: Plant Line Value: Columbia
  misc_feature: MA Experiment 20001451 PARAMETER Experiment Name: At_Far-red-induction_P Parameter: Timepoint (hr) Value: 24
  misc_feature: MA Experiment 20001451 PARAMETER Experiment Name: At_Far-red-induction_P Parameter: Tissue Value: Whole Plant

SEQ ID NO: 32756 - protein, 408 aa, Arabidopsis thaliana; identical to SEQ ID NO: 29166
  peptide (1)..(408): Ceres Seq. ID no. 13487637
  misc_feature (156)..(208): Pfam Name: Putative zinc finger motif, C2HC5-type Pfam Description: Putative zinc finger motif, C2HC5-type
  misc_feature (173)..(305): Homolog of NCBI NO: 26332983 NR Description: unnamed protein product [Mus musculus]
  misc_feature (6)..(196): Homolog of NCBI NO: 26332983 NR Description: unnamed protein product [Mus musculus]
  misc_feature (104)..(303): Homolog of NCBI NO: 31203161 NR Description: ENSANGP00000017311 [Anopheles gambiae]
  misc_feature (126)..(196): Homolog of NCBI NO: 703112 NR Description: thyroid receptor interactor
  misc_feature (173)..(356): Homolog of NCBI NO: 703112 NR Description: thyroid receptor interactor
  misc_feature (11)..(196): Homolog of NCBI NO: 19863480 NR Description: Activating signal cointegrator 1 (ASC-1) (Thyroid
  misc_feature (173)..(369): Homolog of NCBI NO: 19863480 NR Description: Activating signal cointegrator 1 (ASC-1) (Thyroid
  misc_feature (11)..(196): Homolog of NCBI NO: 32189376 NR Description: thyroid hormone receptor interactor 4
  misc_feature (173)..(369): Homolog of NCBI NO: 32189376 NR Description: thyroid hormone receptor interactor 4
  misc_feature (1)..(408): Homolog of NCBI NO: 15228204 NR Description: expressed protein [Arabidopsis thaliana]

SEQ ID NO: 32757 - protein, 321 aa, Arabidopsis thaliana; identical to SEQ ID NO: 29167
  peptide (1)..(321): Ceres Seq. ID no. 13487638
  misc_feature (69)..(121): Pfam Name: Putative zinc finger motif, C2HC5-type Pfam Description: Putative zinc finger motif, C2HC5-type
  misc_feature (86)..(218): Homolog of NCBI NO: 26332983 NR Description: unnamed protein product [Mus musculus]
  misc_feature (1)..(109): Homolog of NCBI NO: 26332983 NR Description: unnamed protein product [Mus musculus]
  misc_feature (17)..(216): Homolog of NCBI NO: 31203161 NR Description: ENSANGP00000017311 [Anopheles gambiae]
  misc_feature (39)..(109): Homolog of NCBI NO: 703112 NR Description: thyroid receptor interactor
  misc_feature (86)..(269): Homolog of NCBI NO: 703112 NR Description: thyroid receptor interactor
  misc_feature (1)..(109): Homolog of NCBI NO: 19863480 NR Description: Activating signal cointegrator 1 (ASC-1) (Thyroid
  misc_feature (86)..(282): Homolog of NCBI NO: 19863480 NR Description: Activating signal cointegrator 1 (ASC-1) (Thyroid
  misc_feature (1)..(109): Homolog of NCBI NO: 32189376 NR Description: thyroid hormone receptor interactor 4
  misc_feature (86)..(282): Homolog of NCBI NO: 32189376 NR Description: thyroid hormone receptor interactor 4
  misc_feature (1)..(321): Homolog of NCBI NO: 15228204 NR Description: expressed protein [Arabidopsis thaliana]

SEQ ID NO: 32758 - DNA, 1301 bp, Arabidopsis thaliana; identical to SEQ ID NO: 29168
  misc_feature (1)..(1301): Ceres Seq. ID no. 12334435
  misc_feature: MA Experiment ID: 108434 Result: Up-regulated in Transcription
  misc_feature: MA Experiment 108434 PARAMETER Experiment Name: At_Root_Tips_cDNA_P Parameter: Tissue Value: Root Tips
  misc_feature: MA Experiment ID: 108572 Result: Up-regulated in Transcription
  misc_feature: MA Experiment 108572 PARAMETER Experiment Name: At_Drought_cDNA_P Parameter: Timepoint (hr) Value: 1
  misc_feature: MA Experiment 108572 PARAMETER Experiment Name: At_Drought_cDNA_P Parameter: Tissue Value: Aerial
  misc_feature: MA Experiment 108572 PARAMETER Experiment Name: At_Drought_cDNA_P Parameter: Treatment Value: Drought vs. No Drought
  misc_feature: MA Experiment ID: 108607 Result: Up-regulated in Transcription
  misc_feature: MA Experiment 108607 PARAMETER Experiment Name: At_100uM_ABA_cDNA_P Parameter: Timepoint (hr) Value: 4
  misc_feature: MA Experiment 108607 PARAMETER Experiment Name: At_100uM_ABA_cDNA_P Parameter: Tissue Value: Aerial
  misc_feature: MA Experiment 108607 PARAMETER Experiment Name: At_100uM_ABA_cDNA_P Parameter: Treatment Value: 100uM ABA vs. No Treatment
  misc_feature: MA Experiment ID: 108668 Result: Down-regulated in Transcription
  misc_feature: MA Experiment 108668 PARAMETER Experiment Name: At_2mM_SA_cDNA_P Parameter: Plant Line Value: WS
  misc_feature: MA Experiment 108668 PARAMETER Experiment Name: At_2mM_SA_cDNA_P Parameter: Timepoint (hr) Value: 6
  misc_feature: MA Experiment 108668 PARAMETER Experiment Name: At_2mM_SA_cDNA_P Parameter: Treatment Value: 2mM SA vs. No Treatment
  misc_feature: MA Experiment ID: 20000069 Result: Up-regulated in Transcription
  misc_feature: MA Experiment 20000069 PARAMETER Experiment Name: At_100uM_ABA_Mutants_cDNA_P Parameter: Plant Line Value: CS23
  misc_feature: MA Experiment 20000069 PARAMETER Experiment Name: At_100uM_ABA_Mutants_cDNA_P Parameter: Timepoint (hr) Value: 6
  misc_feature: MA Experiment 20000069 PARAMETER Experiment Name: At_100uM_ABA_Mutants_cDNA_P Parameter: Tissue Value: Aerial
  misc_feature: MA Experiment 20000069 PARAMETER Experiment Name: At_100uM_ABA_Mutants_cDNA_P Parameter: Treatment Value: 100uM ABA vs. No Treatment
  misc_feature: MA Experiment ID: 20000071 Result: Up-regulated in Transcription
  misc_feature: MA Experiment 20000071 PARAMETER Experiment Name: At_100uM_ABA_Mutants_cDNA_P Parameter: Plant Line Value: CS8104
  misc_feature: MA Experiment 20000071 PARAMETER Experiment Name: At_100uM_ABA_Mutants_cDNA_P Parameter: Timepoint (hr) Value: 6
  misc_feature: MA Experiment 20000071 PARAMETER Experiment Name: At_100uM_ABA_Mutants_cDNA_P Parameter: Tissue Value: Aerial
  misc_feature: MA Experiment 20000071 PARAMETER Experiment Name: At_100uM_ABA_Mutants_cDNA_P Parameter: Treatment Value: 100uM ABA vs. No Treatment
  misc_feature: MA Experiment ID: 20000113 Result: Down-regulated in Transcription
  misc_feature: MA Experiment 20000113 PARAMETER Experiment Name: At_42deg_Heat_cDNA_P Parameter: Temperature (deg C) Value: 42 vs. 22
  misc_feature: MA Experiment 20000113 PARAMETER Experiment Name: At_42deg_Heat_cDNA_P Parameter: Timepoint (hr) Value: 8
  misc_feature: MA Experiment 20000113 PARAMETER Experiment Name: At_42deg_Heat_cDNA_P Parameter: Tissue Value: Aerial
  misc_feature: MA Experiment ID: 20000144 Result: Down-regulated in Transcription
  misc_feature: MA Experiment 20000144 PARAMETER Experiment Name: At_42deg_Heat_cDNA_P Parameter: Temperature (deg C) Value: 42 vs. 22
  misc_feature: MA Experiment 20000144 PARAMETER Experiment Name: At_42deg_Heat_cDNA_P Parameter: Timepoint (hr) Value: 1
  misc_feature: MA Experiment 20000144 PARAMETER Experiment Name: At_42deg_Heat_cDNA_P Parameter: Tissue Value: Aerial
  misc_feature: MA Experiment ID: 20000166 Result: Up-regulated in Transcription
  misc_feature: MA Experiment 20000166 PARAMETER Experiment Name: At_100uM_ABA_P Parameter: Age (day) Value: 14
  misc_feature: MA Experiment 20000166 PARAMETER Experiment Name: At_100uM_ABA_P Parameter: Organism Value: A. thaliana
  misc_feature: MA Experiment 20000166 PARAMETER Experiment Name: At_100uM_ABA_P Parameter: Plant Line Value: WS
  misc_feature: MA Experiment 20000166 PARAMETER Experiment Name: At_100uM_ABA_P Parameter: Timepoint (hr) Value: 1
  misc_feature: MA Experiment 20000166 PARAMETER Experiment Name: At_100uM_ABA_P Parameter: Tissue Value: Aerial
  misc_feature: MA Experiment 20000166 PARAMETER Experiment Name: At_100uM_ABA_P Parameter: Treatment Value: 100uM ABA vs. No Treatment
  misc_feature: MA Experiment ID: 20000173 Result: Down-regulated in Transcription
  misc_feature: MA Experiment 20000173 PARAMETER Experiment Name: At_42deg_Heat_P Parameter: Age (day) Value: 14
  misc_feature: MA Experiment 20000173 PARAMETER Experiment Name: At_42deg_Heat_P Parameter: Organism Value: A. thaliana
  misc_feature: MA Experiment 20000173 PARAMETER Experiment Name: At_42deg_Heat_P Parameter: Plant Line Value: WS
  misc_feature: MA Experiment 20000173 PARAMETER Experiment Name: At_42deg_Heat_P Parameter: Temperature (deg C) Value: 42 vs. 22
  misc_feature: MA Experiment 20000173 PARAMETER Experiment Name: At_42deg_Heat_P Parameter: Timepoint (hr) Value: 6
  misc_feature: MA Experiment 20000173 PARAMETER Experiment Name: At_42deg_Heat_P Parameter: Tissue Value: Aerial
  misc_feature: MA Experiment ID: 20000185 Result: Up-regulated in Transcription
  misc_feature: MA Experiment 20000185 PARAMETER Experiment Name: At_Roots__P Parameter: Age (day) Value: 7 vs. 21
  misc_feature: MA Experiment 20000185 PARAMETER Experiment Name: At_Roots__P Parameter: Organism Value: A. thaliana
  misc_feature: MA Experiment 20000185 PARAMETER Experiment Name: At_Roots__P Parameter: Tissue Value: Roots vs. Whole Plant
  misc_feature: MA Experiment ID: 20000227 Result: Down-regulated in Transcription
  misc_feature: MA Experiment 20000227 PARAMETER Experiment Name: At_Root-Tips-vs-Tops_P Parameter: Tissue Value: Root Tips vs. Root Tops
  misc_feature: MA Experiment ID: 20000234 Result: Up-regulated in Transcription
  misc_feature: MA Experiment 20000234 PARAMETER Experiment Name: At_Siliques_P Parameter: Age (day) Value: 21
  misc_feature: MA Experiment 20000234 PARAMETER Experiment Name: At_Siliques_P Parameter: Organism Value: A. thaliana
  misc_feature: MA Experiment 20000234 PARAMETER Experiment Name: At_Siliques_P Parameter: Plant Line Value: WS
  misc_feature: MA Experiment 20000234 PARAMETER Experiment Name: At_Siliques_P Parameter: Tissue Value: Less Than 5mm Siliques vs. Whole Plant
  misc_feature: MA Experiment ID: 20000235 Result: Up-regulated in Transcription
  misc_feature: MA Experiment 20000235 PARAMETER Experiment Name: At_Siliques_P Parameter: Age (day) Value: 21
  misc_feature: MA Experiment 20000235 PARAMETER Experiment Name: At_Siliques_P Parameter: Organism Value: A. thaliana
  misc_feature: MA Experiment 20000235 PARAMETER Experiment Name: At_Siliques_P Parameter: Plant Line Value: WS
  misc_feature: MA Experiment 20000235 PARAMETER Experiment Name: At_Siliques_P Parameter: Tissue Value: 5-10mm Siliques vs. Whole Plant
  misc_feature: MA Experiment ID: 20000264 Result: Up-regulated in Transcription
  misc_feature: MA Experiment 20000264 PARAMETER Experiment Name: At_Open_Flower_P Parameter: Age (day) Value: 21
  misc_feature: MA Experiment 20000264 PARAMETER Experiment Name: At_Open_Flower_P Parameter: Plant Line Value: WS
  misc_feature: MA Experiment 20000264 PARAMETER Experiment Name: At_Open_Flower_P Parameter: Tissue Value: Open Flower vs. Whole Plant
  misc_feature: MA Experiment ID: 20000265 Result: Up-regulated in Transcription
  misc_feature: MA Experiment 20000265 PARAMETER Experiment Name: At_Open_Flower_P Parameter: Age (day) Value: 21
  misc_feature: MA Experiment 20000265 PARAMETER Experiment Name: At_Open_Flower_P Parameter: Plant Line Value: WS
  misc_feature: MA Experiment 20000265 PARAMETER Experiment Name: At_Open_Flower_P Parameter: Tissue Value: Closed Flower vs. Whole Plant
  misc_feature: MA Experiment ID: 20000286 Result: Up-regulated in Transcription
  misc_feature: MA Experiment 20000286 PARAMETER Experiment Name: At_Open_Flower_P Parameter: Age (day) Value: 21
  misc_feature: MA Experiment 20000286 PARAMETER Experiment Name: At_Open_Flower_P Parameter: Plant Line Value: WS
  misc_feature: MA Experiment 20000286 PARAMETER Experiment Name: At_Open_Flower_P Parameter: Tissue Value: Half Open vs. Whole Plant
  misc_feature: MA Experiment ID: 20000438 Result: Up-regulated in Transcription
  misc_feature: MA Experiment 20000438 PARAMETER Experiment Name: At_Shoots__P Parameter: Age (day) Value: 14
  misc_feature: MA Experiment 20000438 PARAMETER Experiment Name: At_Shoots__P Parameter: Tissue Value: Shoots vs. Whole Plant
  misc_feature: MA Experiment ID: 20000439 Result: Up-regulated in Transcription
  misc_feature: MA Experiment 20000439 PARAMETER Experiment Name: At_Roots__P Parameter: Age (day) Value: 14 vs. 21
  misc_feature: MA Experiment 20000439 PARAMETER Experiment Name: At_Roots__P Parameter: Organism Value: A. thaliana
  misc_feature: MA Experiment 20000439 PARAMETER Experiment Name: At_Roots__P Parameter: Tissue Value: Roots vs. Whole Plant
  misc_feature: MA Experiment ID: 20000451 Result: Up-regulated in Transcription
  misc_feature: MA Experiment 20000451 PARAMETER Experiment Name: At_CS6879_Shoots-Roots_P Parameter: Age (day) Value: 14
  misc_feature: MA Experiment 20000451 PARAMETER Experiment Name: At_CS6879_Shoots-Roots_P Parameter: Organism Value: A. thaliana
  misc_feature: MA Experiment 20000451 PARAMETER Experiment Name: At_CS6879_Shoots-Roots_P Parameter: Plant Line Value: CS6879 vs. WS
  misc_feature: MA Experiment 20000451 PARAMETER Experiment Name: At_CS6879_Shoots-Roots_P Parameter: Tissue Value: Roots
  misc_feature: MA Experiment ID: 20000794 Result: Up-regulated in Transcription
  misc_feature: MA Experiment 20000794 PARAMETER Experiment Name: At_Petals_P Parameter: Age (day) Value: 23-25 days
  misc_feature: MA Experiment 20000794 PARAMETER Experiment Name: At_Petals_P Parameter: Plant Line Value: WS
  misc_feature: MA Experiment 20000794 PARAMETER Experiment Name: At_Petals_P Parameter: Tissue Value: Petals vs. Whole plant
  misc_feature: MA Experiment ID: 20001560 Result: Up-regulated in Transcription
  misc_feature: MA Experiment 20001560 PARAMETER Experiment Name: At_Drought_Soil_Dry_P Parameter: Age (day) Value: 28
  misc_feature: MA Experiment 20001560 PARAMETER Experiment Name: At_Drought_Soil_Dry_P Parameter: Organism Value: A. thaliana
  misc_feature: MA Experiment 20001560 PARAMETER Experiment Name: At_Drought_Soil_Dry_P Parameter: Plant Line Value: WS
  misc_feature: MA Experiment 20001560 PARAMETER Experiment Name: At_Drought_Soil_Dry_P Parameter: Post Timepoint (hr) Value: None
  misc_feature: MA Experiment 20001560 PARAMETER Experiment Name: At_Drought_Soil_Dry_P Parameter: Post-Treatment Value: None
  misc_feature: MA Experiment 20001560 PARAMETER Experiment Name: At_Drought_Soil_Dry_P Parameter: Timepoint (day) Value: 14
  misc_feature: MA Experiment 20001560 PARAMETER Experiment Name: At_Drought_Soil_Dry_P Parameter: Treatment Value: Drought vs. No Drought

SEQ ID NO: 32759 - protein, 197 aa, Arabidopsis thaliana; identical to SEQ ID NO: 29169
  peptide (1)..(197): Ceres Seq. ID no. 12334436
  misc_feature (37)..(197): Homolog of NCBI NO: 20127062 NR Description: putative bHLH transcription factor [Arabidopsis
  misc_feature (37)..(197): Homolog of NCBI NO: 15238199 NR Description: bHLH protein
  misc_feature (26)..(197): Homolog of NCBI NO: 21537346 NR Description: unknown [Arabidopsis thaliana]
  misc_feature (26)..(197): Homolog of NCBI NO: 18424973 NR Description: bHLH protein; protein id: At5g65640.1, supported

SEQ ID NO: 32760 - protein, 172 aa, Arabidopsis thaliana; identical to SEQ ID NO: 29170
  peptide (1)..(172): Ceres Seq. ID no. 12334437
  misc_feature (12)..(172): Homolog of NCBI NO: 20127062 NR Description: putative bHLH transcription factor [Arabidopsis
  misc_feature (12)..(172): Homolog of NCBI NO: 15238199 NR Description: bHLH protein
  misc_feature (1)..(172): Homolog of NCBI NO: 21537346 NR Description: unknown [Arabidopsis thaliana]
  misc_feature (1)..(172): Homolog of NCBI NO: 18424973 NR Description: bHLH protein; protein id: At5g65640.1, supported

SEQ ID NO: 32761 - protein, 166 aa, Arabidopsis thaliana; identical to SEQ ID NO: 29171
  peptide (1)..(166): Ceres Seq. ID no. 12334438
  misc_feature (6)..(166): Homolog of NCBI NO: 20127062 NR Description: putative bHLH transcription factor [Arabidopsis
  misc_feature (6)..(166): Homolog of NCBI NO: 15238199 NR Description: bHLH protein
  misc_feature (1)..(166): Homolog of NCBI NO: 21537346 NR Description: unknown [Arabidopsis thaliana]
  misc_feature (1)..(166): Homolog of NCBI NO: 18424973 NR Description: bHLH protein; protein id: At5g65640.1, supported

SEQ ID NO: 32762 - DNA, 1049 bp, Arabidopsis thaliana; identical to SEQ ID NO: 29172
  misc_feature (1)..(1049): Ceres Seq. ID no. 12334427
  misc_feature: MA Experiment ID: 108434 Result: Up-regulated in Transcription
  misc_feature: MA Experiment 108434 PARAMETER Experiment Name: At_Root_Tips_cDNA_P Parameter: Tissue Value: Root Tips
  misc_feature: MA Experiment ID: 20001905 Result: Down-regulated in Transcription
  misc_feature: MA Experiment 20001905 PARAMETER Experiment Name: At_Drought_Reproduction_P Parameter: Age (day) Value: 40
  misc_feature: MA Experiment 20001905 PARAMETER Experiment Name: At_Drought_Reproduction_P Parameter: Organism Value: A. thaliana
  misc_feature: MA Experiment 20001905 PARAMETER Experiment Name: At_Drought_Reproduction_P Parameter: Plant Line Value: WS
  misc_feature: MA Experiment 20001905 PARAMETER Experiment Name: At_Drought_Reproduction_P Parameter: Timepoint (day) Value: 10
  misc_feature: MA Experiment 20001905 PARAMETER Experiment Name: At_Drought_Reproduction_P Parameter: Tissue Value: Rosettes
  misc_feature: MA Experiment 20001905 PARAMETER Experiment Name: At_Drought_Reproduction_P Parameter: Treatment Value: Drought vs. No Drought

SEQ ID NO: 32763 - protein, 316 aa, Arabidopsis thaliana; identical to SEQ ID NO: 29173
  peptide (1)..(316): Ceres Seq. ID no. 12334428
  misc_feature (33)..(276): Pfam Name: haloacid dehalogenase-like hydrolase Pfam Description: haloacid dehalogenase-like hydrolase
  misc_feature (33)..(315): Homolog of NCBI NO: 22958772 NR Description: hypothetical protein [Rhodobacter sphaeroides]
  misc_feature (37)..(296): Homolog of NCBI NO: 22963159 NR Description: hypothetical protein [Rhodopseudomonas palustris]
  misc_feature (37)..(294): Homolog of NCBI NO: 27382589 NR Description: blr7478 [Bradyrhizobium japonicum]
  misc_feature (14)..(289): Homolog of NCBI NO: 13473111 NR Description: hypothetical protein [Mesorhizobium loti]
  misc_feature (23)..(281): Homolog of NCBI NO: 36958658 NR Description: HAD superfamily protein involved in
  misc_feature (33)..(277): Homolog of NCBI NO: 15965982 NR Description: CONSERVED HYPOTHETICAL PROTEIN [Sinorhizobium
  misc_feature (31)..(316): Homolog of NCBI NO: 22968911 NR Description: hypothetical protein [Rhodospirillum rubrum]
  misc_feature (21)..(316): Homolog of NCBI NO: 23014406 NR Description: hypothetical protein [Magnetospirillum
  misc_feature (82)..(316): Homolog of NCBI NO: 15238168 NR Description: putative protein; protein id: At5g10460.1
  misc_feature (1)..(316): Homolog of NCBI NO: 19310550 NR Description: unknown protein [Arabidopsis thaliana]

SEQ ID NO: 32764 - protein, 306 aa, Arabidopsis thaliana; identical to SEQ ID NO: 29174
  peptide (1)..(306): Ceres Seq. ID no. 12334429
  misc_feature (23)..(266): Pfam Name: haloacid dehalogenase-like hydrolase Pfam Description: haloacid dehalogenase-like hydrolase
  misc_feature (23)..(305): Homolog of NCBI NO: 22958772 NR Description: hypothetical protein [Rhodobacter sphaeroides]
  misc_feature (27)..(286): Homolog of NCBI NO: 22963159 NR Description: hypothetical protein [Rhodopseudomonas palustris]
  misc_feature (27)..(284): Homolog of NCBI NO: 27382589 NR Description: blr7478 [Bradyrhizobium japonicum]
  misc_feature (4)..(279): Homolog of NCBI NO: 13473111 NR Description: hypothetical protein [Mesorhizobium loti]
  misc_feature (13)..(271): Homolog of NCBI NO: 36958658 NR Description: HAD superfamily protein involved in
  misc_feature (23)..(267): Homolog of NCBI NO: 15965982 NR Description: CONSERVED HYPOTHETICAL PROTEIN [Sinorhizobium
  misc_feature (21)..(306): Homolog of NCBI NO: 22968911 NR Description: hypothetical protein [Rhodospirillum rubrum]
  misc_feature (11)..(306): Homolog of NCBI NO: 23014406 NR Description: hypothetical protein [Magnetospirillum
  misc_feature (72)..(306): Homolog of NCBI NO: 15238168 NR Description: putative protein; protein id: At5g10460.1
  misc_feature (1)..(306): Homolog of NCBI NO: 19310550 NR Description: unknown protein [Arabidopsis thaliana]

SEQ ID NO: 32765 - protein, 296 aa, Arabidopsis thaliana; identical to SEQ ID NO: 29175
  peptide (1)..(296): Ceres Seq. ID no. 12334430
  misc_feature (13)..(256): Pfam Name: haloacid dehalogenase-like hydrolase Pfam Description: haloacid dehalogenase-like hydrolase
  misc_feature (13)..(295): Homolog of NCBI NO: 22958772 NR Description: hypothetical protein [Rhodobacter sphaeroides]
  misc_feature (17)..(276): Homolog of NCBI NO: 22963159 NR Description: hypothetical protein [Rhodopseudomonas palustris]
  misc_feature (17)..(274): Homolog of NCBI NO: 27382589 NR Description: blr7478 [Bradyrhizobium japonicum]
  misc_feature (1)..(269): Homolog of NCBI NO: 13473111 NR Description: hypothetical protein [Mesorhizobium loti]
  misc_feature (3)..(261): Homolog of NCBI NO: 36958658 NR Description: HAD superfamily protein involved in
  misc_feature (13)..(257): Homolog of NCBI NO: 15965982 NR Description: CONSERVED HYPOTHETICAL PROTEIN [Sinorhizobium
  misc_feature (11)..(296): Homolog of NCBI NO: 22968911 NR Description: hypothetical protein [Rhodospirillum rubrum]
  misc_feature (1)..(296): Homolog of NCBI NO: 23014406 NR Description: hypothetical protein [Magnetospirillum
  misc_feature (62)..(296): Homolog of NCBI NO: 15238168 NR Description: putative protein; protein id: At5g10460.1
  misc_feature (1)..(296): Homolog of NCBI NO: 19310550 NR Description: unknown protein [Arabidopsis thaliana]

SEQ ID NO: 32766 - DNA, 1168 bp, Arabidopsis thaliana; identical to SEQ ID NO: 29176
  misc_feature (1)..(1168): Ceres Seq. ID no. 12334928
  misc_feature: MA Experiment ID: 108434 Result: Up-regulated in Transcription
  misc_feature: MA Experiment 108434 PARAMETER Experiment Name: At_Root_Tips_cDNA_P Parameter: Tissue Value: Root Tips
  misc_feature: MA Experiment ID: 108464 Result: Up-regulated in Transcription
  misc_feature: MA Experiment 108464 PARAMETER Experiment Name: At_Germinating_Seeds_cDNA_P Parameter: Age (day) Value: 4 vs. 0
  misc_feature: MA Experiment 108464 PARAMETER Experiment Name: At_Germinating_Seeds_cDNA_P Parameter: Tissue Value: Germinating Seeds
  misc_feature: MA Experiment ID: 108469 Result: Up-regulated in Transcription
  misc_feature: MA Experiment ID: 108501 Result: Down-regulated in Transcription
  misc_feature: MA Experiment 108501 PARAMETER Experiment Name: At_ap2_floral_buds_cDNA_P Parameter: Plant Line Value: ap2 (Ler.)
  misc_feature: MA Experiment 108501 PARAMETER Experiment Name: At_ap2_floral_buds_cDNA_P Parameter: Tissue Value: Closed Flower
  misc_feature: MA Experiment ID: 108572 Result: Up-regulated in Transcription
  misc_feature: MA Experiment 108572 PARAMETER Experiment Name: At_Drought_cDNA_P Parameter: Timepoint (hr) Value: 1
  misc_feature: MA Experiment 108572 PARAMETER Experiment Name: At_Drought_cDNA_P Parameter: Tissue Value: Aerial
  misc_feature: MA Experiment 108572 PARAMETER Experiment Name: At_Drought_cDNA_P Parameter: Treatment Value: Drought vs. No Drought
  misc_feature: MA Experiment ID: 108573 Result: Up-regulated in Transcription
  misc_feature: MA Experiment 108573 PARAMETER Experiment Name: At_Drought_cDNA_P Parameter: Timepoint (hr) Value: 6
  misc_feature: MA Experiment 108573 PARAMETER Experiment Name: At_Drought_cDNA_P Parameter: Tissue Value: Aerial
  misc_feature: MA Experiment 108573 PARAMETER Experiment Name: At_Drought_cDNA_P Parameter: Treatment Value: Drought vs. No Drought
  misc_feature: MA Experiment ID: 108574 Result: Down-regulated in Transcription
  misc_feature: MA Experiment 108574 PARAMETER Experiment Name: At_Wounding__cDNA_P Parameter: Timepoint (hr) Value: 1
  misc_feature: MA Experiment 108574 PARAMETER Experiment Name: At_Wounding__cDNA_P Parameter: Tissue Value: Aerial
  misc_feature: MA Experiment 108574 PARAMETER Experiment Name: At_Wounding__cDNA_P Parameter: Treatment Value: Wounding vs. No Wounding
  misc_feature: MA Experiment ID: 108579 Result: Down-regulated in Transcription
  misc_feature: MA Experiment 108579 PARAMETER Experiment Name: At_4deg_Cold_cDNA_P Parameter: Temperature (deg C) Value: 4 vs. 22
  misc_feature: MA Experiment 108579 PARAMETER Experiment Name: At_4deg_Cold_cDNA_P Parameter: Timepoint (hr) Value: 6
  misc_feature: MA Experiment 108579 PARAMETER Experiment Name: At_4deg_Cold_cDNA_P Parameter: Tissue Value: Aerial
  misc_feature: MA Experiment ID: 108585 Result: Up-regulated in Transcription
  misc_feature: MA Experiment 108585 PARAMETER Experiment Name: At_5mM_NaNP_cDNA_P Parameter: Timepoint (hr) Value: 6
  misc_feature: MA Experiment 108585 PARAMETER Experiment Name: At_5mM_NaNP_cDNA_P Parameter: Tissue Value: Aerial
  misc_feature: MA Experiment 108585 PARAMETER Experiment Name: At_5mM_NaNP_cDNA_P Parameter: Treatment Value: null
  misc_feature: MA Experiment ID: 108595 Result: Down-regulated in Transcription
  misc_feature: MA Experiment 108595 PARAMETER Experiment Name: At_Ler-pi_Ovule_cDNA_P Parameter: Plant Line Value: null
  misc_feature: MA Experiment ID: 20000185 Result: Down-regulated in Transcription
  misc_feature: MA Experiment 20000185 PARAMETER Experiment Name: At_Roots__P Parameter: Age (day) Value: 7 vs. 21
  misc_feature: MA Experiment 20000185 PARAMETER Experiment Name: At_Roots__P Parameter: Organism Value: A. thaliana
  misc_feature: MA Experiment 20000185 PARAMETER Experiment Name: At_Roots__P Parameter: Tissue Value: Roots vs. Whole Plant
  misc_feature: MA Experiment ID: 20000213 Result: Down-regulated in Transcription
  misc_feature: MA Experiment 20000213 PARAMETER Experiment Name: At_4deg_Cold_P Parameter: Timepoint (hr) Value: 2
  misc_feature: MA Experiment ID: 20000214 Result: Down-regulated in Transcription
  misc_feature: MA Experiment 20000214 PARAMETER Experiment Name: At_4deg_Cold_P Parameter: Timepoint (hr) Value: 6
  misc_feature: MA Experiment ID: 20000224 Result: Down-regulated in Transcription
  misc_feature: MA Experiment ID: 20000234 Result: Down-regulated in Transcription
  misc_feature: MA Experiment 20000234 PARAMETER Experiment Name: At_Siliques_P Parameter: Age (day) Value: 21
  misc_feature: MA Experiment 20000234 PARAMETER Experiment Name: At_Siliques_P Parameter: Organism Value: A. thaliana
  misc_feature: MA Experiment 20000234 PARAMETER Experiment Name: At_Siliques_P Parameter: Plant Line Value: WS
  misc_feature: MA Experiment 20000234 PARAMETER Experiment Name: At_Siliques_P Parameter: Tissue Value: Less Than 5mm Siliques vs. Whole Plant
  misc_feature: MA Experiment ID: 20000264 Result: Down-regulated in Transcription
  misc_feature: MA Experiment 20000264 PARAMETER Experiment Name: At_Open_Flower_P Parameter: Age (day) Value: 21
  misc_feature: MA Experiment 20000264 PARAMETER Experiment Name: At_Open_Flower_P Parameter: Plant Line Value: WS
  misc_feature: MA Experiment 20000264 PARAMETER Experiment Name: At_Open_Flower_P Parameter: Tissue Value: Open Flower vs. Whole Plant
  misc_feature: MA Experiment ID: 20000265 Result: Down-regulated in Transcription
  misc_feature: MA Experiment 20000265 PARAMETER Experiment Name: At_Open_Flower_P Parameter: Age (day) Value: 21
  misc_feature: MA Experiment 20000265 PARAMETER Experiment Name: At_Open_Flower_P Parameter: Plant Line Value: WS
  misc_feature: MA Experiment 20000265 PARAMETER Experiment Name: At_Open_Flower_P Parameter: Tissue Value: Closed Flower vs. Whole Plant
  misc_feature: MA Experiment ID: 20000268 Result: Down-regulated in Transcription
  misc_feature: MA Experiment 20000268 PARAMETER Experiment Name: At_100mM_NaCl__P Parameter: Age (day) Value: 14
  misc_feature: MA Experiment 20000268 PARAMETER Experiment Name: At_100mM_NaCl__P Parameter: Organism Value: A. thaliana
  misc_feature: MA Experiment 20000268 PARAMETER Experiment Name: At_100mM_NaCl__P Parameter: Plant Line Value: WS
  misc_feature: MA Experiment 20000268 PARAMETER Experiment Name: At_100mM_NaCl__P Parameter: Timepoint (hr) Value: 6
  misc_feature: MA Experiment 20000268 PARAMETER Experiment Name: At_100mM_NaCl__P Parameter: Tissue Value: Whole Plant
  misc_feature: MA Experiment 20000268 PARAMETER Experiment Name: At_100mM_NaCl__P Parameter: Treatment Value: 100mM NaCl vs. No Treatment
  misc_feature: MA Experiment ID: 20000286 Result: Down-regulated in Transcription
  misc_feature: MA Experiment 20000286 PARAMETER Experiment Name: At_Open_Flower_P Parameter: Age (day) Value: 21
  misc_feature: MA Experiment 20000286 PARAMETER Experiment Name: At_Open_Flower_P Parameter: Plant Line Value: WS
  misc_feature: MA Experiment 20000286 PARAMETER Experiment Name: At_Open_Flower_P Parameter: Tissue Value: Half Open vs. Whole Plant
  misc_feature: MA Experiment ID: 20000308 Result: Down-regulated in Transcription
  misc_feature: MA Experiment 20000308 PARAMETER Experiment Name: At_100mM_NaCl__P Parameter: Age (day) Value: 17
  misc_feature: MA Experiment 20000308 PARAMETER Experiment Name: At_100mM_NaCl__P Parameter: Organism Value: A. thaliana
  misc_feature: MA Experiment 20000308 PARAMETER Experiment Name: At_100mM_NaCl__P Parameter: Plant Line Value: WS
  misc_feature: MA Experiment 20000308 PARAMETER Experiment Name: At_100mM_NaCl__P Parameter: Timepoint (hr) Value: 72
  misc_feature: MA Experiment 20000308 PARAMETER Experiment Name: At_100mM_NaCl__P Parameter: Tissue Value: Whole Plant
  misc_feature: MA Experiment 20000308 PARAMETER Experiment Name: At_100mM_NaCl__P Parameter: Treatment Value: 100mM NaCl vs. No Treatment
  misc_feature: MA Experiment ID: 20000439 Result: Down-regulated in Transcription
  misc_feature: MA Experiment 20000439 PARAMETER Experiment Name: At_Roots__P Parameter: Age (day) Value: 14 vs. 21
  misc_feature: MA Experiment 20000439 PARAMETER Experiment Name: At_Roots__P Parameter: Organism Value: A. thaliana
  misc_feature: MA Experiment 20000439 PARAMETER Experiment Name: At_Roots__P Parameter: Tissue Value: Roots vs. Whole Plant
  misc_feature: MA Experiment ID: 20000441 Result: Up-regulated in Transcription
  misc_feature: MA Experiment 20000441 PARAMETER Experiment Name: At_1uM_BR-BRZ__P Parameter: Tissue Value: Shoot Apices
  misc_feature: MA Experiment 20000441 PARAMETER Experiment Name: At_1uM_BR-BRZ__P Parameter: Treatment Value: 1uM BR vs. No Treatment
  misc_feature: MA Experiment ID: 20000443 Result: Up-regulated in Transcription
  misc_feature: MA Experiment 20000443 PARAMETER Experiment Name: At_1uM_BR-BRZ__P Parameter: Tissue Value: Shoot Apices
  misc_feature: MA Experiment 20000443 PARAMETER Experiment Name: At_1uM_BR-BRZ__P Parameter: Treatment Value: 1uM BRZ vs. No Treatment
  misc_feature: MA Experiment ID: 20000573 Result: Up-regulated in Transcription
  misc_feature: MA Experiment 20000573 PARAMETER Experiment Name: At_100uM_ABA_Mutants__P Parameter: Organism Value: A. thaliana
  misc_feature: MA Experiment 20000573 PARAMETER Experiment Name: At_100uM_ABA_Mutants__P Parameter: Plant Line Value: CS22 vs. Ler wt
  misc_feature: MA Experiment 20000573 PARAMETER Experiment Name: At_100uM_ABA_Mutants__P Parameter: Timepoint (hr) Value: N/A
  misc_feature: MA Experiment 20000573 PARAMETER Experiment Name: At_100uM_ABA_Mutants__P Parameter: Tissue Value: Whole Plant
  misc_feature: MA Experiment 20000573 PARAMETER Experiment Name: At_100uM_ABA_Mutants__P Parameter: Treatment Value: None
  misc_feature: MA Experiment ID: 20000794 Result: Down-regulated in Transcription
  misc_feature: MA Experiment 20000794 PARAMETER Experiment Name: At_Petals_P Parameter: Age (day) Value: 23-25 days
  misc_feature: MA Experiment 20000794 PARAMETER Experiment Name: At_Petals_P Parameter: Plant Line Value: WS
  misc_feature: MA Experiment 20000794 PARAMETER Experiment Name: At_Petals_P Parameter: Tissue Value: Petals vs. Whole plant
  misc_feature: MA Experiment ID: 20001248 Result: Up-regulated in Transcription
  misc_feature: MA Experiment 20001248 PARAMETER Experiment Name: At_Far-red-induction_P Parameter: Age (day) Value: 7
  misc_feature: MA Experiment 20001248 PARAMETER Experiment Name: At_Far-red-induction_P Parameter: Light Value: Far-red vs. White
  misc_feature: MA Experiment 20001248 PARAMETER Experiment Name: At_Far-red-induction_P Parameter: Organism Value: A. thaliana
  misc_feature: MA Experiment 20001248 PARAMETER Experiment Name: At_Far-red-induction_P Parameter: Plant Line Value: Columbia
  misc_feature: MA Experiment 20001248 PARAMETER Experiment Name: At_Far-red-induction_P Parameter: Timepoint (hr) Value: 4
  misc_feature: MA Experiment 20001248 PARAMETER Experiment Name: At_Far-red-induction_P Parameter: Tissue Value: Whole Plant
  misc_feature: MA Experiment ID: 20001450 Result: Up-regulated in Transcription
  misc_feature: MA Experiment 20001450 PARAMETER Experiment Name: At_Far-red-induction_P Parameter: Age (day) Value: 7
  misc_feature: MA Experiment 20001450 PARAMETER Experiment Name: At_Far-red-induction_P Parameter: Light Value: Far-red vs. White
  misc_feature: MA Experiment 20001450 PARAMETER Experiment Name: At_Far-red-induction_P Parameter: Organism Value: A. thaliana
  misc_feature: MA Experiment 20001450 PARAMETER Experiment Name: At_Far-red-induction_P Parameter: Plant Line Value: Columbia
  misc_feature: MA Experiment 20001450 PARAMETER Experiment Name: At_Far-red-induction_P Parameter: Timepoint (hr) Value: 8
  misc_feature: MA Experiment 20001450 PARAMETER Experiment Name: At_Far-red-induction_P Parameter: Tissue Value: Whole Plant
  misc_feature: MA Experiment ID: 20001451 Result: Up-regulated in Transcription
  misc_feature: MA Experiment 20001451 PARAMETER Experiment Name: At_Far-red-induction_P Parameter: Age (day) Value: 7
  misc_feature: MA Experiment 20001451 PARAMETER Experiment Name: At_Far-red-induction_P Parameter: Light Value: Far-red vs. White
  misc_feature: MA Experiment 20001451 PARAMETER Experiment Name: At_Far-red-induction_P Parameter: Organism Value: A. thaliana
  misc_feature: MA Experiment 20001451 PARAMETER Experiment Name: At_Far-red-induction_P Parameter: Plant Line Value: Columbia
  misc_feature: MA Experiment 20001451 PARAMETER Experiment Name: At_Far-red-induction_P Parameter: Timepoint (hr) Value: 24
  misc_feature: MA Experiment 20001451 PARAMETER Experiment Name: At_Far-red-induction_P Parameter: Tissue Value: Whole Plant
  misc_feature: MA Experiment ID: 20001556 Result: Down-regulated in Transcription
  misc_feature: MA Experiment 20001556 PARAMETER Experiment Name: At_Drought_Soil_Dry_P Parameter: Age (day) Value: 26
  misc_feature: MA Experiment 20001556 PARAMETER Experiment Name: At_Drought_Soil_Dry_P Parameter: Organism Value: A. thaliana
  misc_feature: MA Experiment 20001556 PARAMETER Experiment Name: At_Drought_Soil_Dry_P Parameter: Plant Line Value: WS
  misc_feature: MA Experiment 20001556 PARAMETER Experiment Name: At_Drought_Soil_Dry_P Parameter: Post Timepoint (hr) Value: None
  misc_feature: MA Experiment 20001556 PARAMETER Experiment Name: At_Drought_Soil_Dry_P Parameter: Post-Treatment Value: None
  misc_feature: MA Experiment 20001556 PARAMETER Experiment Name: At_Drought_Soil_Dry_P Parameter: Timepoint (day) Value: 12
  misc_feature: MA Experiment 20001556 PARAMETER Experiment Name: At_Drought_Soil_Dry_P Parameter: Treatment Value: Drought vs. No Drought
  misc_feature: MA Experiment ID: 20001557 Result: Down-regulated in Transcription
  misc_feature: MA Experiment 20001557 PARAMETER Experiment Name: At_Drought_Soil_Dry_P Parameter: Age (day) Value: 27
  misc_feature: MA Experiment 20001557 PARAMETER Experiment Name: At_Drought_Soil_Dry_P Parameter: Organism Value: A. thaliana
  misc_feature: MA Experiment 20001557 PARAMETER Experiment Name: At_Drought_Soil_Dry_P Parameter: Plant Line Value: WS
  misc_feature: MA Experiment 20001557 PARAMETER Experiment Name: At_Drought_Soil_Dry_P Parameter: Post Timepoint (hr) Value: 3
  misc_feature: MA Experiment 20001557 PARAMETER Experiment Name: At_Drought_Soil_Dry_P Parameter: Post-Treatment Value: Re-Water vs. No Drought
  misc_feature: MA Experiment 20001557 PARAMETER Experiment Name: At_Drought_Soil_Dry_P Parameter: Timepoint (day) Value: 13
  misc_feature: MA Experiment 20001557 PARAMETER Experiment Name: At_Drought_Soil_Dry_P Parameter: Treatment Value: Drought vs. No Drought
  misc_feature: MA Experiment ID: 20001558 Result: Down-regulated in Transcription
  misc_feature: MA Experiment 20001558 PARAMETER Experiment Name: At_Drought_Soil_Dry_P Parameter: Age (day) Value: 27
  misc_feature: MA Experiment 20001558 PARAMETER Experiment Name: At_Drought_Soil_Dry_P Parameter: Organism Value: A. thaliana
  misc_feature: MA Experiment 20001558 PARAMETER Experiment Name: At_Drought_Soil_Dry_P Parameter: Plant Line Value: WS
  misc_feature: MA Experiment 20001558 PARAMETER Experiment Name: At_Drought_Soil_Dry_P Parameter: Post Timepoint (hr) Value: 6
  misc_feature: MA Experiment 20001558 PARAMETER Experiment Name: At_Drought_Soil_Dry_P Parameter: Post-Treatment Value: Re-Water vs. No Drought
  misc_feature: MA Experiment 20001558 PARAMETER Experiment Name: At_Drought_Soil_Dry_P Parameter: Timepoint (day) Value: 13
  misc_feature: MA Experiment 20001558 PARAMETER Experiment Name: At_Drought_Soil_Dry_P Parameter: Treatment Value: Drought vs. No Drought
  misc_feature: MA Experiment ID: 20001559 Result: Down-regulated in Transcription
  misc_feature: MA Experiment 20001559 PARAMETER Experiment Name: At_Drought_Soil_Dry_P Parameter: Age (day) Value: 28
  misc_feature: MA Experiment 20001559 PARAMETER Experiment Name: At_Drought_Soil_Dry_P Parameter: Organism Value: A. thaliana
  misc_feature: MA Experiment 20001559 PARAMETER Experiment Name: At_Drought_Soil_Dry_P Parameter: Plant Line Value: WS
  misc_feature: MA Experiment 20001559 PARAMETER Experiment Name: At_Drought_Soil_Dry_P Parameter: Post Timepoint (hr) Value: 29
  misc_feature: MA Experiment 20001559 PARAMETER Experiment Name: At_Drought_Soil_Dry_P Parameter: Post-Treatment Value: Re-Water vs. No Drought
  misc_feature: MA Experiment 20001559 PARAMETER Experiment Name: At_Drought_Soil_Dry_P Parameter: Timepoint (day) Value: 14
  misc_feature: MA Experiment 20001559 PARAMETER Experiment Name: At_Drought_Soil_Dry_P Parameter: Treatment Value: Drought vs. No Drought
  misc_feature: MA Experiment ID: 20001560 Result: Down-regulated in Transcription
  misc_feature: MA Experiment 20001560 PARAMETER Experiment Name: At_Drought_Soil_Dry_P Parameter: Age (day) Value: 28
  misc_feature: MA Experiment 20001560 PARAMETER Experiment Name: At_Drought_Soil_Dry_P Parameter: Organism Value: A. thaliana
  misc_feature: MA Experiment 20001560 PARAMETER Experiment Name: At_Drought_Soil_Dry_P Parameter: Plant Line Value: WS
  misc_feature: MA Experiment 20001560 PARAMETER Experiment Name: At_Drought_Soil_Dry_P Parameter: Post Timepoint (hr) Value: None
  misc_feature: MA Experiment 20001560 PARAMETER Experiment Name: At_Drought_Soil_Dry_P Parameter: Post-Treatment Value: None
  misc_feature: MA Experiment 20001560 PARAMETER Experiment Name: At_Drought_Soil_Dry_P Parameter: Timepoint (day) Value: 14
  misc_feature: MA Experiment 20001560 PARAMETER Experiment Name: At_Drought_Soil_Dry_P Parameter: Treatment Value: Drought vs. No Drought
  misc_feature: MA Experiment ID: 20001757 Result: Up-regulated in Transcription
  misc_feature: MA Experiment 20001757 PARAMETER Experiment Name: At_50mM_NH4NO3_L-to-H_P Parameter: Timepoint (hr) Value: 6
  misc_feature: MA Experiment 20001757 PARAMETER Experiment Name: At_50mM_NH4NO3_L-to-H_P Parameter: Tissue Value: Leaf
  misc_feature: MA Experiment 20001757 PARAMETER Experiment Name: At_50mM_NH4NO3_L-to-H_P Parameter: Treatment Value: 50mM NH4NO3 vs 100mM Mannitol
  misc_feature: MA Experiment ID: 20001906 Result: Down-regulated in Transcription
  misc_feature: MA Experiment 20001906 PARAMETER Experiment Name: At_Drought_Reproduction_P Parameter: Age (day) Value: 35
  misc_feature: MA Experiment 20001906 PARAMETER Experiment Name: At_Drought_Reproduction_P Parameter: Organism Value: A. thaliana
  misc_feature: MA Experiment 20001906 PARAMETER Experiment Name: At_Drought_Reproduction_P Parameter: Plant Line Value: WS
  misc_feature: MA Experiment 20001906 PARAMETER Experiment Name: At_Drought_Reproduction_P Parameter: Timepoint (day) Value: 5
  misc_feature: MA Experiment 20001906 PARAMETER Experiment Name: At_Drought_Reproduction_P Parameter: Tissue Value: Siliques
  misc_feature: MA Experiment 20001906 PARAMETER Experiment Name: At_Drought_Reproduction_P Parameter: Treatment Value: Drought vs. No Drought
  misc_feature: MA Experiment ID: 20001908 Result: Down-regulated in Transcription
  misc_feature: MA Experiment 20001908 PARAMETER Experiment Name: At_Drought_Reproduction_P Parameter: Age (day) Value: 40
  misc_feature: MA Experiment 20001908 PARAMETER Experiment Name: At_Drought_Reproduction_P Parameter: Organism Value: A. thaliana
  misc_feature: MA Experiment 20001908 PARAMETER Experiment Name: At_Drought_Reproduction_P Parameter: Plant Line Value: WS
  misc_feature: MA Experiment 20001908 PARAMETER Experiment Name: At_Drought_Reproduction_P Parameter: Timepoint (day) Value: 10
  misc_feature: MA Experiment 20001908 PARAMETER Experiment Name: At_Drought_Reproduction_P Parameter: Tissue Value: Siliques
  misc_feature: MA Experiment 20001908 PARAMETER Experiment Name: At_Drought_Reproduction_P Parameter: Treatment Value: Drought vs. No Drought

SEQ ID NO: 32767 - protein, 321 aa, Arabidopsis thaliana; identical to SEQ ID NO: 29177
  peptide (1)..(321): Ceres Seq. ID no. 12334929
  misc_feature (233)..(319): Pfam Name: 5'-AMP-activated protein kinase, beta subunit, Pfam Description: 5'-AMP-activated protein kinase, beta subunit,
  misc_feature (23)..(66): Homolog of NCBI NO: 29725558 NR Description: SNF1 kinase complex anchoring protein
  misc_feature (104)..(279): Homolog of NCBI NO: 29725558 NR Description: SNF1 kinase complex anchoring protein
  misc_feature (1)..(69): Homolog of NCBI NO: 6686784 NR Description: AKIN beta2 [Arabidopsis thaliana]
  misc_feature (104)..(321): Homolog of NCBI NO: 6686784 NR Description: AKIN beta2 [Arabidopsis thaliana]
  misc_feature (1)..(66): Homolog of NCBI NO: 5702015 NR Description: GAL83 protein [Solanum tuberosum]
  misc_feature (104)..(321): Homolog of NCBI NO: 5702015 NR Description: GAL83 protein [Solanum tuberosum]
  misc_feature (1)..(66): Homolog of NCBI NO: 15242175 NR Description: AKIN beta1; protein id: At5g21170.1, supported by
  misc_feature (95)..(321): Homolog of NCBI NO: 15242175 NR Description: AKIN beta1; protein id: At5g21170.1, supported by
  misc_feature (1)..(66): Homolog of NCBI NO: 6686782 NR Description: AKIN gamma [Arabidopsis thaliana]
  misc_feature (95)..(321): Homolog of NCBI NO: 6686782 NR Description: AKIN gamma [Arabidopsis thaliana]

SEQ ID NO: 32768 - protein, 276 aa, Arabidopsis thaliana; identical to SEQ ID NO: 29178
  peptide (1)..(276): Ceres Seq. ID no. 12334930
  misc_feature (188)..(274): Pfam Name: 5'-AMP-activated protein kinase, beta subunit, Pfam Description: 5'-AMP-activated protein kinase, beta subunit,
  misc_feature (1)..(21): Homolog of NCBI NO: 29725558 NR Description: SNF1 kinase complex anchoring protein
  misc_feature (59)..(234): Homolog of NCBI NO: 29725558 NR Description: SNF1 kinase complex anchoring protein
  misc_feature (1)..(24): Homolog of NCBI NO: 6686784 NR Description: AKIN beta2 [Arabidopsis thaliana]
  misc_feature (59)..(276): Homolog of NCBI NO: 6686784 NR Description: AKIN beta2 [Arabidopsis thaliana]
  misc_feature (1)..(21): Homolog of NCBI NO: 5702015 NR Description: GAL83 protein [Solanum tuberosum]
  misc_feature (59)..(276): Homolog of NCBI NO: 5702015 NR Description: GAL83 protein [Solanum tuberosum]
  misc_feature (1)..(21): Homolog of NCBI NO: 15242175 NR Description: AKIN beta1; protein id: At5g21170.1, supported by
  misc_feature (50)..(276): Homolog of NCBI NO: 15242175 NR Description: AKIN beta1; protein id: At5g21170.1, supported by
  misc_feature (1)..(21): Homolog of NCBI NO: 6686782 NR Description: AKIN gamma [Arabidopsis thaliana]
  misc_feature (50)..(276): Homolog of NCBI NO: 6686782 NR Description: AKIN gamma [Arabidopsis thaliana]

SEQ ID NO: 32769 - protein, 240 aa, Arabidopsis thaliana; identical to SEQ ID NO: 29179
  peptide (1)..(240): Ceres Seq. ID no. 12334931
  misc_feature (152)..(238): Pfam Name: 5'-AMP-activated protein kinase, beta subunit, Pfam Description: 5'-AMP-activated protein kinase, beta subunit,
  misc_feature (25)..(238): Homolog of NCBI NO: 12018316 NR Description: AMP-activated protein kinase beta-2 regulatory
  misc_feature (25)..(238): Homolog of NCBI NO: 4885561 NR Description: protein kinase, AMP-activated, beta 2
  misc_feature (24)..(240): Homolog of NCBI NO: 22324436 NR Description: AKIN beta1-like protein [Oryza sativa (japonica
  misc_feature (23)..(240): Homolog of NCBI NO: 15234895 NR Description: kinase like protein; protein id: At4g16360.1
  misc_feature (23)..(240): Homolog of NCBI NO: 11935162 NR Description: SNF1-related kinase complex anchoring protein
  misc_feature (23)..(198): Homolog of NCBI NO: 29725558 NR Description: SNF1 kinase complex anchoring protein
  misc_feature (23)..(240): Homolog of NCBI NO: 6686784 NR Description: AKIN beta2 [Arabidopsis thaliana]
  misc_feature (23)..(240): Homolog of NCBI NO: 5702015 NR Description: GAL83 protein [Solanum tuberosum]
  misc_feature (14)..(240): Homolog of NCBI NO: 15242175 NR Description: AKIN beta1; protein id: At5g21170.1, supported by
  misc_feature (14)..(240): Homolog of NCBI NO: 6686782 NR Description: AKIN gamma [Arabidopsis thaliana]

SEQ ID NO: 32770 - DNA, 1255 bp, Arabidopsis thaliana; identical to SEQ ID NO: 29180
  misc_feature (1)..(1255): Ceres Seq. ID no. 12329816

SEQ ID NO: 32771 - protein, 246 aa, Arabidopsis thaliana; identical to SEQ ID NO: 29181
  peptide (1)..(246): Ceres Seq. ID no. 12329817
  misc_feature (192)..(242): Pfam Name: PHD-finger Pfam Description: PHD-finger
  misc_feature (10)..(243): Homolog of NCBI NO: 15223786 NR Description: nucleic acid binding protein (alfin-1), putative
  misc_feature (10)..(245): Homolog of NCBI NO: 7488751 NR Description: probable zinc finger protein - alfalfa (fragment)
  misc_feature (1)..(245): Homolog of NCBI NO: 30687843 NR Description: zinc finger protein - like [Arabidopsis thaliana]
  misc_feature (9)..(245): Homolog of NCBI NO: 15239624 NR Description: nucleic acid binding protein - like
  misc_feature (1)..(245): Homolog of NCBI NO: 15229157 NR Description: nucleic acid binding protein-like
  misc_feature (3)..(246): Homolog of NCBI NO: 29124114 NR Description: putative PHD-type zinc finger protein
  misc_feature (1)..(246): Homolog of NCBI NO: 28876028 NR Description: putative PHD-finger domain containing protein
  misc_feature (3)..(246): Homolog of NCBI NO: 34900462 NR Description: putative nucleic acid binding protein
  misc_feature (4)..(246): Homolog of NCBI NO: 15239180 NR Description: nucleic acid binding protein-like
  misc_feature (1)..(246): Homolog of NCBI NO: 15229696 NR Description: putative nucleic acid binding protein

SEQ ID NO: 32772 - protein, 161 aa, Arabidopsis thaliana; identical to SEQ ID NO: 29182
  peptide (1)..(161): Ceres Seq. ID no. 12329818
  misc_feature (107)..(157): Pfam Name: PHD-finger Pfam Description: PHD-finger
  misc_feature (1)..(158): Homolog of NCBI NO: 15223786 NR Description: nucleic acid binding protein (alfin-1), putative
  misc_feature (1)..(160): Homolog of NCBI NO: 7488751 NR Description: probable zinc finger protein - alfalfa (fragment)
  misc_feature (1)..(160): Homolog of NCBI NO: 30687843 NR Description: zinc finger protein - like [Arabidopsis thaliana]
  misc_feature (1)..(160): Homolog of NCBI NO: 15239624 NR Description: nucleic acid binding protein - like
  misc_feature (1)..(160): Homolog of NCBI NO: 15229157 NR Description: nucleic acid binding protein-like
  misc_feature (1)..(161): Homolog of NCBI NO: 29124114 NR Description: putative PHD-type zinc finger protein
  misc_feature (1)..(161): Homolog of NCBI NO: 28876028 NR Description: putative PHD-finger domain containing protein
  misc_feature (1)..(161): Homolog of NCBI NO: 34900462 NR Description: putative nucleic acid binding protein
  misc_feature (1)..(161): Homolog of NCBI NO: 15239180 NR Description: nucleic acid binding protein-like
  misc_feature (1)..(161): Homolog of NCBI NO: 15229696 NR Description: putative nucleic acid binding protein

SEQ ID NO: 32773 - DNA, 999 bp, Arabidopsis thaliana; identical to SEQ ID NO: 29183
  misc_feature (1)..(999): Ceres Seq. ID no. 12330335
  misc_feature: MA Experiment ID: 108434 Result: Up-regulated in Transcription
  misc_feature: MA Experiment 108434 PARAMETER Experiment Name: At_Root_Tips_cDNA_P Parameter: Tissue Value: Root Tips
  misc_feature: MA Experiment ID: 108462 Result: Down-regulated in Transcription
  misc_feature: MA Experiment 108462 PARAMETER Experiment Name: At_Germinating_Seeds_cDNA_P Parameter: Age (day) Value: 2 vs. 0
  misc_feature: MA Experiment 108462 PARAMETER Experiment Name: At_Germinating_Seeds_cDNA_P Parameter: Tissue Value: Germinating Seeds
  misc_feature: MA Experiment ID: 108463 Result: Down-regulated in Transcription
  misc_feature: MA Experiment 108463 PARAMETER Experiment Name: At_Germinating_Seeds_cDNA_P Parameter: Age (day) Value: 3 vs. 0
  misc_feature: MA Experiment 108463 PARAMETER Experiment Name: At_Germinating_Seeds_cDNA_P Parameter: Tissue Value: Germinating Seeds
  misc_feature: MA Experiment ID: 108573 Result: Down-regulated in Transcription
  misc_feature: MA Experiment 108573 PARAMETER Experiment Name: At_Drought_cDNA_P Parameter: Timepoint (hr) Value: 6
  misc_feature: MA Experiment 108573 PARAMETER Experiment Name: At_Drought_cDNA_P Parameter: Tissue Value: Aerial
  misc_feature: MA Experiment 108573 PARAMETER Experiment Name: At_Drought_cDNA_P Parameter: Treatment Value: Drought vs. No Drought
  misc_feature: MA Experiment ID: 108595 Result: Down-regulated in Transcription
  misc_feature: MA Experiment 108595 PARAMETER Experiment Name: At_Ler-pi_Ovule_cDNA_P Parameter: Plant Line Value: null
  misc_feature: MA Experiment ID: 20000224 Result: Down-regulated in Transcription
  misc_feature: MA Experiment ID: 20000234 Result: Up-regulated in Transcription
  misc_feature: MA Experiment 20000234 PARAMETER Experiment Name: At_Siliques_P Parameter: Age (day) Value: 21
  misc_feature: MA Experiment 20000234 PARAMETER Experiment Name: At_Siliques_P Parameter: Organism Value: A. thaliana
  misc_feature: MA Experiment 20000234 PARAMETER Experiment Name: At_Siliques_P Parameter: Plant Line Value: WS
  misc_feature: MA Experiment 20000234 PARAMETER Experiment Name: At_Siliques_P Parameter: Tissue Value: Less Than 5mm Siliques vs. Whole Plant
  misc_feature: MA Experiment ID: 20000437 Result: Down-regulated in Transcription
  misc_feature: MA Experiment 20000437 PARAMETER Experiment Name: At_Drought_P Parameter: Age (day) Value: 8
  misc_feature: MA Experiment 20000437 PARAMETER Experiment Name: At_Drought_P Parameter: Organism Value: A. thaliana
  misc_feature: MA Experiment 20000437 PARAMETER Experiment Name: At_Drought_P Parameter: Plant Line Value: WS
  misc_feature: MA Experiment 20000437 PARAMETER Experiment Name: At_Drought_P Parameter: Timepoint (hr) Value: 24
  misc_feature: MA Experiment 20000437 PARAMETER Experiment Name: At_Drought_P Parameter: Tissue Value: Whole Plant
  misc_feature: MA Experiment 20000437 PARAMETER Experiment Name: At_Drought_P Parameter: Treatment Value: Drought vs. No Drought
  misc_feature: MA Experiment ID: 20000794 Result: Down-regulated in Transcription
  misc_feature: MA Experiment 20000794 PARAMETER Experiment Name: At_Petals_P Parameter: Age (day) Value: 23-25 days
  misc_feature: MA Experiment 20000794 PARAMETER Experiment Name: At_Petals_P Parameter: Plant Line Value: WS
  misc_feature: MA Experiment 20000794 PARAMETER Experiment Name: At_Petals_P Parameter: Tissue Value: Petals vs. Whole plant
  misc_feature: MA Experiment ID: 20001451 Result: Down-regulated in Transcription
  misc_feature: MA Experiment 20001451 PARAMETER Experiment Name: At_Far-red-induction_P Parameter: Age (day) Value: 7
  misc_feature: MA Experiment 20001451 PARAMETER Experiment Name: At_Far-red-induction_P Parameter: Light Value: Far-red vs. White
  misc_feature: MA Experiment 20001451 PARAMETER Experiment Name: At_Far-red-induction_P Parameter: Organism Value: A. thaliana
  misc_feature: MA Experiment 20001451 PARAMETER Experiment Name: At_Far-red-induction_P Parameter: Plant Line Value: Columbia
  misc_feature: MA Experiment 20001451 PARAMETER Experiment Name: At_Far-red-induction_P Parameter: Timepoint (hr) Value: 24
  misc_feature: MA Experiment 20001451 PARAMETER Experiment Name: At_Far-red-induction_P Parameter: Tissue Value: Whole Plant
  misc_feature: MA Experiment ID: 20001558 Result: Up-regulated in Transcription
  misc_feature: MA Experiment 20001558 PARAMETER Experiment Name: At_Drought_Soil_Dry_P Parameter: Age (day) Value: 27
  misc_feature: MA Experiment 20001558 PARAMETER Experiment Name: At_Drought_Soil_Dry_P Parameter: Organism Value: A. thaliana
  misc_feature: MA Experiment 20001558 PARAMETER Experiment Name: At_Drought_Soil_Dry_P Parameter: Plant Line Value: WS
  misc_feature: MA Experiment 20001558 PARAMETER Experiment Name: At_Drought_Soil_Dry_P Parameter: Post Timepoint (hr) Value: 6
  misc_feature: MA Experiment 20001558 PARAMETER Experiment Name: At_Drought_Soil_Dry_P Parameter: Post-Treatment Value: Re-Water vs. No Drought
  misc_feature: MA Experiment 20001558 PARAMETER Experiment Name: At_Drought_Soil_Dry_P Parameter: Timepoint (day) Value: 13
  misc_feature: MA Experiment 20001558 PARAMETER Experiment Name: At_Drought_Soil_Dry_P Parameter: Treatment Value: Drought vs. No Drought
  misc_feature: MA Experiment ID: 20001757 Result: Up-regulated in Transcription
  misc_feature: MA Experiment 20001757 PARAMETER Experiment Name: At_50mM_NH4NO3_L-to-H_P Parameter: Timepoint (hr) Value: 6
  misc_feature: MA Experiment 20001757 PARAMETER Experiment Name: At_50mM_NH4NO3_L-to-H_P Parameter: Tissue Value: Leaf
  misc_feature: MA Experiment 20001757 PARAMETER Experiment Name: At_50mM_NH4NO3_L-to-H_P Parameter: Treatment Value: 50mM NH4NO3 vs 100mM Mannitol

SEQ ID NO: 32774 - protein, 242 aa, Arabidopsis thaliana; identical to SEQ ID NO: 29184
  peptide (1)..(242): Ceres Seq. ID no. 12330336
  misc_feature (82)..(134): Pfam Name: Ribosomal protein L30p/L7e Pfam Description: Ribosomal protein L30p/L7e
  misc_feature (8)..(242): Homolog of NCBI NO: 307388 NR Description: ribosomal protein L7
  misc_feature (8)..(241): Homolog of NCBI NO: 28630259 NR Description: ribosomal protein L7 [Branchiostoma lanceolatum]
  misc_feature (4)..(242): Homolog of NCBI NO: 38346542 NR Description: OSJNBa0035M09.3 [Oryza sativa (japonica
  misc_feature (2)..(242): Homolog of NCBI NO: 38637548 NR Description: putative 60S ribosomal protein L7
  misc_feature (1)..(242): Homolog of NCBI NO: 445613 NR Description: ribosomal protein L7
  misc_feature (1)..(242): Homolog of NCBI NO: 27311547 NR Description: Unknown protein [Arabidopsis thaliana]
  misc_feature (1)..(242): Homolog of NCBI NO: 30689617 NR Description: 60S ribosomal protein L7 (RPL7C) [Arabidopsis
  misc_feature (3)..(242): Homolog of NCBI NO: 15231288 NR Description: ribosomal protein, putative
  misc_feature (1)..(242): Homolog of NCBI NO: 30689623 NR Description: 60S ribosomal protein L7 (RPL7C) [Arabidopsis
  misc_feature (1)..(242): Homolog of NCBI NO: 15226212 NR Description: putative ribosomal protein L7

SEQ ID NO: 32775 - DNA, 1060 bp, Arabidopsis thaliana; identical to SEQ ID NO: 29185
  misc_feature (1)..(1060): Ceres Seq. ID no. 13497491
  misc_feature: MA Experiment ID: 108433 Result: Down-regulated in Transcription
  misc_feature: MA Experiment 108433 PARAMETER Experiment Name: At_rhl_Mutant2_cDNA_P Parameter: Age (day) Value: 7
  misc_feature: MA Experiment 108433 PARAMETER Experiment Name: At_rhl_Mutant2_cDNA_P Parameter: Organism Value: A. thaliana
  misc_feature: MA Experiment 108433 PARAMETER Experiment Name: At_rhl_Mutant2_cDNA_P Parameter: Plant Line Value: rhl Mutant vs. wt landsburg
  misc_feature: MA Experiment 108433 PARAMETER Experiment Name: At_rhl_Mutant2_cDNA_P Parameter: Tissue Value: Roots
  misc_feature: MA Experiment ID: 108461 Result: Down-regulated in Transcription
  misc_feature: MA Experiment 108461 PARAMETER Experiment Name: At_Germinating_Seeds_cDNA_P Parameter: Age (day) Value: 1 vs. 0
  misc_feature: MA Experiment 108461 PARAMETER Experiment Name: At_Germinating_Seeds_cDNA_P Parameter: Tissue Value: Germinating Seeds
  misc_feature: MA Experiment ID: 108462 Result: Down-regulated in Transcription
  misc_feature: MA Experiment 108462 PARAMETER Experiment Name: At_Germinating_Seeds_cDNA_P Parameter: Age (day) Value: 2 vs. 0
  misc_feature: MA Experiment 108462 PARAMETER Experiment Name: At_Germinating_Seeds_cDNA_P Parameter: Tissue Value: Germinating Seeds
  misc_feature: MA Experiment ID: 108463 Result: Down-regulated in Transcription
  misc_feature: MA Experiment 108463 PARAMETER Experiment Name: At_Germinating_Seeds_cDNA_P Parameter: Age (day) Value: 3 vs. 0
  misc_feature: MA Experiment 108463 PARAMETER Experiment Name: At_Germinating_Seeds_cDNA_P Parameter: Tissue Value: Germinating Seeds
  misc_feature: MA Experiment ID: 108464 Result: Down-regulated in Transcription
  misc_feature: MA Experiment 108464 PARAMETER Experiment Name: At_Germinating_Seeds_cDNA_P Parameter: Age (day) Value: 4 vs. 0
  misc_feature: MA Experiment 108464 PARAMETER Experiment Name: At_Germinating_Seeds_cDNA_P Parameter: Tissue Value: Germinating Seeds
  misc_feature: MA Experiment ID: 108488 Result: Down-regulated in Transcription
  misc_feature: MA Experiment ID: 108573 Result: Up-regulated in Transcription
  misc_feature: MA Experiment 108573 PARAMETER Experiment Name: At_Drought_cDNA_P Parameter: Timepoint (hr) Value: 6
  misc_feature: MA Experiment 108573 PARAMETER Experiment Name: At_Drought_cDNA_P Parameter: Tissue Value: Aerial
  misc_feature: MA Experiment 108573 PARAMETER Experiment Name: At_Drought_cDNA_P Parameter: Treatment Value: Drought vs. No Drought
  misc_feature: MA Experiment ID: 108574 Result: Up-regulated in Transcription
  misc_feature: MA Experiment 108574 PARAMETER Experiment Name: At_Wounding__cDNA_P Parameter: Timepoint (hr) Value: 1
  misc_feature: MA Experiment 108574 PARAMETER Experiment Name: At_Wounding__cDNA_P Parameter: Tissue Value: Aerial
  misc_feature: MA Experiment 108574 PARAMETER Experiment Name: At_Wounding__cDNA_P Parameter: Treatment Value: Wounding vs. No Wounding
  misc_feature: MA Experiment ID: 108579 Result: Up-regulated in Transcription
  misc_feature: MA Experiment 108579 PARAMETER Experiment Name: At_4deg_Cold_cDNA_P Parameter: Temperature (deg C) Value: 4 vs. 22
  misc_feature: MA Experiment 108579 PARAMETER Experiment Name: At_4deg_Cold_cDNA_P Parameter: Timepoint (hr) Value: 6
  misc_feature: MA Experiment 108579 PARAMETER Experiment Name: At_4deg_Cold_cDNA_P Parameter: Tissue Value: Aerial
  misc_feature: MA Experiment ID: 108585 Result: Up-regulated in Transcription
  misc_feature: MA Experiment 108585 PARAMETER Experiment Name: At_5mM_NaNP_cDNA_P Parameter: Timepoint (hr) Value: 6
  misc_feature: MA Experiment 108585 PARAMETER Experiment Name: At_5mM_NaNP_cDNA_P Parameter: Tissue Value: Aerial
  misc_feature: MA Experiment 108585 PARAMETER Experiment Name: At_5mM_NaNP_cDNA_P Parameter: Treatment Value: null
  misc_feature: MA Experiment ID: 108595 Result: Up-regulated in Transcription
  misc_feature: MA Experiment 108595 PARAMETER Experiment Name: At_Ler-pi_Ovule_cDNA_P Parameter: Plant Line Value: null
  misc_feature: MA Experiment ID: 108668 Result: Up-regulated in Transcription
  misc_feature: MA Experiment 108668 PARAMETER Experiment Name: At_2mM_SA_cDNA_P Parameter: Plant Line Value: WS
  misc_feature: MA Experiment 108668 PARAMETER Experiment Name: At_2mM_SA_cDNA_P Parameter: Timepoint (hr) Value: 6
  misc_feature: MA Experiment 108668 PARAMETER Experiment Name: At_2mM_SA_cDNA_P Parameter: Treatment Value: 2mM SA vs. No Treatment
  misc_feature: MA Experiment ID: 20000111 Result: Up-regulated in Transcription
  misc_feature: MA Experiment 20000111 PARAMETER Experiment Name: At_42deg_Heat_cDNA_P Parameter: Temperature (deg C) Value: 42 vs. 22
  misc_feature: MA Experiment 20000111 PARAMETER Experiment Name: At_42deg_Heat_cDNA_P Parameter: Timepoint (hr) Value: 6
  misc_feature: MA Experiment 20000111 PARAMETER Experiment Name: At_42deg_Heat_cDNA_P Parameter: Tissue Value: Aerial
  misc_feature: MA Experiment ID: 20000112 Result: Up-regulated in Transcription
  misc_feature: MA Experiment 20000112 PARAMETER Experiment Name: At_42deg_Heat_cDNA_P Parameter: Temperature (deg C) Value: 42 vs. 22
  misc_feature: MA Experiment 20000112 PARAMETER Experiment Name: At_42deg_Heat_cDNA_P Parameter: Timepoint (hr) Value: 2
  misc_feature: MA Experiment 20000112 PARAMETER Experiment Name: At_42deg_Heat_cDNA_P Parameter: Tissue Value: Aerial
  misc_feature: MA Experiment ID: 20000113 Result: Up-regulated in Transcription
  misc_feature: MA Experiment 20000113 PARAMETER Experiment Name: At_42deg_Heat_cDNA_P Parameter: Temperature (deg C) Value: 42 vs. 22
  misc_feature: MA Experiment 20000113 PARAMETER Experiment Name: At_42deg_Heat_cDNA_P Parameter: Timepoint (hr) Value: 8
  misc_feature: MA Experiment 20000113 PARAMETER Experiment Name: At_42deg_Heat_cDNA_P Parameter: Tissue Value: Aerial
  misc_feature: MA Experiment ID: 20000173 Result: Up-regulated in Transcription
  misc_feature: MA Experiment 20000173 PARAMETER Experiment Name: At_42deg_Heat_P Parameter: Age (day) Value: 14
  misc_feature: MA Experiment 20000173 PARAMETER Experiment Name: At_42deg_Heat_P Parameter: Organism Value: A. thaliana
  misc_feature: MA Experiment 20000173 PARAMETER Experiment Name: At_42deg_Heat_P Parameter: Plant Line Value: WS
  misc_feature: MA Experiment 20000173 PARAMETER Experiment Name: At_42deg_Heat_P Parameter: Temperature (deg C) Value: 42 vs. 22
  misc_feature: MA Experiment 20000173 PARAMETER Experiment Name: At_42deg_Heat_P Parameter: Timepoint (hr) Value: 6
  misc_feature: MA Experiment 20000173 PARAMETER Experiment Name: At_42deg_Heat_P Parameter: Tissue Value: Aerial
  misc_feature: MA Experiment ID: 20000180 Result: Down-regulated in Transcription
  misc_feature: MA Experiment 20000180 PARAMETER Experiment Name: At_Germinating_Seeds_P Parameter: Age (hr) Value: 24 vs. 0
  misc_feature: MA Experiment 20000180 PARAMETER Experiment Name: At_Germinating_Seeds_P Parameter: Tissue Value: Germinating Seeds
  misc_feature: MA Experiment ID: 20000182 Result: Up-regulated in Transcription
  misc_feature: MA Experiment 20000182 PARAMETER Experiment Name: At_2mM_SA_P Parameter: Age (day) Value: 14
  misc_feature: MA Experiment 20000182 PARAMETER Experiment Name: At_2mM_SA_P Parameter: Organism Value: A. thaliana
  misc_feature: MA Experiment 20000182 PARAMETER Experiment Name: At_2mM_SA_P Parameter: Plant Line Value: WS
  misc_feature: MA Experiment 20000182 PARAMETER Experiment Name: At_2mM_SA_P Parameter: Timepoint (hr) Value: 6
  misc_feature: MA Experiment 20000182 PARAMETER Experiment Name: At_2mM_SA_P Parameter: Tissue Value: Aerial
  misc_feature: MA Experiment 20000182 PARAMETER Experiment Name: At_2mM_SA_P Parameter: Treatment Value: 2mM SA vs. No Treatment
  misc_feature: MA Experiment ID: 20000495 Result: Down-regulated in Transcription
  misc_feature: MA Experiment 20000495 PARAMETER Experiment Name: At_Guard_Cells_P Parameter: Harvest Date Value: 8/2/2002
  misc_feature: MA Experiment 20000495 PARAMETER Experiment Name: At_Guard_Cells_P Parameter: Organism Value: A. thaliana
  misc_feature: MA Experiment 20000495 PARAMETER Experiment Name: At_Guard_Cells_P Parameter: Tissue Value: Guard Cells vs. Leaves
  misc_feature: MA Experiment ID: 20001906 Result: Up-regulated in Transcription
  misc_feature: MA Experiment 20001906 PARAMETER Experiment Name: At_Drought_Reproduction_P Parameter: Age (day) Value: 35
  misc_feature: MA Experiment 20001906 PARAMETER Experiment Name: At_Drought_Reproduction_P Parameter: Organism Value: A. thaliana
  misc_feature: MA Experiment 20001906 PARAMETER Experiment Name: At_Drought_Reproduction_P Parameter: Plant Line Value: WS
  misc_feature: MA Experiment 20001906 PARAMETER Experiment Name: At_Drought_Reproduction_P Parameter: Timepoint (day) Value: 5
  misc_feature: MA Experiment 20001906 PARAMETER Experiment Name: At_Drought_Reproduction_P Parameter: Tissue Value: Siliques
  misc_feature: MA Experiment 20001906 PARAMETER Experiment Name: At_Drought_Reproduction_P Parameter: Treatment Value: Drought vs. No Drought
  misc_feature: MA Experiment ID: 20001908 Result: Up-regulated in Transcription
  misc_feature: MA Experiment 20001908 PARAMETER Experiment Name: At_Drought_Reproduction_P Parameter: Age (day) Value: 40
  misc_feature: MA Experiment 20001908 PARAMETER Experiment Name: At_Drought_Reproduction_P Parameter: Organism Value: A. thaliana
  misc_feature: MA Experiment 20001908 PARAMETER Experiment Name: At_Drought_Reproduction_P Parameter: Plant Line Value: WS
  misc_feature: MA Experiment 20001908 PARAMETER Experiment Name: At_Drought_Reproduction_P Parameter: Timepoint (day) Value: 10
  misc_feature: MA Experiment 20001908 PARAMETER Experiment Name: At_Drought_Reproduction_P Parameter: Tissue Value: Siliques
  misc_feature: MA Experiment 20001908 PARAMETER Experiment Name: At_Drought_Reproduction_P Parameter: Treatment Value: Drought vs. No Drought
  misc_feature: MA Experiment ID: 20001911 Result: Up-regulated in Transcription
  misc_feature: MA Experiment 20001911 PARAMETER Experiment Name: At_Drought_Reproduction_P Parameter: Age (day) Value: 40
  misc_feature: MA Experiment 20001911 PARAMETER Experiment Name: At_Drought_Reproduction_P Parameter: Organism Value: A. thaliana
  misc_feature: MA Experiment 20001911 PARAMETER Experiment Name: At_Drought_Reproduction_P Parameter: Plant Line Value: WS
  misc_feature: MA Experiment 20001911 PARAMETER Experiment Name: At_Drought_Reproduction_P Parameter: Timepoint (day) Value: 10
  misc_feature: MA Experiment 20001911 PARAMETER Experiment Name: At_Drought_Reproduction_P Parameter: Tissue Value: Flowers
  misc_feature: MA Experiment 20001911 PARAMETER Experiment Name: At_Drought_Reproduction_P Parameter: Treatment Value: Drought vs. No Drought

SEQ ID NO: 32776 - protein, 246 aa, Arabidopsis thaliana; identical to SEQ ID NO: 29186
  peptide (1)..(246): Ceres Seq. ID no. 13497492
  misc_feature (13)..(234): Pfam Name: Rubber elongation factor protein (REF) Pfam Description: Rubber elongation factor protein (REF)
  misc_feature (64)..(233): Homolog of NCBI NO: 14423933 NR Description: Small rubber particle protein (SRPP) (22 kDa particle protein) (22 kDa RPP) (Latex allergen Hev b 3) (27 kDa
  misc_feature (37)..(135): Homolog of NCBI NO: 15214302 NR Description: Stress-related protein (PvSRP)
  misc_feature (123)..(231): Homolog of NCBI NO: 15214302 NR Description: Stress-related protein (PvSRP)
  misc_feature (18)..(245): Homolog of NCBI NO: 15214353 NR Description: Hypothetical protein from PAC P0001A07
  misc_feature (8)..(237): Homolog of NCBI NO: 33332330 NR Description: rubber synthesis protein [Parthenium argentatum]
  misc_feature (1)..(239): Homolog of NCBI NO: 29367349 NR Description: stress-related protein-like protein
  misc_feature (1)..(239): Homolog of NCBI NO: 22831130 NR Description: putative stress-related protein
  misc_feature (74)..(240): Homolog of NCBI NO: 37622210 NR Description: small rubber particle protein [Hevea brasiliensis]
  misc_feature (1)..(235): Homolog of NCBI NO: 15214303 NR Description: Stress-related protein
  misc_feature (1)..(246): Homolog of NCBI NO: 15230002 NR Description: stress related protein -related [Arabidopsis

SEQ ID NO: 32777 - protein, 233 aa, Arabidopsis thaliana; identical to SEQ ID NO: 29187
  peptide (1)..(233): Ceres Seq. ID no. 13497493
  misc_feature (1)..(221): Pfam Name: Rubber elongation factor protein (REF) Pfam Description: Rubber elongation factor protein (REF)
  misc_feature (51)..(220): Homolog of NCBI NO: 14423933 NR Description: Small rubber particle protein (SRPP) (22 kDa particle protein) (22 kDa RPP) (Latex allergen Hev b 3) (27 kDa
  misc_feature (24)..(122): Homolog of NCBI NO: 15214302 NR Description: Stress-related protein (PvSRP)
  misc_feature (110)..(218): Homolog of NCBI NO: 15214302 NR Description: Stress-related protein (PvSRP)
  misc_feature (5)..(232): Homolog of NCBI NO: 15214353 NR Description: Hypothetical protein from PAC P0001A07
  misc_feature (1)..(224): Homolog of NCBI NO: 33332330 NR Description: rubber synthesis protein [Parthenium argentatum]
  misc_feature (1)..(226): Homolog of NCBI NO: 29367349 NR Description: stress-related protein-like protein
  misc_feature (1)..(226): Homolog of NCBI NO: 22831130 NR Description: putative stress-related protein
  misc_feature (61)..(227): Homolog of NCBI NO: 37622210 NR Description: small rubber particle protein [Hevea brasiliensis]
  misc_feature (1)..(222): Homolog of NCBI NO: 15214303 NR Description: Stress-related protein
  misc_feature (1)..(233): Homolog of NCBI NO: 15230002 NR Description: stress related protein -related [Arabidopsis

SEQ ID NO: 32778 - protein, 161 aa, Arabidopsis thaliana; identical to SEQ ID NO: 29188
  peptide (1)..(161): Ceres Seq. ID no. 13497494
  misc_feature (1)..(149): Pfam Name: Rubber elongation factor protein (REF) Pfam Description: Rubber elongation factor protein (REF)
  misc_feature (1)..(148): Homolog of NCBI NO: 14423933 NR Description: Small rubber particle protein (SRPP) (22 kDa particle protein) (22 kDa RPP) (Latex allergen Hev b 3) (27 kDa
  misc_feature (1)..(50): Homolog of NCBI NO: 15214302 NR Description: Stress-related protein (PvSRP)
  misc_feature (38)..(146): Homolog of NCBI NO: 15214302 NR Description: Stress-related protein (PvSRP)
  misc_feature (1)..(160): Homolog of NCBI NO: 15214353 NR Description: Hypothetical protein from PAC P0001A07
  misc_feature (1)..(152): Homolog of NCBI NO: 33332330 NR Description: rubber synthesis protein [Parthenium argentatum]
  misc_feature (1)..(154): Homolog of NCBI NO: 29367349 NR Description: stress-related protein-like protein
  misc_feature (1)..(154): Homolog of NCBI NO: 22831130 NR Description: putative stress-related protein
  misc_feature (1)..(155): Homolog of NCBI NO: 37622210 NR Description: small rubber particle protein [Hevea brasiliensis]
  misc_feature (1)..(150): Homolog of NCBI NO: 15214303 NR Description: Stress-related protein
  misc_feature (1)..(161): Homolog of NCBI NO: 15230002 NR Description: stress related protein -related [Arabidopsis

SEQ ID NO: 32779 - DNA, 1143 bp, Arabidopsis thaliana; identical to SEQ ID NO: 29189
  misc_feature (1)..(1143): Ceres Seq. ID no. 12738570
  misc_feature: MA Experiment ID: 108434 Result: Up-regulated in Transcription
  misc_feature: MA Experiment 108434 PARAMETER Experiment Name: At_Root_Tips_cDNA_P Parameter: Tissue Value: Root Tips
  misc_feature: MA Experiment ID: 108595 Result: Down-regulated in Transcription
  misc_feature: MA Experiment 108595 PARAMETER Experiment Name: At_Ler-pi_Ovule_cDNA_P Parameter: Plant Line Value: null
  misc_feature: MA Experiment ID: 20000185 Result: Up-regulated in Transcription
  misc_feature: MA Experiment 20000185 PARAMETER Experiment Name: At_Roots__P Parameter: Age (day) Value: 7 vs. 21
  misc_feature: MA Experiment 20000185 PARAMETER Experiment Name: At_Roots__P Parameter: Organism Value: A. thaliana
  misc_feature: MA Experiment 20000185 PARAMETER Experiment Name: At_Roots__P Parameter: Tissue Value: Roots vs. Whole Plant
  misc_feature: MA Experiment ID: 20000439 Result: Up-regulated in Transcription
  misc_feature: MA Experiment 20000439 PARAMETER Experiment Name: At_Roots__P Parameter: Age (day) Value: 14 vs. 21
  misc_feature: MA Experiment 20000439 PARAMETER Experiment Name: At_Roots__P Parameter: Organism Value: A. thaliana
  misc_feature: MA Experiment 20000439 PARAMETER Experiment Name: At_Roots__P Parameter: Tissue Value: Roots vs. Whole Plant
  misc_feature: MA Experiment ID: 20000794 Result: Up-regulated in Transcription
  misc_feature: MA Experiment 20000794 PARAMETER Experiment Name: At_Petals_P Parameter: Age (day) Value: 23-25 days
  misc_feature: MA Experiment 20000794 PARAMETER Experiment Name: At_Petals_P Parameter: Plant Line Value: WS
  misc_feature: MA Experiment 20000794 PARAMETER Experiment Name: At_Petals_P Parameter: Tissue Value: Petals vs. Whole plant

SEQ ID NO: 32780 - protein, 280 aa, Arabidopsis thaliana; identical to SEQ ID NO: 29190
  peptide (1)..(280): Ceres Seq. ID no. 12738571
  misc_feature (9)..(195): Pfam Name: Peptidase M16 inactive domain Pfam Description: Peptidase M16 inactive domain
  misc_feature (28)..(276): Homolog of NCBI NO: 14279470 NR Description: C3meo4 [Oryza sativa]
  misc_feature (1)..(276): Homolog of NCBI NO: 34910490 NR Description: putative mitochondrial processing peptidase beta
  misc_feature (1)..(280): Homolog of NCBI NO: 477280 NR Description: ubiquinol-cytochrome-c reductase (EC 1.10.2.2)
  misc_feature (1)..(280): Homolog of NCBI NO: 587566 NR Description: mitochondrial processing peptidase [Solanum
  misc_feature (1)..(280): Homolog of NCBI NO: 587564 NR Description: mitochondrial processing peptidase [Solanum
  misc_feature (1)..(280): Homolog of NCBI NO: 477819 NR Description: ubiquinol-cytochrome-c reductase (EC 1.10.2.2)
  misc_feature (1)..(280): Homolog of NCBI NO: 13959067 NR Description: mitochondrial processing peptidase [Avicennia
  misc_feature (1)..(280): Homolog of NCBI NO: 12802327 NR Description: mitochondrial processing peptidase beta subunit
  misc_feature (1)..(252): Homolog of NCBI NO: 30678485 NR Description: mitochondrial processing peptidase -related
  misc_feature (1)..(280): Homolog of NCBI NO: 15232845 NR Description: putative mitochondrial processing peptidase

SEQ ID NO: 32781 - protein, 253 aa, Arabidopsis thaliana; identical to SEQ ID NO: 29191
  peptide (1)..(253): Ceres Seq. ID no. 12738572
  misc_feature (1)..(168): Pfam Name: Peptidase M16 inactive domain Pfam Description: Peptidase M16 inactive domain
  misc_feature (1)..(249): Homolog of NCBI NO: 14279470 NR Description: C3meo4 [Oryza sativa]
  misc_feature (1)..(249): Homolog of NCBI NO: 34910490 NR Description: putative mitochondrial processing peptidase beta
  misc_feature (1)..(253): Homolog of NCBI NO: 477280 NR Description: ubiquinol-cytochrome-c reductase (EC 1.10.2.2)
  misc_feature (1)..(253): Homolog of NCBI NO: 587566 NR Description: mitochondrial processing peptidase [Solanum
  misc_feature (1)..(253): Homolog of NCBI NO: 587564 NR Description: mitochondrial processing peptidase [Solanum
  misc_feature (1)..(253): Homolog of NCBI NO: 477819 NR Description: ubiquinol-cytochrome-c reductase (EC 1.10.2.2)
  misc_feature (1)..(253): Homolog of NCBI NO: 13959067 NR Description: mitochondrial processing peptidase [Avicennia
  misc_feature (1)..(253): Homolog of NCBI NO: 12802327 NR Description: mitochondrial processing peptidase beta subunit
  misc_feature (1)..(225): Homolog of NCBI NO: 30678485 NR Description: mitochondrial processing peptidase -related
  misc_feature (1)..(253): Homolog of NCBI NO: 15232845 NR Description: putative mitochondrial processing peptidase

SEQ ID NO: 32782 - protein, 204 aa, Arabidopsis thaliana; identical to SEQ ID NO: 29192
  peptide (1)..(204): Ceres Seq. ID no. 12738573
  misc_feature (1)..(119): Pfam Name: Peptidase M16 inactive domain Pfam Description: Peptidase M16 inactive domain
  misc_feature (1)..(200): Homolog of NCBI NO: 14279470 NR Description: C3meo4 [Oryza sativa]
  misc_feature (1)..(200): Homolog of NCBI NO: 34910490 NR Description: putative mitochondrial processing peptidase beta
  misc_feature (1)..(204): Homolog of NCBI NO: 477280 NR Description: ubiquinol-cytochrome-c reductase (EC 1.10.2.2)
  misc_feature (1)..(204): Homolog of NCBI NO: 587566 NR Description: mitochondrial processing peptidase [Solanum
  misc_feature (1)..(204): Homolog of NCBI NO: 587564 NR Description: mitochondrial processing peptidase [Solanum
  misc_feature (1)..(204): Homolog of NCBI NO: 477819 NR Description: ubiquinol-cytochrome-c reductase (EC 1.10.2.2)
  misc_feature (1)..(204): Homolog of NCBI NO: 13959067 NR Description: mitochondrial processing peptidase [Avicennia
  misc_feature (1)..(204): Homolog of NCBI NO: 12802327 NR Description: mitochondrial processing peptidase beta subunit
  misc_feature (1)..(176): Homolog of NCBI NO: 30678485 NR Description: mitochondrial processing peptidase -related
  misc_feature (1)..(204): Homolog of NCBI NO: 15232845 NR Description: putative mitochondrial processing peptidase

SEQ ID NO: 32783 - DNA, 1636 bp, Arabidopsis thaliana; identical to SEQ ID NO: 29193
  misc_feature (1)..(1636): Ceres Seq. ID no. 12357517
  misc_feature: MA Experiment ID: 108433 Result: Up-regulated in Transcription
  misc_feature: MA Experiment 108433 PARAMETER Experiment Name: At_rhl_Mutant2_cDNA_P Parameter: Age (day) Value: 7
  misc_feature: MA Experiment 108433 PARAMETER Experiment Name: At_rhl_Mutant2_cDNA_P Parameter: Organism Value: A. thaliana
  misc_feature: MA Experiment 108433 PARAMETER Experiment Name: At_rhl_Mutant2_cDNA_P Parameter: Plant Line Value: rhl Mutant vs. wt landsburg
  misc_feature: MA Experiment 108433 PARAMETER Experiment Name: At_rhl_Mutant2_cDNA_P Parameter: Tissue Value: Roots
  misc_feature: MA Experiment ID: 108488 Result: Down-regulated in Transcription
  misc_feature: MA Experiment ID: 108569 Result: Up-regulated in Transcription
  misc_feature: MA Experiment 108569 PARAMETER Experiment Name: At_0.001%_MeJA__cDNA_P Parameter: Timepoint (hr) Value: 6
  misc_feature: MA Experiment 108569 PARAMETER Experiment Name: At_0.001%_MeJA__cDNA_P Parameter: Tissue Value: Aerial
  misc_feature: MA Experiment 108569 PARAMETER Experiment Name: At_0.001%_MeJA__cDNA_P Parameter: Treatment Value: 0.001% MeJA vs. No Treatment
  misc_feature: MA Experiment ID: 108573 Result: Up-regulated in Transcription
  misc_feature: MA Experiment 108573 PARAMETER Experiment Name: At_Drought_cDNA_P Parameter: Timepoint (hr) Value: 6
  misc_feature: MA Experiment 108573 PARAMETER Experiment Name: At_Drought_cDNA_P Parameter: Tissue Value: Aerial
  misc_feature: MA Experiment 108573 PARAMETER Experiment Name: At_Drought_cDNA_P Parameter: Treatment Value: Drought vs. No Drought
  misc_feature: MA Experiment ID: 20000214 Result: Down-regulated in Transcription
  misc_feature: MA Experiment 20000214 PARAMETER Experiment Name: At_4deg_Cold_P Parameter: Timepoint (hr) Value: 6
  misc_feature: MA Experiment ID: 20001906 Result: Up-regulated in Transcription
  misc_feature: MA Experiment 20001906 PARAMETER Experiment Name: At_Drought_Reproduction_P Parameter: Age (day) Value: 35
  misc_feature: MA Experiment 20001906 PARAMETER Experiment Name: At_Drought_Reproduction_P Parameter: Organism Value: A. thaliana
  misc_feature: MA Experiment 20001906 PARAMETER Experiment Name: At_Drought_Reproduction_P Parameter: Plant Line Value: WS
  misc_feature: MA Experiment 20001906 PARAMETER Experiment Name: At_Drought_Reproduction_P Parameter: Timepoint (day) Value: 5
  misc_feature: MA Experiment 20001906 PARAMETER Experiment Name: At_Drought_Reproduction_P Parameter: Tissue Value: Siliques
  misc_feature: MA Experiment 20001906 PARAMETER Experiment Name: At_Drought_Reproduction_P Parameter: Treatment Value: Drought vs. No Drought

SEQ ID NO: 32784 - protein, 484 aa, Arabidopsis thaliana; identical to SEQ ID NO: 29194
  peptide (1)..(484): Ceres Seq. ID no. 12357518
  misc_feature (227)..(481): Pfam Name: NPL4 family Pfam Description: NPL4 family
  misc_feature (346)..(400): Homolog of NCBI NO: 34905848 NR Description: P0483G10.28 [Oryza sativa (japonica
  misc_feature (74)..(481): Homolog of NCBI NO: 34914854 NR Description: P0416G11.10 [Oryza sativa (japonica
  misc_feature (72)..(483): Homolog of NCBI NO: 18407495 NR Description: expressed protein
  misc_feature (72)..(484): Homolog of NCBI NO: 15229360 NR Description: putative protein

SEQ ID NO: 32785 - protein, 413 aa, Arabidopsis thaliana; identical to SEQ ID NO: 29195
  peptide (1)..(413): Ceres Seq. ID no. 12357519
  misc_feature (156)..(410): Pfam Name: NPL4 family Pfam Description: NPL4 family
  misc_feature (275)..(329): Homolog of NCBI NO: 34905848 NR Description: P0483G10.28 [Oryza sativa (japonica
  misc_feature (3)..(410): Homolog of NCBI NO: 34914854 NR Description: P0416G11.10 [Oryza sativa (japonica
  misc_feature (1)..(412): Homolog of NCBI NO: 18407495 NR Description: expressed protein
  misc_feature (1)..(413): Homolog of NCBI NO: 15229360 NR Description: putative protein

SEQ ID NO: 32786 - protein, 411 aa, Arabidopsis thaliana; identical to SEQ ID NO: 29196
  peptide (1)..(411): Ceres Seq. ID no. 12357520
  misc_feature (154)..(408): Pfam Name: NPL4 family Pfam Description: NPL4 family
  misc_feature (273)..(327): Homolog of NCBI NO: 34905848 NR Description: P0483G10.28 [Oryza sativa (japonica
  misc_feature (1)..(408): Homolog of NCBI NO: 34914854 NR Description: P0416G11.10 [Oryza sativa (japonica
  misc_feature (1)..(410): Homolog of NCBI NO: 18407495 NR Description: expressed protein
  misc_feature (1)..(411): Homolog of NCBI NO: 15229360 NR Description: putative protein

SEQ ID NO: 32787 - DNA, 1317 bp, Arabidopsis thaliana; identical to SEQ ID NO: 29197
  misc_feature (1)..(1317): Ceres Seq. ID no. 13490406
  misc_feature: MA Experiment ID: 20000234 Result: Up-regulated in Transcription
  misc_feature: MA Experiment 20000234 PARAMETER Experiment Name: At_Siliques_P Parameter: Age (day) Value: 21
  misc_feature: MA Experiment 20000234 PARAMETER Experiment Name: At_Siliques_P Parameter: Organism Value: A. thaliana
  misc_feature: MA Experiment 20000234 PARAMETER Experiment Name: At_Siliques_P Parameter: Plant Line Value: WS
  misc_feature: MA Experiment 20000234 PARAMETER Experiment Name: At_Siliques_P Parameter: Tissue Value: Less Than 5mm Siliques vs. Whole Plant
  misc_feature: MA Experiment ID: 20000264 Result: Up-regulated in Transcription
  misc_feature: MA Experiment 20000264 PARAMETER Experiment Name: At_Open_Flower_P Parameter: Age (day) Value: 21
  misc_feature: MA Experiment 20000264 PARAMETER Experiment Name: At_Open_Flower_P Parameter: Plant Line Value: WS
  misc_feature: MA Experiment 20000264 PARAMETER Experiment Name: At_Open_Flower_P Parameter: Tissue Value: Open Flower vs. Whole Plant
  misc_feature: MA Experiment ID: 20000265 Result: Up-regulated in Transcription
  misc_feature: MA Experiment 20000265 PARAMETER Experiment Name: At_Open_Flower_P Parameter: Age (day) Value: 21
  misc_feature: MA Experiment 20000265 PARAMETER Experiment Name: At_Open_Flower_P Parameter: Plant Line Value: WS
  misc_feature: MA Experiment 20000265 PARAMETER Experiment Name: At_Open_Flower_P Parameter: Tissue Value: Closed Flower vs. Whole Plant
  misc_feature: MA Experiment ID: 20000286 Result: Up-regulated in Transcription
  misc_feature: MA Experiment 20000286 PARAMETER Experiment Name: At_Open_Flower_P Parameter: Age (day) Value: 21
  misc_feature: MA Experiment 20000286 PARAMETER Experiment Name: At_Open_Flower_P Parameter: Plant Line Value: WS
  misc_feature: MA Experiment 20000286 PARAMETER Experiment Name: At_Open_Flower_P Parameter: Tissue Value: Half Open vs. Whole Plant
  misc_feature: MA Experiment ID: 20000794 Result: Up-regulated in Transcription
  misc_feature: MA Experiment 20000794 PARAMETER Experiment Name: At_Petals_P Parameter: Age (day) Value: 23-25 days
  misc_feature: MA Experiment 20000794 PARAMETER Experiment Name: At_Petals_P Parameter: Plant Line Value: WS
  misc_feature: MA Experiment 20000794 PARAMETER Experiment Name: At_Petals_P Parameter: Tissue Value: Petals vs. Whole plant
  misc_feature: MA Experiment ID: 20001757 Result: Down-regulated in Transcription
  misc_feature: MA Experiment 20001757 PARAMETER Experiment Name: At_50mM_NH4NO3_L-to-H_P Parameter: Timepoint (hr) Value: 6
  misc_feature: MA Experiment 20001757 PARAMETER Experiment Name: At_50mM_NH4NO3_L-to-H_P Parameter: Tissue Value: Leaf
  misc_feature: MA Experiment 20001757 PARAMETER Experiment Name: At_50mM_NH4NO3_L-to-H_P Parameter: Treatment Value: 50mM NH4NO3 vs 100mM Mannitol
  misc_feature: MA Experiment ID: 20001910 Result: Up-regulated in Transcription
  misc_feature: MA Experiment 20001910 PARAMETER Experiment Name: At_Drought_Reproduction_P Parameter: Age (day) Value: 37
  misc_feature: MA Experiment 20001910 PARAMETER Experiment Name: At_Drought_Reproduction_P Parameter: Organism Value: A. thaliana
  misc_feature: MA Experiment 20001910 PARAMETER Experiment Name: At_Drought_Reproduction_P Parameter: Plant Line Value: WS
  misc_feature: MA Experiment 20001910 PARAMETER Experiment Name: At_Drought_Reproduction_P Parameter: Timepoint (day) Value: 7
  misc_feature: MA Experiment 20001910 PARAMETER Experiment Name: At_Drought_Reproduction_P Parameter: Tissue Value: Flowers
  misc_feature: MA Experiment 20001910 PARAMETER Experiment Name: At_Drought_Reproduction_P Parameter: Treatment Value: Drought vs. No Drought

SEQ ID NO: 32788 - protein, 258 aa, Arabidopsis thaliana; identical to SEQ ID NO: 29198
  peptide (1)..(258): Ceres Seq. ID no. 13490407
  misc_feature (2)..(98): Pfam Name: TB2/DP1, HVA22 family Pfam Description: TB2/DP1, HVA22 family
  misc_feature (1)..(215): Homolog of NCBI NO: 18394805 NR Description: expressed protein [Arabidopsis thaliana]
  misc_feature (1)..(151): Homolog of NCBI NO: 21671921 NR Description: Putative protein with HVA22 domain
  misc_feature (1)..(202): Homolog of NCBI NO: 20502988 NR Description: Putative InsB from Escherichia coli
  misc_feature (9)..(222): Homolog of NCBI NO: 9759014 NR Description: gene_id:K16E1.3~unknown protein [Arabidopsis
  misc_feature (1)..(222): Homolog of NCBI NO: 18422223 NR Description: expressed protein [Arabidopsis thaliana]
  misc_feature (1)..(222): Homolog of NCBI NO: 21553813 NR Description: unknown [Arabidopsis thaliana]
  misc_feature (98)..(258): Homolog of NCBI NO: 25408438 NR Description: hypothetical protein At2g36020 [imported] -
  misc_feature (1)..(258): Homolog of NCBI NO: 21537355 NR Description: unknown [Arabidopsis thaliana]
  misc_feature (1)..(258): Homolog of NCBI NO: 18404020 NR Description: expressed protein [Arabidopsis thaliana]
  misc_feature (1)..(258): Homolog of NCBI NO: 26451594 NR Description: unknown protein [Arabidopsis thaliana]

SEQ ID NO: 32789 - protein, 189 aa, Arabidopsis thaliana; identical to SEQ ID NO: 29199
  peptide (1)..(189): Ceres Seq. ID no. 13490408
  misc_feature (1)..(146): Homolog of NCBI NO: 18394805 NR Description: expressed protein [Arabidopsis thaliana]
  misc_feature (1)..(82): Homolog of NCBI NO: 21671921 NR Description: Putative protein with HVA22 domain
  misc_feature (1)..(133): Homolog of NCBI NO: 20502988 NR Description: Putative InsB from Escherichia coli
  misc_feature (1)..(153): Homolog of NCBI NO: 9759014 NR Description: gene_id:K16E1.3~unknown protein [Arabidopsis
  misc_feature (1)..(153): Homolog of NCBI NO: 18422223 NR Description: expressed protein [Arabidopsis thaliana]
  misc_feature (1)..(153): Homolog of NCBI NO: 21553813 NR Description: unknown [Arabidopsis thaliana]
  misc_feature (29)..(189): Homolog of NCBI NO: 25408438 NR Description: hypothetical protein At2g36020 [imported] -
  misc_feature (1)..(189): Homolog of NCBI NO: 21537355 NR Description: unknown [Arabidopsis thaliana]
  misc_feature (1)..(189): Homolog of NCBI NO: 18404020 NR Description: expressed protein [Arabidopsis thaliana]
  misc_feature (1)..(189): Homolog of NCBI NO: 26451594 NR Description: unknown protein [Arabidopsis thaliana]

SEQ ID NO: 32790 - protein, 161 aa, Arabidopsis thaliana; identical to SEQ ID NO: 29200
  peptide (1)..(161): Ceres Seq. ID no. 13490409
  misc_feature (1)..(118): Homolog of NCBI NO: 18394805 NR Description: expressed protein [Arabidopsis thaliana]
  misc_feature (1)..(54): Homolog of NCBI NO: 21671921 NR Description: Putative protein with HVA22 domain
  misc_feature (1)..(105): Homolog of NCBI NO: 20502988 NR Description: Putative InsB from Escherichia coli
  misc_feature (1)..(125): Homolog of NCBI NO: 9759014 NR Description: gene_id:K16E1.3~unknown protein [Arabidopsis
  misc_feature (1)..(125): Homolog of NCBI NO: 18422223 NR Description: expressed protein [Arabidopsis thaliana]
  misc_feature (1)..(125): Homolog of NCBI NO: 21553813 NR Description: unknown [Arabidopsis thaliana]
  misc_feature (1)..(161): Homolog of NCBI NO: 25408438 NR Description: hypothetical protein At2g36020 [imported] -
  misc_feature (1)..(161): Homolog of NCBI NO: 21537355 NR Description: unknown [Arabidopsis thaliana]
  misc_feature (1)..(161): Homolog of NCBI NO: 18404020 NR Description: expressed protein [Arabidopsis thaliana]
  misc_feature (1)..(161): Homolog of NCBI NO: 26451594 NR Description: unknown protein [Arabidopsis thaliana]

SEQ ID NO: 32791 - DNA, 1224 bp, Arabidopsis thaliana; identical to SEQ ID NO: 29201
  misc_feature (1)..(1224): Ceres Seq. ID no. 13490655
  misc_feature: MA Experiment ID: 108433 Result: Up-regulated in Transcription
  misc_feature: MA Experiment 108433 PARAMETER Experiment Name: At_rhl_Mutant2_cDNA_P Parameter: Age (day) Value: 7
  misc_feature: MA Experiment 108433 PARAMETER Experiment Name: At_rhl_Mutant2_cDNA_P Parameter: Organism Value: A. thaliana
  misc_feature: MA Experiment 108433 PARAMETER Experiment Name: At_rhl_Mutant2_cDNA_P Parameter: Plant Line Value: rhl Mutant vs. wt landsburg
  misc_feature: MA Experiment 108433 PARAMETER Experiment Name: At_rhl_Mutant2_cDNA_P Parameter: Tissue Value: Roots
  misc_feature: MA Experiment ID: 108434 Result: Down-regulated in Transcription
  misc_feature: MA Experiment 108434 PARAMETER Experiment Name: At_Root_Tips_cDNA_P Parameter: Tissue Value: Root Tips
  misc_feature: MA Experiment ID: 108462 Result: Up-regulated in Transcription
  misc_feature: MA Experiment 108462 PARAMETER Experiment Name: At_Germinating_Seeds_cDNA_P Parameter: Age (day) Value: 2 vs. 0
  misc_feature: MA Experiment 108462 PARAMETER Experiment Name: At_Germinating_Seeds_cDNA_P Parameter: Tissue Value: Germinating Seeds
  misc_feature: MA Experiment ID: 108463 Result: Up-regulated in Transcription
  misc_feature: MA Experiment 108463 PARAMETER Experiment Name: At_Germinating_Seeds_cDNA_P Parameter: Age (day) Value: 3 vs. 0
  misc_feature: MA Experiment 108463 PARAMETER Experiment Name: At_Germinating_Seeds_cDNA_P Parameter: Tissue Value: Germinating Seeds
  misc_feature: MA Experiment ID: 108464 Result: Up-regulated in Transcription
  misc_feature: MA Experiment 108464 PARAMETER Experiment Name: At_Germinating_Seeds_cDNA_P Parameter: Age (day) Value: 4 vs. 0
  misc_feature: MA Experiment 108464 PARAMETER Experiment Name: At_Germinating_Seeds_cDNA_P Parameter: Tissue Value: Germinating Seeds
  misc_feature: MA Experiment ID: 108594 Result: Down-regulated in Transcription
  misc_feature: MA Experiment 108594 PARAMETER Experiment Name: At_Ler-rhl_Root_cDNA_P Parameter: Plant Line Value: null
  misc_feature: MA Experiment ID: 20000113 Result: Down-regulated in Transcription
  misc_feature: MA Experiment 20000113 PARAMETER Experiment Name: At_42deg_Heat_cDNA_P Parameter: Temperature (deg C) Value: 42 vs. 22
  misc_feature: MA Experiment 20000113 PARAMETER Experiment Name: At_42deg_Heat_cDNA_P Parameter: Timepoint (hr) Value: 8
  misc_feature: MA Experiment 20000113 PARAMETER Experiment Name: At_42deg_Heat_cDNA_P Parameter: Tissue Value: Aerial
  misc_feature: MA Experiment ID: 20000306 Result: Down-regulated in Transcription
  misc_feature: MA Experiment 20000306 PARAMETER Experiment Name: At_Germinating_Seeds_Sub_P Parameter: Age (hr) Value: 6 vs. 0
  misc_feature: MA Experiment 20000306 PARAMETER Experiment Name: At_Germinating_Seeds_Sub_P Parameter: Organism Value: A. thaliana
  misc_feature: MA Experiment 20000306 PARAMETER Experiment Name: At_Germinating_Seeds_Sub_P Parameter: Plant Line Value: WS
  misc_feature: MA Experiment 20000306 PARAMETER Experiment Name: At_Germinating_Seeds_Sub_P Parameter: Tissue Value: Germinating Seeds
  misc_feature: MA Experiment ID: 20000307 Result: Down-regulated in Transcription
  misc_feature: MA Experiment 20000307 PARAMETER Experiment Name: At_Germinating_Seeds_Sub_P Parameter: Age (hr) Value: 24 vs. 0
  misc_feature: MA Experiment 20000307 PARAMETER Experiment Name: At_Germinating_Seeds_Sub_P Parameter: Organism Value: A. thaliana
  misc_feature: MA Experiment 20000307 PARAMETER Experiment Name: At_Germinating_Seeds_Sub_P Parameter: Plant Line Value: WS
  misc_feature: MA Experiment 20000307 PARAMETER Experiment Name: At_Germinating_Seeds_Sub_P Parameter: Tissue Value: Germinating Seeds
  misc_feature: MA Experiment ID: 20000314 Result: Down-regulated in Transcription
  misc_feature: MA Experiment 20000314 PARAMETER Experiment Name: At_14day_Shoots-Roots_Sub_P Parameter: Age (day) Value: 14
  misc_feature: MA Experiment 20000314 PARAMETER Experiment Name: At_14day_Shoots-Roots_Sub_P Parameter: Organism Value: A. thaliana
  misc_feature: MA Experiment 20000314 PARAMETER Experiment Name: At_14day_Shoots-Roots_Sub_P Parameter: Plant Line Value: WS
  misc_feature: MA Experiment 20000314 PARAMETER Experiment Name: At_14day_Shoots-Roots_Sub_P Parameter: Tissue Value: Roots vs. Whole Plant
  misc_feature: MA Experiment ID: 20000315 Result: Down-regulated in Transcription
  misc_feature: MA Experiment 20000315 PARAMETER Experiment Name: At_14day_Shoots-Roots_Sub_P Parameter: Age (day) Value: 14
  misc_feature: MA Experiment 20000315 PARAMETER Experiment Name: At_14day_Shoots-Roots_Sub_P Parameter: Organism Value: A. thaliana
  misc_feature: MA Experiment 20000315 PARAMETER Experiment Name: At_14day_Shoots-Roots_Sub_P Parameter: Plant Line Value: WS
  misc_feature: MA Experiment 20000315 PARAMETER Experiment Name: At_14day_Shoots-Roots_Sub_P Parameter: Tissue Value: Shoots vs. Whole Plant
  misc_feature: MA Experiment ID: 20000346 Result: Up-regulated in Transcription
  misc_feature: MA Experiment 20000346 PARAMETER Experiment Name: At_2mM_SA_Sub_P Parameter: Age (day) Value: 14
  misc_feature: MA Experiment 20000346 PARAMETER Experiment Name: At_2mM_SA_Sub_P Parameter: Organism Value: A. thaliana
  misc_feature: MA Experiment 20000346 PARAMETER Experiment Name: At_2mM_SA_Sub_P Parameter: Plant Line Value: WS
  misc_feature: MA Experiment 20000346 PARAMETER Experiment Name: At_2mM_SA_Sub_P Parameter: Timepoint (hr) Value: 1
  misc_feature: MA Experiment 20000346 PARAMETER Experiment Name: At_2mM_SA_Sub_P Parameter: Tissue Value: Aerial
  misc_feature: MA Experiment 20000346 PARAMETER Experiment Name: At_2mM_SA_Sub_P Parameter: Treatment Value: 2mM SA vs. No Treatment
  misc_feature: MA Experiment ID: 20000347 Result: Up-regulated in Transcription
  misc_feature: MA Experiment 20000347 PARAMETER Experiment Name: At_2mM_SA_Sub_P Parameter: Age (day) Value: 14
  misc_feature: MA Experiment 20000347 PARAMETER Experiment Name: At_2mM_SA_Sub_P Parameter: Organism Value: A. thaliana
  misc_feature: MA Experiment 20000347 PARAMETER Experiment Name: At_2mM_SA_Sub_P Parameter: Plant Line Value: WS
  misc_feature: MA Experiment 20000347 PARAMETER Experiment Name: At_2mM_SA_Sub_P Parameter: Timepoint (hr) Value: 6
  misc_feature: MA Experiment 20000347 PARAMETER Experiment Name: At_2mM_SA_Sub_P Parameter: Tissue Value: Aerial
  misc_feature: MA Experiment 20000347 PARAMETER Experiment Name: At_2mM_SA_Sub_P Parameter: Treatment Value: 2mM SA vs. No Treatment

SEQ ID NO: 32792 - protein, 358 aa, Arabidopsis thaliana; identical to SEQ ID NO: 29202
  peptide (1)..(358): Ceres Seq. ID no. 13490656
  misc_feature (139)..(355): Pfam Name: Zinc-binding dehydrogenase Pfam Description: Zinc-binding dehydrogenase
  misc_feature (12)..(358): Homolog of NCBI NO: 21593645 NR Description: allyl alcohol dehydrogenase, putative
  misc_feature (14)..(358): Homolog of NCBI NO: 21539447 NR Description: quinone oxidoreductase-like protein [Arabidopsis
  misc_feature (14)..(358): Homolog of NCBI NO: 17529140 NR Description: putative quinone oxidoreductase [Arabidopsis
  misc_feature (14)..(358): Homolog of NCBI NO: 22326861 NR Description: NADP-dependent oxidoreductase, putative
  misc_feature (14)..(358): Homolog of NCBI NO: 15237888 NR Description: NADP-dependent oxidoreductase (P1), putative
  misc_feature (6)..(358): Homolog of NCBI NO: 21536967 NR Description: quinone oxidoreductase-like protein [Arabidopsis
  misc_feature (6)..(358): Homolog of NCBI NO: 15240810 NR Description: NADP-dependent oxidoreductase, putative
  misc_feature (6)..(358): Homolog of NCBI NO: 21537356 NR Description: quinone oxidoreductase-like protein [Arabidopsis
  misc_feature (6)..(357): Homolog of NCBI NO: 15240812 NR Description: NADP-dependent oxidoreductase, putative
  misc_feature (6)..(358): Homolog of NCBI NO: 15240806 NR Description: NADP-dependent oxidoreductase, putative

SEQ ID NO: 32793 - protein, 353 aa, Arabidopsis thaliana; identical to SEQ ID NO: 29203
  peptide (1)..(353): Ceres Seq. ID no. 13490657
  misc_feature (134)..(350): Pfam Name: Zinc-binding dehydrogenase Pfam Description: Zinc-binding dehydrogenase
  misc_feature (7)..(353): Homolog of NCBI NO: 21593645 NR Description: allyl alcohol dehydrogenase, putative
  misc_feature (9)..(353): Homolog of NCBI NO: 21539447 NR Description: quinone oxidoreductase-like protein [Arabidopsis
  misc_feature (9)..(353): Homolog of NCBI NO: 17529140 NR Description: putative quinone oxidoreductase [Arabidopsis
  misc_feature (9)..(353): Homolog of NCBI NO: 22326861 NR Description: NADP-dependent oxidoreductase, putative
  misc_feature (9)..(353): Homolog of NCBI NO: 15237888 NR Description: NADP-dependent oxidoreductase (P1), putative
  misc_feature (1)..(353): Homolog of NCBI NO: 21536967 NR Description: quinone oxidoreductase-like protein [Arabidopsis
  misc_feature (1)..(353): Homolog of NCBI NO: 15240810 NR Description: NADP-dependent oxidoreductase, putative
  misc_feature (1)..(353): Homolog of NCBI NO: 21537356 NR Description: quinone oxidoreductase-like protein [Arabidopsis
  misc_feature (1)..(352): Homolog of NCBI NO: 15240812 NR Description: NADP-dependent oxidoreductase, putative
  misc_feature (1)..(353): Homolog of NCBI NO: 15240806 NR Description: NADP-dependent oxidoreductase, putative

SEQ ID NO: 32794 - protein, 308 aa, Arabidopsis thaliana; identical to SEQ ID NO: 29204
  peptide (1)..(308): Ceres Seq. ID no. 13490658
  misc_feature (89)..(305): Pfam Name: Zinc-binding dehydrogenase Pfam Description: Zinc-binding dehydrogenase
  misc_feature (1)..(308): Homolog of NCBI NO: 21593645 NR Description: allyl alcohol dehydrogenase, putative
  misc_feature (1)..(308): Homolog of NCBI NO: 21539447 NR Description: quinone oxidoreductase-like protein [Arabidopsis
  misc_feature (1)..(308): Homolog of NCBI NO: 17529140 NR Description: putative quinone oxidoreductase [Arabidopsis
  misc_feature (1)..(308): Homolog of NCBI NO: 22326861 NR Description: NADP-dependent oxidoreductase, putative
  misc_feature (1)..(308): Homolog of NCBI NO: 15237888 NR Description: NADP-dependent oxidoreductase (P1), putative
  misc_feature (1)..(308): Homolog of NCBI NO: 21536967 NR Description: quinone oxidoreductase-like protein [Arabidopsis
  misc_feature (1)..(308): Homolog of NCBI NO: 15240810 NR Description: NADP-dependent oxidoreductase, putative
  misc_feature (1)..(308): Homolog of NCBI NO: 21537356 NR Description: quinone oxidoreductase-like protein [Arabidopsis
  misc_feature (1)..(307): Homolog of NCBI NO: 15240812 NR Description: NADP-dependent oxidoreductase, putative
  misc_feature (1)..(308): Homolog of NCBI NO: 15240806 NR Description: NADP-dependent oxidoreductase, putative

SEQ ID NO: 32795 - DNA, 1273 bp, Arabidopsis thaliana; identical to SEQ ID NO: 29205
  misc_feature (1)..(1273): Ceres Seq. ID no. 13490651
  misc_feature: MA Experiment ID: 108461 Result: Up-regulated in Transcription
  misc_feature: MA Experiment 108461 PARAMETER Experiment Name: At_Germinating_Seeds_cDNA_P Parameter: Age (day) Value: 1 vs. 0
  misc_feature: MA Experiment 108461 PARAMETER Experiment Name: At_Germinating_Seeds_cDNA_P Parameter: Tissue Value: Germinating Seeds
  misc_feature: MA Experiment ID: 108464 Result: Up-regulated in Transcription
  misc_feature: MA Experiment 108464 PARAMETER Experiment Name: At_Germinating_Seeds_cDNA_P Parameter: Age (day) Value: 4 vs. 0
  misc_feature: MA Experiment 108464 PARAMETER Experiment Name: At_Germinating_Seeds_cDNA_P Parameter: Tissue Value: Germinating Seeds
  misc_feature: MA Experiment ID: 108607 Result: Down-regulated in Transcription
  misc_feature: MA Experiment 108607 PARAMETER Experiment Name: At_100uM_ABA_cDNA_P Parameter: Timepoint (hr) Value: 4
  misc_feature: MA Experiment 108607 PARAMETER Experiment Name: At_100uM_ABA_cDNA_P Parameter: Tissue Value: Aerial
  misc_feature: MA Experiment 108607 PARAMETER Experiment Name: At_100uM_ABA_cDNA_P Parameter: Treatment Value: 100uM ABA vs. No Treatment
  misc_feature: MA Experiment ID: 20000069 Result: Down-regulated in Transcription
  misc_feature: MA Experiment 20000069 PARAMETER Experiment Name: At_100uM_ABA_Mutants_cDNA_P Parameter: Plant Line Value: CS23
  misc_feature: MA Experiment 20000069 PARAMETER Experiment Name: At_100uM_ABA_Mutants_cDNA_P Parameter: Timepoint (hr) Value: 6
  misc_feature: MA Experiment 20000069 PARAMETER Experiment Name: At_100uM_ABA_Mutants_cDNA_P Parameter: Tissue Value: Aerial
  misc_feature: MA Experiment 20000069 PARAMETER Experiment Name: At_100uM_ABA_Mutants_cDNA_P Parameter: Treatment Value: 100uM ABA vs. No Treatment
  misc_feature: MA Experiment ID: 20000070 Result: Down-regulated in Transcription
  misc_feature: MA Experiment 20000070 PARAMETER Experiment Name: At_100uM_ABA_Mutants_cDNA_P Parameter: Plant Line Value: CS24
  misc_feature: MA Experiment 20000070 PARAMETER Experiment Name: At_100uM_ABA_Mutants_cDNA_P Parameter: Timepoint (hr) Value: 6
  misc_feature: MA Experiment 20000070 PARAMETER Experiment Name: At_100uM_ABA_Mutants_cDNA_P Parameter: Tissue Value: Aerial
  misc_feature: MA Experiment 20000070 PARAMETER Experiment Name: At_100uM_ABA_Mutants_cDNA_P Parameter: Treatment Value: 100uM ABA vs. No Treatment
  misc_feature: MA Experiment ID: 20000071 Result: Down-regulated in Transcription
  misc_feature: MA Experiment 20000071 PARAMETER Experiment Name: At_100uM_ABA_Mutants_cDNA_P Parameter: Plant Line Value: CS8104
  misc_feature: MA Experiment 20000071 PARAMETER Experiment Name: At_100uM_ABA_Mutants_cDNA_P Parameter: Timepoint (hr) Value: 6
  misc_feature: MA Experiment 20000071 PARAMETER Experiment Name: At_100uM_ABA_Mutants_cDNA_P Parameter: Tissue Value: Aerial
  misc_feature: MA Experiment 20000071 PARAMETER Experiment Name: At_100uM_ABA_Mutants_cDNA_P Parameter: Treatment Value: 100uM ABA vs. No Treatment
  misc_feature: MA Experiment ID: 20000087 Result: Down-regulated in Transcription
  misc_feature: MA Experiment 20000087 PARAMETER Experiment Name: At_100uM_ABA_Mutants_cDNA_P Parameter: Plant Line Value: WS
  misc_feature: MA Experiment 20000087 PARAMETER Experiment Name: At_100uM_ABA_Mutants_cDNA_P Parameter: Timepoint (hr) Value: 6
  misc_feature: MA Experiment 20000087 PARAMETER Experiment Name: At_100uM_ABA_Mutants_cDNA_P Parameter: Tissue Value: Aerial
  misc_feature: MA Experiment 20000087 PARAMETER Experiment Name: At_100uM_ABA_Mutants_cDNA_P Parameter: Treatment Value: 100uM ABA vs. No Treatment
  misc_feature: MA Experiment ID: 20000088 Result: Down-regulated in Transcription
  misc_feature: MA Experiment 20000088 PARAMETER Experiment Name: At_100uM_ABA_Mutants_cDNA_P Parameter: Plant Line Value: Landsberg
  misc_feature: MA Experiment 20000088 PARAMETER Experiment Name: At_100uM_ABA_Mutants_cDNA_P Parameter: Timepoint (hr) Value: 6
  misc_feature: MA Experiment 20000088 PARAMETER Experiment Name: At_100uM_ABA_Mutants_cDNA_P Parameter: Tissue Value: Aerial
  misc_feature: MA Experiment 20000088 PARAMETER Experiment Name: At_100uM_ABA_Mutants_cDNA_P Parameter: Treatment Value: 100uM ABA vs. No Treatment
  misc_feature: MA Experiment ID: 20000113 Result: Down-regulated in Transcription
  misc_feature: MA Experiment 20000113 PARAMETER Experiment Name: At_42deg_Heat_cDNA_P Parameter: Temperature (deg C) Value: 42 vs. 22
  misc_feature: MA Experiment 20000113 PARAMETER Experiment Name: At_42deg_Heat_cDNA_P Parameter: Timepoint (hr) Value: 8
  misc_feature: MA Experiment 20000113 PARAMETER Experiment Name: At_42deg_Heat_cDNA_P Parameter: Tissue Value: Aerial
  misc_feature: MA Experiment ID: 20000117 Result: Down-regulated in Transcription
  misc_feature: MA Experiment 20000117 PARAMETER Experiment Name: At_100uM_ABA_Mutants_cDNA_P Parameter: Plant Line Value: Columbia
  misc_feature: MA Experiment 20000117 PARAMETER Experiment Name: At_100uM_ABA_Mutants_cDNA_P Parameter: Timepoint (hr) Value: 6
  misc_feature: MA Experiment 20000117 PARAMETER Experiment Name: At_100uM_ABA_Mutants_cDNA_P Parameter: Tissue Value: Aerial
  misc_feature: MA Experiment 20000117 PARAMETER Experiment Name: At_100uM_ABA_Mutants_cDNA_P Parameter: Treatment Value: 100uM ABA vs. No Treatment
  misc_feature: MA Experiment ID: 20000179 Result: Up-regulated in Transcription
  misc_feature: MA Experiment 20000179 PARAMETER Experiment Name: At_Germinating_Seeds_P Parameter: Age (hr) Value: 6 vs. 0
  misc_feature: MA Experiment 20000179 PARAMETER Experiment Name: At_Germinating_Seeds_P Parameter: Tissue Value: Germinating Seeds
  misc_feature: MA Experiment ID: 20000180 Result: Up-regulated in Transcription
  misc_feature: MA Experiment 20000180 PARAMETER Experiment Name: At_Germinating_Seeds_P Parameter: Age (hr) Value: 24 vs. 0
  misc_feature: MA Experiment 20000180 PARAMETER Experiment Name: At_Germinating_Seeds_P Parameter: Tissue Value: Germinating Seeds
  misc_feature: MA Experiment ID: 20000234 Result: Up-regulated in Transcription
  misc_feature: MA Experiment 20000234 PARAMETER Experiment Name: At_Siliques_P Parameter: Age (day) Value: 21
  misc_feature: MA Experiment 20000234 PARAMETER Experiment Name: At_Siliques_P Parameter: Organism Value: A. thaliana
  misc_feature: MA Experiment 20000234 PARAMETER Experiment Name: At_Siliques_P Parameter: Plant Line Value: WS
  misc_feature: MA Experiment 20000234 PARAMETER Experiment Name: At_Siliques_P Parameter: Tissue Value: Less Than 5mm Siliques vs. Whole Plant
  misc_feature: MA Experiment ID: 20000265 Result: Up-regulated in Transcription
  misc_feature: MA Experiment 20000265 PARAMETER Experiment Name: At_Open_Flower_P Parameter: Age (day) Value: 21
  misc_feature: MA Experiment 20000265 PARAMETER Experiment Name: At_Open_Flower_P Parameter: Plant Line Value: WS
  misc_feature: MA Experiment 20000265 PARAMETER Experiment Name: At_Open_Flower_P Parameter: Tissue Value: Closed Flower vs. Whole Plant
  misc_feature: MA Experiment ID: 20001911 Result: Down-regulated in Transcription
  misc_feature: MA Experiment 20001911 PARAMETER Experiment Name: At_Drought_Reproduction_P Parameter: Age (day) Value: 40
  misc_feature: MA Experiment 20001911 PARAMETER Experiment Name: At_Drought_Reproduction_P Parameter: Organism Value: A. thaliana
  misc_feature: MA Experiment 20001911 PARAMETER Experiment Name: At_Drought_Reproduction_P Parameter: Plant Line Value: WS
  misc_feature: MA Experiment 20001911 PARAMETER Experiment Name: At_Drought_Reproduction_P Parameter: Timepoint (day) Value: 10
  misc_feature: MA Experiment 20001911 PARAMETER Experiment Name: At_Drought_Reproduction_P Parameter: Tissue Value: Flowers
  misc_feature: MA Experiment 20001911 PARAMETER Experiment Name: At_Drought_Reproduction_P Parameter: Treatment Value: Drought vs. No Drought

SEQ ID NO: 32796 - protein, 298 aa, Arabidopsis thaliana; identical to SEQ ID NO: 29206
  peptide (1)..(298): Ceres Seq. ID no. 13490652
  misc_feature (16)..(142): Homolog of NCBI NO: 15238265 NR Description: expressed protein [Arabidopsis thaliana]
  misc_feature (5)..(167): Homolog of NCBI NO: 34913914 NR Description: OSJNBa0066C06.8 [Oryza sativa (japonica
  misc_feature (8)..(148): Homolog of NCBI NO: 30689382 NR Description: expressed protein [Arabidopsis thaliana]
  misc_feature (8)..(148): Homolog of NCBI NO: 10177091 NR Description: emb|CAB66408.1~gene_id:MOP9.13~strong similarity
  misc_feature (12)..(291): Homolog of NCBI NO: 15229112 NR Description: expressed protein [Arabidopsis thaliana]
  misc_feature (4)..(293): Homolog of NCBI NO: 34912804 NR Description: P0501G01.11 [Oryza sativa (japonica
  misc_feature (174)..(298): Homolog of NCBI NO: 25408977 NR Description: hypothetical protein At2g46220 [imported] -
  misc_feature (24)..(196): Homolog of NCBI NO: 25408977 NR Description: hypothetical protein At2g46220 [imported] -
  misc_feature (1)..(298): Homolog of NCBI NO: 26452761 NR Description: unknown protein [Arabidopsis thaliana]
  misc_feature (1)..(298): Homolog of NCBI NO: 18407012 NR Description: expressed protein [Arabidopsis thaliana]

SEQ ID NO: 32797 - protein, 291 aa, Arabidopsis thaliana; identical to SEQ ID NO: 29207
  peptide (1)..(291): Ceres Seq. ID no. 13490653
  misc_feature (9)..(135): Homolog of NCBI NO: 15238265 NR Description: expressed protein [Arabidopsis thaliana]
  misc_feature (1)..(160): Homolog of NCBI NO: 34913914 NR Description: OSJNBa0066C06.8 [Oryza sativa (japonica
  misc_feature (1)..(141): Homolog of NCBI NO: 30689382 NR Description: expressed protein [Arabidopsis thaliana]
  misc_feature (1)..(141): Homolog of NCBI NO: 10177091 NR Description: emb|CAB66408.1~gene_id:MOP9.13~strong similarity
  misc_feature (5)..(284): Homolog of NCBI NO: 15229112 NR Description: expressed protein [Arabidopsis thaliana]
  misc_feature (1)..(286): Homolog of NCBI NO: 34912804 NR Description: P0501G01.11 [Oryza sativa (japonica
  misc_feature (167)..(291): Homolog of NCBI NO: 25408977 NR Description: hypothetical protein At2g46220 [imported] -
  misc_feature (17)..(189): Homolog of NCBI NO: 25408977 NR Description: hypothetical protein At2g46220 [imported] -
  misc_feature (1)..(291): Homolog of NCBI NO: 26452761 NR Description: unknown protein [Arabidopsis thaliana]
  misc_feature (1)..(291): Homolog of NCBI NO: 18407012 NR Description: expressed protein [Arabidopsis thaliana]

SEQ ID NO: 32798 - protein, 286 aa, Arabidopsis thaliana; identical to SEQ ID NO: 29208
  peptide (1)..(286): Ceres Seq. ID no. 13490654
  misc_feature (4)..(130): Homolog of NCBI NO: 15238265 NR Description: expressed protein [Arabidopsis thaliana]
  misc_feature (1)..(155): Homolog of NCBI NO: 34913914 NR Description: OSJNBa0066C06.8 [Oryza sativa (japonica
  misc_feature (1)..(136): Homolog of NCBI NO: 30689382 NR Description: expressed protein [Arabidopsis thaliana]
  misc_feature (1)..(136): Homolog of NCBI NO: 10177091 NR Description: emb|CAB66408.1~gene_id:MOP9.13~strong similarity
  misc_feature (1)..(279): Homolog of NCBI NO: 15229112 NR Description: expressed protein [Arabidopsis thaliana]
  misc_feature (1)..(281): Homolog of NCBI NO: 34912804 NR Description: P0501G01.11 [Oryza sativa (japonica
  misc_feature (162)..(286): Homolog of NCBI NO: 25408977 NR Description: hypothetical protein At2g46220 [imported] -
  misc_feature (12)..(184): Homolog of NCBI NO: 25408977 NR Description: hypothetical protein At2g46220 [imported] -
  misc_feature (1)..(286): Homolog of NCBI NO: 26452761 NR Description: unknown protein [Arabidopsis thaliana]
  misc_feature (1)..(286): Homolog of NCBI NO: 18407012 NR Description: expressed protein [Arabidopsis thaliana]

SEQ ID NO: 32799 - DNA, 1665 bp, Arabidopsis thaliana; identical to SEQ ID NO: 29209
  misc_feature (1)..(1665): Ceres Seq. ID no. 13575417
  misc_feature: MA Experiment ID: 108433 Result: Down-regulated in Transcription
  misc_feature: MA Experiment 108433 PARAMETER Experiment Name: At_rhl_Mutant2_cDNA_P Parameter: Age (day) Value: 7
  misc_feature: MA Experiment 108433 PARAMETER Experiment Name: At_rhl_Mutant2_cDNA_P Parameter: Organism Value: A. thaliana
  misc_feature: MA Experiment 108433 PARAMETER Experiment Name: At_rhl_Mutant2_cDNA_P Parameter: Plant Line Value: rhl Mutant vs. wt landsburg
  misc_feature: MA Experiment 108433 PARAMETER Experiment Name: At_rhl_Mutant2_cDNA_P Parameter: Tissue Value: Roots
  misc_feature: MA Experiment ID: 108461 Result: Up-regulated in Transcription
  misc_feature: MA Experiment 108461 PARAMETER Experiment Name: At_Germinating_Seeds_cDNA_P Parameter: Age (day) Value: 1 vs. 0
  misc_feature: MA Experiment 108461 PARAMETER Experiment Name: At_Germinating_Seeds_cDNA_P Parameter: Tissue Value: Germinating Seeds
  misc_feature: MA Experiment ID: 108462 Result: Up-regulated in Transcription
  misc_feature: MA Experiment 108462 PARAMETER Experiment Name: At_Germinating_Seeds_cDNA_P Parameter: Age (day) Value: 2 vs. 0
  misc_feature: MA Experiment 108462 PARAMETER Experiment Name: At_Germinating_Seeds_cDNA_P Parameter: Tissue Value: Germinating Seeds
  misc_feature: MA Experiment ID: 108463 Result: Up-regulated in Transcription
  misc_feature: MA Experiment 108463 PARAMETER Experiment Name: At_Germinating_Seeds_cDNA_P Parameter: Age (day) Value: 3 vs. 0
  misc_feature: MA Experiment 108463 PARAMETER Experiment Name: At_Germinating_Seeds_cDNA_P Parameter: Tissue Value: Germinating Seeds
  misc_feature: MA Experiment ID: 108464 Result: Up-regulated in Transcription
  misc_feature: MA Experiment 108464 PARAMETER Experiment Name: At_Germinating_Seeds_cDNA_P Parameter: Age (day) Value: 4 vs. 0
  misc_feature: MA Experiment 108464 PARAMETER Experiment Name: At_Germinating_Seeds_cDNA_P Parameter: Tissue Value: Germinating Seeds
  misc_feature: MA Experiment ID: 108569 Result: Up-regulated in Transcription
  misc_feature: MA Experiment 108569 PARAMETER Experiment Name: At_0.001%_MeJA__cDNA_P Parameter: Timepoint (hr) Value: 6
  misc_feature: MA Experiment 108569 PARAMETER Experiment Name: At_0.001%_MeJA__cDNA_P Parameter: Tissue Value: Aerial
  misc_feature: MA Experiment 108569 PARAMETER Experiment Name: At_0.001%_MeJA__cDNA_P Parameter: Treatment Value: 0.001% MeJA vs. No Treatment
  misc_feature: MA Experiment ID: 108576 Result: Down-regulated in Transcription
  misc_feature: MA Experiment 108576 PARAMETER Experiment Name: At_42deg_Heat_cDNA_P Parameter: Temperature (deg C) Value: 42 vs. 22
  misc_feature: MA Experiment 108576 PARAMETER Experiment Name: At_42deg_Heat_cDNA_P Parameter: Timepoint (hr) Value: 1
  misc_feature: MA Experiment 108576 PARAMETER Experiment Name: At_42deg_Heat_cDNA_P Parameter: Tissue Value: Aerial
  misc_feature: MA Experiment ID: 108579 Result: Up-regulated in Transcription
  misc_feature: MA Experiment 108579 PARAMETER Experiment Name: At_4deg_Cold_cDNA_P Parameter: Temperature (deg C) Value: 4 vs. 22
  misc_feature: MA Experiment 108579 PARAMETER Experiment Name: At_4deg_Cold_cDNA_P Parameter: Timepoint (hr) Value: 6
  misc_feature: MA Experiment 108579 PARAMETER Experiment Name: At_4deg_Cold_cDNA_P Parameter: Tissue Value: Aerial
  misc_feature: MA Experiment ID: 108595 Result: Down-regulated in Transcription
  misc_feature: MA Experiment 108595 PARAMETER Experiment Name: At_Ler-pi_Ovule_cDNA_P Parameter: Plant Line Value: null
  misc_feature: MA Experiment ID: 20000069 Result: Down-regulated in Transcription
  misc_feature: MA Experiment 20000069 PARAMETER Experiment Name: At_100uM_ABA_Mutants_cDNA_P Parameter: Plant Line Value: CS23
  misc_feature: MA Experiment 20000069 PARAMETER Experiment Name: At_100uM_ABA_Mutants_cDNA_P Parameter: Timepoint (hr) Value: 6
  misc_feature: MA Experiment 20000069 PARAMETER Experiment Name: At_100uM_ABA_Mutants_cDNA_P Parameter: Tissue Value: Aerial
  misc_feature: MA Experiment 20000069 PARAMETER Experiment Name: At_100uM_ABA_Mutants_cDNA_P Parameter: Treatment Value: 100uM ABA vs. No Treatment
  misc_feature: MA Experiment ID: 20000072 Result: Down-regulated in Transcription
  misc_feature: MA Experiment 20000072 PARAMETER Experiment Name: At_100uM_ABA_Mutants_cDNA_P Parameter: Plant Line Value: CS8105
  misc_feature: MA Experiment 20000072 PARAMETER Experiment Name: At_100uM_ABA_Mutants_cDNA_P Parameter: Timepoint (hr) Value: 6
  misc_feature: MA Experiment 20000072 PARAMETER Experiment Name: At_100uM_ABA_Mutants_cDNA_P Parameter: Tissue Value: Aerial
  misc_feature: MA Experiment 20000072 PARAMETER Experiment Name: At_100uM_ABA_Mutants_cDNA_P Parameter: Treatment Value: 100uM ABA vs. No Treatment
  misc_feature: MA Experiment ID: 20000086 Result: Down-regulated in Transcription
  misc_feature: MA Experiment 20000086 PARAMETER Experiment Name: At_100uM_ABA_Mutants_cDNA_P Parameter: Plant Line Value: CS22
  misc_feature: MA Experiment 20000086 PARAMETER Experiment Name: At_100uM_ABA_Mutants_cDNA_P Parameter: Timepoint (hr) Value: 6
  misc_feature: MA Experiment 20000086 PARAMETER Experiment Name: At_100uM_ABA_Mutants_cDNA_P Parameter: Tissue Value: Aerial
  misc_feature: MA Experiment 20000086 PARAMETER Experiment Name: At_100uM_ABA_Mutants_cDNA_P Parameter: Treatment Value: 100uM ABA vs. No Treatment
  misc_feature: MA Experiment ID: 20000087 Result: Down-regulated in Transcription
  misc_feature: MA Experiment 20000087 PARAMETER Experiment Name: At_100uM_ABA_Mutants_cDNA_P Parameter: Plant Line Value: WS
  misc_feature: MA Experiment 20000087 PARAMETER Experiment Name: At_100uM_ABA_Mutants_cDNA_P Parameter: Timepoint (hr) Value: 6
  misc_feature: MA Experiment 20000087 PARAMETER Experiment Name: At_100uM_ABA_Mutants_cDNA_P Parameter: Tissue Value: Aerial
  misc_feature: MA Experiment 20000087 PARAMETER Experiment Name: At_100uM_ABA_Mutants_cDNA_P Parameter: Treatment Value: 100uM ABA vs. No Treatment
  misc_feature: MA Experiment ID: 20000111 Result: Down-regulated in Transcription
  misc_feature: MA Experiment 20000111 PARAMETER Experiment Name: At_42deg_Heat_cDNA_P Parameter: Temperature (deg C) Value: 42 vs. 22
  misc_feature: MA Experiment 20000111 PARAMETER Experiment Name: At_42deg_Heat_cDNA_P Parameter: Timepoint (hr) Value: 6
  misc_feature: MA Experiment 20000111 PARAMETER Experiment Name: At_42deg_Heat_cDNA_P Parameter: Tissue Value: Aerial
  misc_feature: MA Experiment ID: 20000112 Result: Down-regulated in Transcription
  misc_feature: MA Experiment 20000112 PARAMETER Experiment Name: At_42deg_Heat_cDNA_P Parameter: Temperature (deg C) Value: 42 vs. 22
  misc_feature: MA Experiment 20000112 PARAMETER Experiment Name: At_42deg_Heat_cDNA_P Parameter: Timepoint (hr) Value: 2
  misc_feature: MA Experiment 20000112 PARAMETER Experiment Name: At_42deg_Heat_cDNA_P Parameter: Tissue Value: Aerial
  misc_feature: MA Experiment ID: 20000113 Result: Down-regulated in Transcription
  misc_feature: MA Experiment 20000113 PARAMETER Experiment Name: At_42deg_Heat_cDNA_P Parameter: Temperature (deg C) Value: 42 vs. 22
  misc_feature: MA Experiment 20000113 PARAMETER Experiment Name: At_42deg_Heat_cDNA_P Parameter: Timepoint (hr) Value: 8
  misc_feature: MA Experiment 20000113 PARAMETER Experiment Name: At_42deg_Heat_cDNA_P Parameter: Tissue Value: Aerial
  misc_feature: MA Experiment ID: 20000117 Result: Down-regulated in Transcription
  misc_feature: MA Experiment 20000117 PARAMETER Experiment Name: At_100uM_ABA_Mutants_cDNA_P Parameter: Plant Line Value: Columbia
  misc_feature: MA Experiment 20000117 PARAMETER Experiment Name: At_100uM_ABA_Mutants_cDNA_P Parameter: Timepoint (hr) Value: 6
  misc_feature: MA Experiment 20000117 PARAMETER Experiment Name: At_100uM_ABA_Mutants_cDNA_P Parameter: Tissue Value: Aerial
  misc_feature: MA Experiment 20000117 PARAMETER Experiment Name: At_100uM_ABA_Mutants_cDNA_P Parameter: Treatment Value: 100uM ABA vs. No Treatment
  misc_feature: MA Experiment ID: 20000144 Result: Down-regulated in Transcription
  misc_feature: MA Experiment 20000144 PARAMETER Experiment Name: At_42deg_Heat_cDNA_P Parameter: Temperature (deg C) Value: 42 vs. 22
  misc_feature: MA Experiment 20000144 PARAMETER Experiment Name: At_42deg_Heat_cDNA_P Parameter: Timepoint (hr) Value: 1
  misc_feature: MA Experiment 20000144 PARAMETER Experiment Name: At_42deg_Heat_cDNA_P Parameter: Tissue Value: Aerial
  misc_feature: MA Experiment ID: 20000171 Result: Down-regulated in Transcription
  misc_feature: MA Experiment 20000171 PARAMETER Experiment Name: At_42deg_Heat_P Parameter: Age (day) Value: 14
  misc_feature: MA Experiment 20000171 PARAMETER Experiment Name: At_42deg_Heat_P Parameter: Organism Value: A. thaliana
  misc_feature: MA Experiment 20000171 PARAMETER Experiment Name: At_42deg_Heat_P Parameter: Plant Line Value: WS
  misc_feature: MA Experiment 20000171 PARAMETER Experiment Name: At_42deg_Heat_P Parameter: Temperature (deg C) Value: 42 vs. 22
  misc_feature: MA Experiment 20000171 PARAMETER Experiment Name: At_42deg_Heat_P Parameter: Timepoint (hr) Value: 1
  misc_feature: MA Experiment 20000171 PARAMETER Experiment Name: At_42deg_Heat_P Parameter: Tissue Value: Aerial
  misc_feature: MA Experiment ID: 20000179 Result: Up-regulated in Transcription
  misc_feature: MA Experiment 20000179 PARAMETER Experiment Name: At_Germinating_Seeds_P Parameter: Age (hr) Value: 6 vs. 0
  misc_feature: MA Experiment 20000179 PARAMETER Experiment Name: At_Germinating_Seeds_P Parameter: Tissue Value: Germinating Seeds
  misc_feature: MA Experiment ID: 20000180 Result: Up-regulated in Transcription
  misc_feature: MA Experiment 20000180 PARAMETER Experiment Name: At_Germinating_Seeds_P Parameter: Age (hr) Value: 24 vs. 0
  misc_feature: MA Experiment 20000180 PARAMETER Experiment Name: At_Germinating_Seeds_P Parameter: Tissue Value: Germinating Seeds
  misc_feature: MA Experiment ID: 20000185 Result: Up-regulated in Transcription
  misc_feature: MA Experiment 20000185 PARAMETER Experiment Name: At_Roots__P Parameter: Age (day) Value: 7 vs. 21
  misc_feature: MA Experiment 20000185 PARAMETER Experiment Name: At_Roots__P Parameter: Organism Value: A. thaliana
  misc_feature: MA Experiment 20000185 PARAMETER Experiment Name: At_Roots__P Parameter: Tissue Value: Roots vs. Whole Plant
  misc_feature: MA Experiment ID: 20000213 Result: Up-regulated in Transcription
  misc_feature: MA Experiment 20000213 PARAMETER Experiment Name: At_4deg_Cold_P Parameter: Timepoint (hr) Value: 2
  misc_feature: MA Experiment ID: 20000234 Result: Up-regulated in Transcription
  misc_feature: MA Experiment 20000234 PARAMETER Experiment Name: At_Siliques_P Parameter: Age (day) Value: 21
  misc_feature: MA Experiment 20000234 PARAMETER Experiment Name: At_Siliques_P Parameter: Organism Value: A. thaliana
  misc_feature: MA Experiment 20000234 PARAMETER Experiment Name: At_Siliques_P Parameter: Plant Line Value: WS
  misc_feature: MA Experiment 20000234 PARAMETER Experiment Name: At_Siliques_P Parameter: Tissue Value: Less Than 5mm Siliques vs. Whole Plant
  misc_feature: MA Experiment ID: 20000235 Result: Up-regulated in Transcription
  misc_feature: MA Experiment 20000235 PARAMETER Experiment Name: At_Siliques_P Parameter: Age (day) Value: 21
  misc_feature: MA Experiment 20000235 PARAMETER Experiment Name: At_Siliques_P Parameter: Organism Value: A. thaliana
  misc_feature: MA Experiment 20000235 PARAMETER Experiment Name: At_Siliques_P Parameter: Plant Line Value: WS
  misc_feature: MA Experiment 20000235 PARAMETER Experiment Name: At_Siliques_P Parameter: Tissue Value: 5-10mm Siliques vs. Whole Plant
  misc_feature: MA Experiment ID: 20000437 Result: Down-regulated in Transcription
  misc_feature: MA Experiment 20000437 PARAMETER Experiment Name: At_Drought_P Parameter: Age (day) Value: 8
  misc_feature: MA Experiment 20000437 PARAMETER Experiment Name: At_Drought_P Parameter: Organism Value: A. thaliana
  misc_feature: MA Experiment 20000437 PARAMETER Experiment Name: At_Drought_P Parameter: Plant Line Value: WS
  misc_feature: MA Experiment 20000437 PARAMETER Experiment Name: At_Drought_P Parameter: Timepoint (hr) Value: 24
  misc_feature: MA Experiment 20000437 PARAMETER Experiment Name: At_Drought_P Parameter: Tissue Value: Whole Plant
  misc_feature: MA Experiment 20000437 PARAMETER Experiment Name: At_Drought_P Parameter: Treatment Value: Drought vs. No Drought
  misc_feature: MA Experiment ID: 20000439 Result: Up-regulated in Transcription
  misc_feature: MA Experiment 20000439 PARAMETER Experiment Name: At_Roots__P Parameter: Age (day) Value: 14 vs. 21
  misc_feature: MA Experiment 20000439 PARAMETER Experiment Name: At_Roots__P Parameter: Organism Value: A. thaliana
  misc_feature: MA Experiment 20000439 PARAMETER Experiment Name: At_Roots__P Parameter: Tissue Value: Roots vs. Whole Plant
  misc_feature: MA Experiment ID: 20001248 Result: Down-regulated in Transcription
  misc_feature: MA Experiment 20001248 PARAMETER Experiment Name: At_Far-red-induction_P Parameter: Age (day) Value: 7
  misc_feature: MA Experiment 20001248 PARAMETER Experiment Name: At_Far-red-induction_P Parameter: Light Value: Far-red vs. White
  misc_feature: MA Experiment 20001248 PARAMETER Experiment Name: At_Far-red-induction_P Parameter: Organism Value: A. thaliana
  misc_feature: MA Experiment 20001248 PARAMETER Experiment Name: At_Far-red-induction_P Parameter: Plant Line Value: Columbia
  misc_feature: MA Experiment 20001248 PARAMETER Experiment Name: At_Far-red-induction_P Parameter: Timepoint (hr) Value: 4
  misc_feature: MA Experiment 20001248 PARAMETER Experiment Name: At_Far-red-induction_P Parameter: Tissue Value: Whole Plant
  misc_feature: MA Experiment ID: 20001450 Result: Down-regulated in Transcription
  misc_feature: MA Experiment 20001450 PARAMETER Experiment Name: At_Far-red-induction_P Parameter: Age (day) Value: 7
  misc_feature: MA Experiment 20001450 PARAMETER Experiment Name: At_Far-red-induction_P Parameter: Light Value: Far-red vs. White
  misc_feature: MA Experiment 20001450 PARAMETER Experiment Name: At_Far-red-induction_P Parameter: Organism Value: A. thaliana
  misc_feature: MA Experiment 20001450 PARAMETER Experiment Name: At_Far-red-induction_P Parameter: Plant Line Value: Columbia
  misc_feature: MA Experiment 20001450 PARAMETER Experiment Name: At_Far-red-induction_P Parameter: Timepoint (hr) Value: 8
  misc_feature: MA Experiment 20001450 PARAMETER Experiment Name: At_Far-red-induction_P Parameter: Tissue Value: Whole Plant
  misc_feature: MA Experiment ID: 20001559 Result: Down-regulated in Transcription
  misc_feature: MA Experiment 20001559 PARAMETER Experiment Name: At_Drought_Soil_Dry_P Parameter: Age (day) Value: 28
  misc_feature: MA Experiment 20001559 PARAMETER Experiment Name: At_Drought_Soil_Dry_P Parameter: Organism Value: A. thaliana
  misc_feature: MA Experiment 20001559 PARAMETER Experiment Name: At_Drought_Soil_Dry_P Parameter: Plant Line Value: WS
  misc_feature: MA Experiment 20001559 PARAMETER Experiment Name: At_Drought_Soil_Dry_P Parameter: Post Timepoint (hr) Value: 29
  misc_feature: MA Experiment 20001559 PARAMETER Experiment Name: At_Drought_Soil_Dry_P Parameter: Post-Treatment Value: Re-Water vs. No Drought
  misc_feature: MA Experiment 20001559 PARAMETER Experiment Name: At_Drought_Soil_Dry_P Parameter: Timepoint (day) Value: 14
  misc_feature: MA Experiment 20001559 PARAMETER Experiment Name: At_Drought_Soil_Dry_P Parameter: Treatment Value: Drought vs. No Drought
  misc_feature: MA Experiment ID: 20001911 Result: Down-regulated in Transcription
  misc_feature: MA Experiment 20001911 PARAMETER Experiment Name: At_Drought_Reproduction_P Parameter: Age (day) Value: 40
  misc_feature: MA Experiment 20001911 PARAMETER Experiment Name: At_Drought_Reproduction_P Parameter: Organism Value: A. thaliana
  misc_feature: MA Experiment 20001911 PARAMETER Experiment Name: At_Drought_Reproduction_P Parameter: Plant Line Value: WS
  misc_feature: MA Experiment 20001911 PARAMETER Experiment Name: At_Drought_Reproduction_P Parameter: Timepoint (day) Value: 10
  misc_feature: MA Experiment 20001911 PARAMETER Experiment Name: At_Drought_Reproduction_P Parameter: Tissue Value: Flowers
  misc_feature: MA Experiment 20001911 PARAMETER Experiment Name: At_Drought_Reproduction_P Parameter: Treatment Value: Drought vs. No Drought

SEQ ID NO: 32800 - protein, 441 aa, Arabidopsis thaliana; identical to SEQ ID NO: 29210
  peptide (1)..(441): Ceres Seq. ID no. 13575418
  misc_feature (167)..(289): Pfam Name: S-adenosylmethionine synthetase, central domain Pfam Description: S-adenosylmethionine synthetase, central domain
  misc_feature (52)..(438): Homolog of NCBI NO: 3024127 NR Description: S-adenosylmethionine synthetase 2 (Methionine
  misc_feature (52)..(441): Homolog of NCBI NO: 1708995 NR Description: S-adenosylmethionine synthetase 1 (Methionine
  misc_feature (52)..(441): Homolog of NCBI NO: 3024148 NR Description: S-adenosylmethionine synthetase 3 (Methionine
  misc_feature (52)..(441): Homolog of NCBI NO: 1709004 NR Description: S-adenosylmethionine synthetase 2 (Methionine
  misc_feature (52)..(441): Homolog of NCBI NO: 5923879 NR Description: S-adenosyl-L-methionine synthetase [Petunia x
  misc_feature (52)..(441): Homolog of NCBI NO: 1346523 NR Description: S-adenosylmethionine synthetase (Methionine
  misc_feature (52)..(441): Homolog of NCBI NO: 7230379 NR Description: S-adenosyl-L-methionine synthetase [Nicotiana
  misc_feature (52)..(441): Homolog of NCBI NO: 1170939 NR Description: S-adenosylmethionine synthetase 3 (Methionine
  misc_feature (52)..(441): Homolog of NCBI NO: 14600070 NR Description: S-adenosylmethionine synthetase [Brassica juncea]
  misc_feature (52)..(441): Homolog of NCBI NO: 15228048 NR Description: s-adenosylmethionine synthetase -related

SEQ ID NO: 32801 - protein, 390 aa, Arabidopsis thaliana; identical to SEQ ID NO: 29211
  peptide (1)..(390): Ceres Seq. ID no. 13575419
  misc_feature (116)..(238): Pfam Name: S-adenosylmethionine synthetase, central domain Pfam Description: S-adenosylmethionine synthetase, central domain
  misc_feature (1)..(387): Homolog of NCBI NO: 3024127 NR Description: S-adenosylmethionine synthetase 2 (Methionine
  misc_feature (1)..(390): Homolog of NCBI NO: 1708995 NR Description: S-adenosylmethionine synthetase 1 (Methionine
  misc_feature (1)..(390): Homolog of NCBI NO: 3024148 NR Description: S-adenosylmethionine synthetase 3 (Methionine
  misc_feature (1)..(390): Homolog of NCBI NO: 1709004 NR Description: S-adenosylmethionine synthetase 2 (Methionine
  misc_feature (1)..(390): Homolog of NCBI NO: 5923879 NR Description: S-adenosyl-L-methionine synthetase [Petunia x
  misc_feature (1)..(390): Homolog of NCBI NO: 1346523 NR Description: S-adenosylmethionine synthetase (Methionine
  misc_feature (1)..(390): Homolog of NCBI NO: 7230379 NR Description: S-adenosyl-L-methionine synthetase [Nicotiana
  misc_feature (1)..(390): Homolog of NCBI NO: 1170939 NR Description: S-adenosylmethionine synthetase 3 (Methionine
  misc_feature (1)..(390): Homolog of NCBI NO: 14600070 NR Description: S-adenosylmethionine synthetase [Brassica juncea]
  misc_feature (1)..(390): Homolog of NCBI NO: 15228048 NR Description: s-adenosylmethionine synthetase -related

SEQ ID NO: 32802 - protein, 341 aa, Arabidopsis thaliana; identical to SEQ ID NO: 29212
  peptide (1)..(341): Ceres Seq. ID no. 13575420
  misc_feature (67)..(189): Pfam Name: S-adenosylmethionine synthetase, central domain Pfam Description: S-adenosylmethionine synthetase, central domain
  misc_feature (1)..(338): Homolog of NCBI NO: 3024127 NR Description: S-adenosylmethionine synthetase 2 (Methionine
  misc_feature (1)..(341): Homolog of NCBI NO: 1708995 NR Description: S-adenosylmethionine synthetase 1 (Methionine
  misc_feature (1)..(341): Homolog of NCBI NO: 3024148 NR Description: S-adenosylmethionine synthetase 3 (Methionine
  misc_feature (1)..(341): Homolog of NCBI NO: 1709004 NR Description: S-adenosylmethionine synthetase 2 (Methionine
  misc_feature (1)..(341): Homolog of NCBI NO: 5923879 NR Description: S-adenosyl-L-methionine synthetase [Petunia x
  misc_feature (1)..(341): Homolog of NCBI NO: 1346523 NR Description: S-adenosylmethionine synthetase (Methionine
  misc_feature (1)..(341): Homolog of NCBI NO: 7230379 NR Description: S-adenosyl-L-methionine synthetase [Nicotiana
  misc_feature (1)..(341): Homolog of NCBI NO: 1170939 NR Description: S-adenosylmethionine synthetase 3 (Methionine
  misc_feature (1)..(341): Homolog of NCBI NO: 14600070 NR Description: S-adenosylmethionine synthetase [Brassica juncea]
  misc_feature (1)..(341): Homolog of NCBI NO: 15228048 NR Description: s-adenosylmethionine synthetase -related

SEQ ID NO: 32803 - DNA, 1192 bp, Arabidopsis thaliana; identical to SEQ ID NO: 29213
  misc_feature (1)..(1192): Ceres Seq. ID no. 12324345
  misc_feature: MA Experiment ID: 108461 Result: Up-regulated in Transcription
  misc_feature: MA Experiment 108461 PARAMETER Experiment Name: At_Germinating_Seeds_cDNA_P Parameter: Age (day) Value: 1 vs. 0
  misc_feature: MA Experiment 108461 PARAMETER Experiment Name: At_Germinating_Seeds_cDNA_P Parameter: Tissue Value: Germinating Seeds
  misc_feature: MA Experiment ID: 108462 Result: Up-regulated in Transcription
  misc_feature: MA Experiment 108462 PARAMETER Experiment Name: At_Germinating_Seeds_cDNA_P Parameter: Age (day) Value: 2 vs. 0
  misc_feature: MA Experiment 108462 PARAMETER Experiment Name: At_Germinating_Seeds_cDNA_P Parameter: Tissue Value: Germinating Seeds
  misc_feature: MA Experiment ID: 108463 Result: Up-regulated in Transcription
  misc_feature: MA Experiment 108463 PARAMETER Experiment Name: At_Germinating_Seeds_cDNA_P Parameter: Age (day) Value: 3 vs. 0
  misc_feature: MA Experiment 108463 PARAMETER Experiment Name: At_Germinating_Seeds_cDNA_P Parameter: Tissue Value: Germinating Seeds
  misc_feature: MA Experiment ID: 108464 Result: Up-regulated in Transcription
  misc_feature: MA Experiment 108464 PARAMETER Experiment Name: At_Germinating_Seeds_cDNA_P Parameter: Age (day) Value: 4 vs. 0
  misc_feature: MA Experiment 108464 PARAMETER Experiment Name: At_Germinating_Seeds_cDNA_P Parameter: Tissue Value: Germinating Seeds
  misc_feature: MA Experiment ID: 108569 Result: Up-regulated in Transcription
  misc_feature: MA Experiment 108569 PARAMETER Experiment Name: At_0.001%_MeJA__cDNA_P Parameter: Timepoint (hr) Value: 6
  misc_feature: MA Experiment 108569 PARAMETER Experiment Name: At_0.001%_MeJA__cDNA_P Parameter: Tissue Value: Aerial
  misc_feature: MA Experiment 108569 PARAMETER Experiment Name: At_0.001%_MeJA__cDNA_P Parameter: Treatment Value: 0.001% MeJA vs. No Treatment
  misc_feature: MA Experiment ID: 108594 Result: Down-regulated in Transcription
  misc_feature: MA Experiment 108594 PARAMETER Experiment Name: At_Ler-rhl_Root_cDNA_P Parameter: Plant Line Value: null
  misc_feature: MA Experiment ID: 108595 Result: Down-regulated in Transcription
  misc_feature: MA Experiment 108595 PARAMETER Experiment Name: At_Ler-pi_Ovule_cDNA_P Parameter: Plant Line Value: null
  misc_feature: MA Experiment ID: 108668 Result: Up-regulated in Transcription
  misc_feature: MA Experiment 108668 PARAMETER Experiment Name: At_2mM_SA_cDNA_P Parameter: Plant Line Value: WS
  misc_feature: MA Experiment 108668 PARAMETER Experiment Name: At_2mM_SA_cDNA_P Parameter: Timepoint (hr) Value: 6
  misc_feature: MA Experiment 108668 PARAMETER Experiment Name: At_2mM_SA_cDNA_P Parameter: Treatment Value: 2mM SA vs. No Treatment
  misc_feature: MA Experiment ID: 20000069 Result: Down-regulated in Transcription
  misc_feature: MA Experiment 20000069 PARAMETER Experiment Name: At_100uM_ABA_Mutants_cDNA_P Parameter: Plant Line Value: CS23
  misc_feature: MA Experiment 20000069 PARAMETER Experiment Name: At_100uM_ABA_Mutants_cDNA_P Parameter: Timepoint (hr) Value: 6
  misc_feature: MA Experiment 20000069 PARAMETER Experiment Name: At_100uM_ABA_Mutants_cDNA_P Parameter: Tissue Value: Aerial
  misc_feature: MA Experiment 20000069 PARAMETER Experiment Name: At_100uM_ABA_Mutants_cDNA_P Parameter: Treatment Value: 100uM ABA vs. No Treatment
  misc_feature: MA Experiment ID: 20000087 Result: Down-regulated in Transcription
  misc_feature: MA Experiment 20000087 PARAMETER Experiment Name: At_100uM_ABA_Mutants_cDNA_P Parameter: Plant Line Value: WS
  misc_feature: MA Experiment 20000087 PARAMETER Experiment Name: At_100uM_ABA_Mutants_cDNA_P Parameter: Timepoint (hr) Value: 6
  misc_feature: MA Experiment 20000087 PARAMETER Experiment Name: At_100uM_ABA_Mutants_cDNA_P Parameter: Tissue Value: Aerial
  misc_feature: MA Experiment 20000087 PARAMETER Experiment Name: At_100uM_ABA_Mutants_cDNA_P Parameter: Treatment Value: 100uM ABA vs. No Treatment
  misc_feature: MA Experiment ID: 20000180 Result: Up-regulated in Transcription
  misc_feature: MA Experiment 20000180 PARAMETER Experiment Name: At_Germinating_Seeds_P Parameter: Age (hr) Value: 24 vs. 0
  misc_feature: MA Experiment 20000180 PARAMETER Experiment Name: At_Germinating_Seeds_P Parameter: Tissue Value: Germinating Seeds
  misc_feature: MA Experiment ID: 20000182 Result: Up-regulated in Transcription
  misc_feature: MA Experiment 20000182 PARAMETER Experiment Name: At_2mM_SA_P Parameter: Age (day) Value: 14
  misc_feature: MA Experiment 20000182 PARAMETER Experiment Name: At_2mM_SA_P Parameter: Organism Value: A. thaliana
  misc_feature: MA Experiment 20000182 PARAMETER Experiment Name: At_2mM_SA_P Parameter: Plant Line Value: WS
  misc_feature: MA Experiment 20000182 PARAMETER Experiment Name: At_2mM_SA_P Parameter: Timepoint (hr) Value: 6
  misc_feature: MA Experiment 20000182 PARAMETER Experiment Name: At_2mM_SA_P Parameter: Tissue Value: Aerial
  misc_feature: MA Experiment 20000182 PARAMETER Experiment Name: At_2mM_SA_P Parameter: Treatment Value: 2mM SA vs. No Treatment
  misc_feature: MA Experiment ID: 20001248 Result: Down-regulated in Transcription
  misc_feature: MA Experiment 20001248 PARAMETER Experiment Name: At_Far-red-induction_P Parameter: Age (day) Value: 7
  misc_feature: MA Experiment 20001248 PARAMETER Experiment Name: At_Far-red-induction_P Parameter: Light Value: Far-red vs. White
  misc_feature: MA Experiment 20001248 PARAMETER Experiment Name: At_Far-red-induction_P Parameter: Organism Value: A. thaliana
  misc_feature: MA Experiment 20001248 PARAMETER Experiment Name: At_Far-red-induction_P Parameter: Plant Line Value: Columbia
  misc_feature: MA Experiment 20001248 PARAMETER Experiment Name: At_Far-red-induction_P Parameter: Timepoint (hr) Value: 4
  misc_feature: MA Experiment 20001248 PARAMETER Experiment Name: At_Far-red-induction_P Parameter: Tissue Value: Whole Plant
  misc_feature: MA Experiment ID: 20001905 Result: Up-regulated in Transcription
  misc_feature: MA Experiment 20001905 PARAMETER Experiment Name: At_Drought_Reproduction_P Parameter: Age (day) Value: 40
  misc_feature: MA Experiment 20001905 PARAMETER Experiment Name: At_Drought_Reproduction_P Parameter: Organism Value: A. thaliana
  misc_feature: MA Experiment 20001905 PARAMETER Experiment Name: At_Drought_Reproduction_P Parameter: Plant Line Value: WS
  misc_feature: MA Experiment 20001905 PARAMETER Experiment Name: At_Drought_Reproduction_P Parameter: Timepoint (day) Value: 10
  misc_feature: MA Experiment 20001905 PARAMETER Experiment Name: At_Drought_Reproduction_P Parameter: Tissue Value: Rosettes
  misc_feature: MA Experiment 20001905 PARAMETER Experiment Name: At_Drought_Reproduction_P Parameter: Treatment Value: Drought vs. No Drought

SEQ ID NO: 32804 - protein, 166 aa, Arabidopsis thaliana; identical to SEQ ID NO: 29214
  peptide (1)..(166): Ceres Seq. ID no. 12324346
  misc_feature (6)..(107): Homolog of NCBI NO: 25406281 NR Description: unknown protein F25P22.7 [imported] - Arabidopsis
  misc_feature (8)..(162): Homolog of NCBI NO: 13937298 NR Description: unknown protein [Oryza sativa]
  misc_feature (128)..(163): Homolog of NCBI NO: 9719732 NR Description: T10F20.18 [Arabidopsis thaliana]
  misc_feature (6)..(127): Homolog of NCBI NO: 9719732 NR Description: T10F20.18 [Arabidopsis thaliana]
  misc_feature (128)..(163): Homolog of NCBI NO: 25402844 NR Description: protein T10O22.15 [imported] - Arabidopsis
  misc_feature (6)..(127): Homolog of NCBI NO: 25402844 NR Description: protein T10O22.15 [imported] - Arabidopsis
  misc_feature (6)..(163): Homolog of NCBI NO: 15221003 NR Description: hypothetical protein; protein id: At1g18180.1
  misc_feature (6)..(164): Homolog of NCBI NO: 30698953 NR Description: expressed protein [Arabidopsis thaliana]
  misc_feature (6)..(166): Homolog of NCBI NO: 18410409 NR Description: expressed protein
  misc_feature (6)..(166): Homolog of NCBI NO: 21537359 NR Description: unknown [Arabidopsis thaliana]

SEQ ID NO: 32805 - protein, 163 aa, Arabidopsis thaliana; identical to SEQ ID NO: 29215
  peptide (1)..(163): Ceres Seq. ID no. 12324347
  misc_feature (3)..(104): Homolog of NCBI NO: 25406281 NR Description: unknown protein F25P22.7 [imported] - Arabidopsis
  misc_feature (5)..(159): Homolog of NCBI NO: 13937298 NR Description: unknown protein [Oryza sativa]
  misc_feature (125)..(160): Homolog of NCBI NO: 9719732 NR Description: T10F20.18 [Arabidopsis thaliana]
  misc_feature (3)..(124): Homolog of NCBI NO: 9719732 NR Description: T10F20.18 [Arabidopsis thaliana]
  misc_feature (125)..(160): Homolog of NCBI NO: 25402844 NR Description: protein T10O22.15 [imported] - Arabidopsis
  misc_feature (3)..(124): Homolog of NCBI NO: 25402844 NR Description: protein T10O22.15 [imported] - Arabidopsis
  misc_feature (3)..(160): Homolog of NCBI NO: 15221003 NR Description: hypothetical protein; protein id: At1g18180.1
  misc_feature (3)..(161): Homolog of NCBI NO: 30698953 NR Description: expressed protein [Arabidopsis thaliana]
  misc_feature (3)..(163): Homolog of NCBI NO: 18410409 NR Description: expressed protein
  misc_feature (3)..(163): Homolog of NCBI NO: 21537359 NR Description: unknown [Arabidopsis thaliana]

SEQ ID NO: 32806 - protein, 162 aa, Arabidopsis thaliana; identical to SEQ ID NO: 29216
  peptide (1)..(162): Ceres Seq. ID no. 12324348
  misc_feature (32)..(155): Homolog of NCBI NO: 21355723 NR Description: CG6282-PA [Drosophila melanogaster]
  misc_feature (40)..(159): Homolog of NCBI NO: 25406281 NR Description: unknown protein F25P22.7 [imported] - Arabidopsis
  misc_feature (29)..(157): Homolog of NCBI NO: 13937298 NR Description: unknown protein [Oryza sativa]
  misc_feature (110)..(159): Homolog of NCBI NO: 9719732 NR Description: T10F20.18 [Arabidopsis thaliana]
  misc_feature (29)..(92): Homolog of NCBI NO: 9719732 NR Description: T10F20.18 [Arabidopsis thaliana]
  misc_feature (29)..(159): Homolog of NCBI NO: 25402844 NR Description: protein T10O22.15 [imported] - Arabidopsis
  misc_feature (29)..(159): Homolog of NCBI NO: 15221003 NR Description: hypothetical protein; protein id: At1g18180.1
  misc_feature (29)..(159): Homolog of NCBI NO: 30698953 NR Description: expressed protein [Arabidopsis thaliana]
  misc_feature (29)..(159): Homolog of NCBI NO: 18410409 NR Description: expressed protein
  misc_feature (29)..(159): Homolog of NCBI NO: 21537359 NR Description: unknown [Arabidopsis thaliana]

SEQ ID NO: 32807 - DNA, 1360 bp, Arabidopsis thaliana; identical to SEQ ID NO: 29217
  misc_feature (1)..(1360): Ceres Seq. ID no. 12339401
  misc_feature: MA Experiment ID: 108434 Result: Down-regulated in Transcription
  misc_feature: MA Experiment 108434 PARAMETER Experiment Name: At_Root_Tips_cDNA_P Parameter: Tissue Value: Root Tips
  misc_feature: MA Experiment ID: 108462 Result: Up-regulated in Transcription
  misc_feature: MA Experiment 108462 PARAMETER Experiment Name: At_Germinating_Seeds_cDNA_P Parameter: Age (day) Value: 2 vs. 0
  misc_feature: MA Experiment 108462 PARAMETER Experiment Name: At_Germinating_Seeds_cDNA_P Parameter: Tissue Value: Germinating Seeds
  misc_feature: MA Experiment ID: 108463 Result: Up-regulated in Transcription
  misc_feature: MA Experiment 108463 PARAMETER Experiment Name: At_Germinating_Seeds_cDNA_P Parameter: Age (day) Value: 3 vs. 0
  misc_feature: MA Experiment 108463 PARAMETER Experiment Name: At_Germinating_Seeds_cDNA_P Parameter: Tissue Value: Germinating Seeds
  misc_feature: MA Experiment ID: 108464 Result: Up-regulated in Transcription
  misc_feature: MA Experiment 108464 PARAMETER Experiment Name: At_Germinating_Seeds_cDNA_P Parameter: Age (day) Value: 4 vs. 0
  misc_feature: MA Experiment 108464 PARAMETER Experiment Name: At_Germinating_Seeds_cDNA_P Parameter: Tissue Value: Germinating Seeds
  misc_feature: MA Experiment ID: 108488 Result: Down-regulated in Transcription
  misc_feature: MA Experiment ID: 108573 Result: Up-regulated in Transcription
  misc_feature: MA Experiment 108573 PARAMETER Experiment Name: At_Drought_cDNA_P Parameter: Timepoint (hr) Value: 6
  misc_feature: MA Experiment 108573 PARAMETER Experiment Name: At_Drought_cDNA_P Parameter: Tissue Value: Aerial
  misc_feature: MA Experiment 108573 PARAMETER Experiment Name: At_Drought_cDNA_P Parameter: Treatment Value: Drought vs. No Drought
  misc_feature: MA Experiment ID: 108574 Result: Down-regulated in Transcription
  misc_feature: MA Experiment 108574 PARAMETER Experiment Name: At_Wounding__cDNA_P Parameter: Timepoint (hr) Value: 1
  misc_feature: MA Experiment 108574 PARAMETER Experiment Name: At_Wounding__cDNA_P Parameter: Tissue Value: Aerial
  misc_feature: MA Experiment 108574 PARAMETER Experiment Name: At_Wounding__cDNA_P Parameter: Treatment Value: Wounding vs. No Wounding
  misc_feature: MA Experiment ID: 108577 Result: Down-regulated in Transcription
  misc_feature: MA Experiment 108577 PARAMETER Experiment Name: At_42deg_Heat_cDNA_P Parameter: Temperature (deg C) Value: 42 vs. 22
  misc_feature: MA Experiment 108577 PARAMETER Experiment Name: At_42deg_Heat_cDNA_P Parameter: Timepoint (hr) Value: 6
  misc_feature: MA Experiment 108577 PARAMETER Experiment Name: At_42deg_Heat_cDNA_P Parameter: Tissue Value: Aerial
  misc_feature: MA Experiment ID: 108579 Result: Down-regulated in Transcription
  misc_feature: MA Experiment 108579 PARAMETER Experiment Name: At_4deg_Cold_cDNA_P Parameter: Temperature (deg C) Value: 4 vs. 22
  misc_feature: MA Experiment 108579 PARAMETER Experiment Name: At_4deg_Cold_cDNA_P Parameter: Timepoint (hr) Value: 6
  misc_feature: MA Experiment 108579 PARAMETER Experiment Name: At_4deg_Cold_cDNA_P Parameter: Tissue Value: Aerial
  misc_feature: MA Experiment ID: 108595 Result: Down-regulated in Transcription
  misc_feature: MA Experiment 108595 PARAMETER Experiment Name: At_Ler-pi_Ovule_cDNA_P Parameter: Plant Line Value: null
  misc_feature: MA Experiment ID: 20000030 Result: Up-regulated in Transcription
  misc_feature: MA Experiment 20000030 PARAMETER Experiment Name: At_CS6630_Roots_cDNA_P Parameter: Plant Line Value: CS6630 vs. WS
  misc_feature: MA Experiment 20000030 PARAMETER Experiment Name: At_CS6630_Roots_cDNA_P Parameter: Tissue Value: Roots
  misc_feature: MA Experiment ID: 20000068 Result: Up-regulated in Transcription
  misc_feature: MA Experiment ID: 20000069 Result: Up-regulated in Transcription
  misc_feature: MA Experiment 20000069 PARAMETER Experiment Name: At_100uM_ABA_Mutants_cDNA_P Parameter: Plant Line Value: CS23
  misc_feature: MA Experiment 20000069 PARAMETER Experiment Name: At_100uM_ABA_Mutants_cDNA_P Parameter: Timepoint (hr) Value: 6
  misc_feature: MA Experiment 20000069 PARAMETER Experiment Name: At_100uM_ABA_Mutants_cDNA_P Parameter: Tissue Value: Aerial
  misc_feature: MA Experiment 20000069 PARAMETER Experiment Name: At_100uM_ABA_Mutants_cDNA_P Parameter: Treatment Value: 100uM ABA vs. No Treatment
  misc_feature: MA Experiment ID: 20000070 Result: Up-regulated in Transcription
  misc_feature: MA Experiment 20000070 PARAMETER Experiment Name: At_100uM_ABA_Mutants_cDNA_P Parameter: Plant Line Value: CS24
  misc_feature: MA Experiment 20000070 PARAMETER Experiment Name: At_100uM_ABA_Mutants_cDNA_P Parameter: Timepoint (hr) Value: 6
  misc_feature: MA Experiment 20000070 PARAMETER Experiment Name: At_100uM_ABA_Mutants_cDNA_P Parameter: Tissue Value: Aerial
  misc_feature: MA Experiment 20000070 PARAMETER Experiment Name: At_100uM_ABA_Mutants_cDNA_P Parameter: Treatment Value: 100uM ABA vs. No Treatment
  misc_feature: MA Experiment ID: 20000071 Result: Up-regulated in Transcription
  misc_feature: MA Experiment 20000071 PARAMETER Experiment Name: At_100uM_ABA_Mutants_cDNA_P Parameter: Plant Line Value: CS8104
  misc_feature: MA Experiment 20000071 PARAMETER Experiment Name: At_100uM_ABA_Mutants_cDNA_P Parameter: Timepoint (hr) Value: 6
  misc_feature: MA Experiment 20000071 PARAMETER Experiment Name: At_100uM_ABA_Mutants_cDNA_P Parameter: Tissue Value: Aerial
  misc_feature: MA Experiment 20000071 PARAMETER Experiment Name: At_100uM_ABA_Mutants_cDNA_P Parameter: Treatment Value: 100uM ABA vs. No Treatment
  misc_feature: MA Experiment ID: 20000072 Result: Up-regulated in Transcription
  misc_feature: MA Experiment 20000072 PARAMETER Experiment Name: At_100uM_ABA_Mutants_cDNA_P Parameter: Plant Line Value: CS8105
  misc_feature: MA Experiment 20000072 PARAMETER Experiment Name: At_100uM_ABA_Mutants_cDNA_P Parameter: Timepoint (hr) Value: 6
  misc_feature: MA Experiment 20000072 PARAMETER Experiment Name: At_100uM_ABA_Mutants_cDNA_P Parameter: Tissue Value: Aerial
  misc_feature: MA Experiment 20000072 PARAMETER Experiment Name: At_100uM_ABA_Mutants_cDNA_P Parameter: Treatment Value: 100uM ABA vs. No Treatment
  misc_feature: MA Experiment ID: 20000086 Result: Up-regulated in Transcription
  misc_feature: MA Experiment 20000086 PARAMETER Experiment Name: At_100uM_ABA_Mutants_cDNA_P Parameter: Plant Line Value: CS22
  misc_feature: MA Experiment 20000086 PARAMETER Experiment Name: At_100uM_ABA_Mutants_cDNA_P Parameter: Timepoint (hr) Value: 6
  misc_feature: MA Experiment 20000086 PARAMETER Experiment Name: At_100uM_ABA_Mutants_cDNA_P Parameter: Tissue Value: Aerial
  misc_feature: MA Experiment 20000086 PARAMETER Experiment Name: At_100uM_ABA_Mutants_cDNA_P Parameter: Treatment Value: 100uM ABA vs. No Treatment
  misc_feature: MA Experiment ID: 20000088 Result: Up-regulated in Transcription
  misc_feature: MA Experiment 20000088 PARAMETER Experiment Name: At_100uM_ABA_Mutants_cDNA_P Parameter: Plant Line Value: Landsberg
  misc_feature: MA Experiment 20000088 PARAMETER Experiment Name: At_100uM_ABA_Mutants_cDNA_P Parameter: Timepoint (hr) Value: 6
  misc_feature: MA Experiment 20000088 PARAMETER Experiment Name: At_100uM_ABA_Mutants_cDNA_P Parameter: Tissue Value: Aerial
  misc_feature: MA Experiment 20000088 PARAMETER Experiment Name: At_100uM_ABA_Mutants_cDNA_P Parameter: Treatment Value: 100uM ABA vs. No Treatment
  misc_feature: MA Experiment ID: 20000089 Result: Up-regulated in Transcription
  misc_feature: MA Experiment ID: 20000090 Result: Up-regulated in Transcription
  misc_feature: MA Experiment ID: 20000111 Result: Down-regulated in Transcription
  misc_feature: MA Experiment 20000111 PARAMETER Experiment Name: At_42deg_Heat_cDNA_P Parameter: Temperature (deg C) Value: 42 vs. 22
  misc_feature: MA Experiment 20000111 PARAMETER Experiment Name: At_42deg_Heat_cDNA_P Parameter: Timepoint (hr) Value: 6
  misc_feature: MA Experiment 20000111 PARAMETER Experiment Name: At_42deg_Heat_cDNA_P Parameter: Tissue Value: Aerial
  misc_feature: MA Experiment ID: 20000113 Result: Down-regulated in Transcription
  misc_feature: MA Experiment 20000113 PARAMETER Experiment Name: At_42deg_Heat_cDNA_P Parameter: Temperature (deg C) Value: 42 vs. 22
  misc_feature: MA Experiment 20000113 PARAMETER Experiment Name: At_42deg_Heat_cDNA_P Parameter: Timepoint (hr) Value: 8
  misc_feature: MA Experiment 20000113 PARAMETER Experiment Name: At_42deg_Heat_cDNA_P Parameter: Tissue Value: Aerial
  misc_feature: MA Experiment ID: 20000117 Result: Up-regulated in Transcription
  misc_feature: MA Experiment 20000117 PARAMETER Experiment Name: At_100uM_ABA_Mutants_cDNA_P Parameter: Plant Line Value: Columbia
  misc_feature: MA Experiment 20000117 PARAMETER Experiment Name: At_100uM_ABA_Mutants_cDNA_P Parameter: Timepoint (hr) Value: 6
  misc_feature: MA Experiment 20000117 PARAMETER Experiment Name: At_100uM_ABA_Mutants_cDNA_P Parameter: Tissue Value: Aerial
  misc_feature: MA Experiment 20000117 PARAMETER Experiment Name: At_100uM_ABA_Mutants_cDNA_P Parameter: Treatment Value: 100uM ABA vs. No Treatment
  misc_feature: MA Experiment ID: 20000184 Result: Down-regulated in Transcription
  misc_feature: MA Experiment 20000184 PARAMETER Experiment Name: At_Shoots__P Parameter: Age (day) Value: 7
  misc_feature: MA Experiment 20000184 PARAMETER Experiment Name: At_Shoots__P Parameter: Tissue Value: Shoots vs. Whole Plant
  misc_feature: MA Experiment ID: 20000185 Result: Down-regulated in Transcription
  misc_feature: MA Experiment 20000185 PARAMETER Experiment Name: At_Roots__P Parameter: Age (day) Value: 7 vs. 21
  misc_feature: MA Experiment 20000185 PARAMETER Experiment Name: At_Roots__P Parameter: Organism Value: A. thaliana
  misc_feature: MA Experiment 20000185 PARAMETER Experiment Name: At_Roots__P Parameter: Tissue Value: Roots vs. Whole Plant
  misc_feature: MA Experiment ID: 20000235 Result: Down-regulated in Transcription
  misc_feature: MA Experiment 20000235 PARAMETER Experiment Name: At_Siliques_P Parameter: Age (day) Value: 21
  misc_feature: MA Experiment 20000235 PARAMETER Experiment Name: At_Siliques_P Parameter: Organism Value: A. thaliana
  misc_feature: MA Experiment 20000235 PARAMETER Experiment Name: At_Siliques_P Parameter: Plant Line Value: WS
  misc_feature: MA Experiment 20000235 PARAMETER Experiment Name: At_Siliques_P Parameter: Tissue Value: 5-10mm Siliques vs. Whole Plant
  misc_feature: MA Experiment ID: 20000264 Result: Down-regulated in Transcription
  misc_feature: MA Experiment 20000264 PARAMETER Experiment Name: At_Open_Flower_P Parameter: Age (day) Value: 21
  misc_feature: MA Experiment 20000264 PARAMETER Experiment Name: At_Open_Flower_P Parameter: Plant Line Value: WS
  misc_feature: MA Experiment 20000264 PARAMETER Experiment Name: At_Open_Flower_P Parameter: Tissue Value: Open Flower vs. Whole Plant
  misc_feature: MA Experiment ID: 20000265 Result: Down-regulated in Transcription
  misc_feature: MA Experiment 20000265 PARAMETER Experiment Name: At_Open_Flower_P Parameter: Age (day) Value: 21
  misc_feature: MA Experiment 20000265 PARAMETER Experiment Name: At_Open_Flower_P Parameter: Plant Line Value: WS
  misc_feature: MA Experiment 20000265 PARAMETER Experiment Name: At_Open_Flower_P Parameter: Tissue Value: Closed Flower vs. Whole Plant
  misc_feature: MA Experiment ID: 20000286 Result: Down-regulated in Transcription
  misc_feature: MA Experiment 20000286 PARAMETER Experiment Name: At_Open_Flower_P Parameter: Age (day) Value: 21
  misc_feature: MA Experiment 20000286 PARAMETER Experiment Name: At_Open_Flower_P Parameter: Plant Line Value: WS
  misc_feature: MA Experiment 20000286 PARAMETER Experiment Name: At_Open_Flower_P Parameter: Tissue Value: Half Open vs. Whole Plant
  misc_feature: MA Experiment ID: 20000439 Result: Down-regulated in Transcription
  misc_feature: MA Experiment 20000439 PARAMETER Experiment Name: At_Roots__P Parameter: Age (day) Value: 14 vs. 21
  misc_feature: MA Experiment 20000439 PARAMETER Experiment Name: At_Roots__P Parameter: Organism Value: A. thaliana
  misc_feature: MA Experiment 20000439 PARAMETER Experiment Name: At_Roots__P Parameter: Tissue Value: Roots vs. Whole Plant
  misc_feature: MA Experiment ID: 20000573 Result: Down-regulated in Transcription
  misc_feature: MA Experiment 20000573 PARAMETER Experiment Name: At_100uM_ABA_Mutants__P Parameter: Organism Value: A. thaliana
  misc_feature: MA Experiment 20000573 PARAMETER Experiment Name: At_100uM_ABA_Mutants__P Parameter: Plant Line Value: CS22 vs. Ler wt
  misc_feature: MA Experiment 20000573 PARAMETER Experiment Name: At_100uM_ABA_Mutants__P Parameter: Timepoint (hr) Value: N/A
  misc_feature: MA Experiment 20000573 PARAMETER Experiment Name: At_100uM_ABA_Mutants__P Parameter: Tissue Value: Whole Plant
  misc_feature: MA Experiment 20000573 PARAMETER Experiment Name: At_100uM_ABA_Mutants__P Parameter: Treatment Value: None
  misc_feature: MA Experiment ID: 20000574 Result: Down-regulated in Transcription
  misc_feature: MA Experiment 20000574 PARAMETER Experiment Name: At_100uM_ABA_Mutants__P Parameter: Organism Value: A. thaliana
  misc_feature: MA Experiment 20000574 PARAMETER Experiment Name: At_100uM_ABA_Mutants__P Parameter: Plant Line Value: CS23 vs. Ler wt
  misc_feature: MA Experiment 20000574 PARAMETER Experiment Name: At_100uM_ABA_Mutants__P Parameter: Timepoint (hr) Value: N/A
  misc_feature: MA Experiment 20000574 PARAMETER Experiment Name: At_100uM_ABA_Mutants__P Parameter: Tissue Value: Whole Plant
  misc_feature: MA Experiment 20000574 PARAMETER Experiment Name: At_100uM_ABA_Mutants__P Parameter: Treatment Value: None
  misc_feature: MA Experiment ID: 20001247 Result: Down-regulated in Transcription
  misc_feature: MA Experiment 20001247 PARAMETER Experiment Name: At_Far-red-induction_P Parameter: Age (day) Value: 7
  misc_feature: MA Experiment 20001247 PARAMETER Experiment Name: At_Far-red-induction_P Parameter: Light Value: Far-red vs. White
  misc_feature: MA Experiment 20001247 PARAMETER Experiment Name: At_Far-red-induction_P Parameter: Organism Value: A. thaliana
  misc_feature: MA Experiment 20001247 PARAMETER Experiment Name: At_Far-red-induction_P Parameter: Plant Line Value: Columbia
  misc_feature: MA Experiment 20001247 PARAMETER Experiment Name: At_Far-red-induction_P Parameter: Timepoint (hr) Value: 1
  misc_feature: MA Experiment 20001247 PARAMETER Experiment Name: At_Far-red-induction_P Parameter: Tissue Value: Whole Plant
  misc_feature: MA Experiment ID: 20001557 Result: Down-regulated in Transcription
  misc_feature: MA Experiment 20001557 PARAMETER Experiment Name: At_Drought_Soil_Dry_P Parameter: Age (day) Value: 27
  misc_feature: MA Experiment 20001557 PARAMETER Experiment Name: At_Drought_Soil_Dry_P Parameter: Organism Value: A. thaliana
  misc_feature: MA Experiment 20001557 PARAMETER Experiment Name: At_Drought_Soil_Dry_P Parameter: Plant Line Value: WS
  misc_feature: MA Experiment 20001557 PARAMETER Experiment Name: At_Drought_Soil_Dry_P Parameter: Post Timepoint (hr) Value: 3
  misc_feature: MA Experiment 20001557 PARAMETER Experiment Name: At_Drought_Soil_Dry_P Parameter: Post-Treatment Value: Re-Water vs. No Drought
  misc_feature: MA Experiment 20001557 PARAMETER Experiment Name: At_Drought_Soil_Dry_P Parameter: Timepoint (day) Value: 13
  misc_feature: MA Experiment 20001557 PARAMETER Experiment Name: At_Drought_Soil_Dry_P Parameter: Treatment Value: Drought vs. No Drought
  misc_feature: MA Experiment ID: 20001558 Result: Down-regulated in Transcription
  misc_feature: MA Experiment 20001558 PARAMETER Experiment Name: At_Drought_Soil_Dry_P Parameter: Age (day) Value: 27
  misc_feature: MA Experiment 20001558 PARAMETER Experiment Name: At_Drought_Soil_Dry_P Parameter: Organism Value: A. thaliana
  misc_feature: MA Experiment 20001558 PARAMETER Experiment Name: At_Drought_Soil_Dry_P Parameter: Plant Line Value: WS
  misc_feature: MA Experiment 20001558 PARAMETER Experiment Name: At_Drought_Soil_Dry_P Parameter: Post Timepoint (hr) Value: 6
  misc_feature: MA Experiment 20001558 PARAMETER Experiment Name: At_Drought_Soil_Dry_P Parameter: Post-Treatment Value: Re-Water vs. No Drought
  misc_feature: MA Experiment 20001558 PARAMETER Experiment Name: At_Drought_Soil_Dry_P Parameter: Timepoint (day) Value: 13
  misc_feature: MA Experiment 20001558 PARAMETER Experiment Name: At_Drought_Soil_Dry_P Parameter: Treatment Value: Drought vs. No Drought
  misc_feature: MA Experiment ID: 20001560 Result: Down-regulated in Transcription
  misc_feature: MA Experiment 20001560 PARAMETER Experiment Name: At_Drought_Soil_Dry_P Parameter: Age (day) Value: 28
  misc_feature: MA Experiment 20001560 PARAMETER Experiment Name: At_Drought_Soil_Dry_P Parameter: Organism Value: A. thaliana
  misc_feature: MA Experiment 20001560 PARAMETER Experiment Name: At_Drought_Soil_Dry_P Parameter: Plant Line Value: WS
  misc_feature: MA Experiment 20001560 PARAMETER Experiment Name: At_Drought_Soil_Dry_P Parameter: Post Timepoint (hr) Value: None
  misc_feature: MA Experiment 20001560 PARAMETER Experiment Name: At_Drought_Soil_Dry_P Parameter: Post-Treatment Value: None
  misc_feature: MA Experiment 20001560 PARAMETER Experiment Name: At_Drought_Soil_Dry_P Parameter: Timepoint (day) Value: 14
  misc_feature: MA Experiment 20001560 PARAMETER Experiment Name: At_Drought_Soil_Dry_P Parameter: Treatment Value: Drought vs. No Drought

SEQ ID NO: 32808 - protein, 309 aa, Arabidopsis thaliana; identical to SEQ ID NO: 29218
  peptide (1)..(309): Ceres Seq. ID no. 12339402
  misc_feature (234)..(306): Pfam Name: 2OG-Fe(II) oxygenase superfamily Pfam Description: 2OG-Fe(II) oxygenase superfamily
  misc_feature (29)..(306): Homolog of NCBI NO: 13878119 NR Description: putative oxidoreductase [Arabidopsis thaliana]
  misc_feature (29)..(306): Homolog of NCBI NO: 15221545 NR Description: oxidoreductase, putative
  misc_feature (25)..(306): Homolog of NCBI NO: 30679748 NR Description: 2-oxoglutarate-dependent dioxygenase, putative
  misc_feature (27)..(306): Homolog of NCBI NO: 15219718 NR Description: putative 1-aminocyclopropane-1-carboxylate oxidase
  misc_feature (23)..(306): Homolog of NCBI NO: 15219715 NR Description: putative 1-aminocyclopropane-1-carboxylate oxidase
  misc_feature (19)..(306): Homolog of NCBI NO: 15238459 NR Description: 1-aminocyclopropane-1-carboxylate oxidase - like
  misc_feature (20)..(306): Homolog of NCBI NO: 15238458 NR Description: 1-aminocyclopropane-1-carboxylate oxidase - like
  misc_feature (20)..(306): Homolog of NCBI NO: 14596165 NR Description: 1-aminocyclopropane-1-carboxylate oxidase
  misc_feature (20)..(306): Homolog of NCBI NO: 15239870 NR Description: 1-aminocyclopropane-1-carboxylate oxidase
  misc_feature (20)..(306): Homolog of NCBI NO: 15239868 NR Description: 1-aminocyclopropane-1-carboxylate oxidase

SEQ ID NO: 32809 - protein, 290 aa, Arabidopsis thaliana; identical to SEQ ID NO: 29219
  peptide (1)..(290): Ceres Seq. ID no. 12339403
  misc_feature (215)..(287): Pfam Name: 2OG-Fe(II) oxygenase superfamily Pfam Description: 2OG-Fe(II) oxygenase superfamily
  misc_feature (10)..(287): Homolog of NCBI NO: 13878119 NR Description: putative oxidoreductase [Arabidopsis thaliana]
  misc_feature (10)..(287): Homolog of NCBI NO: 15221545 NR Description: oxidoreductase, putative
  misc_feature (6)..(287): Homolog of NCBI NO: 30679748 NR Description: 2-oxoglutarate-dependent dioxygenase, putative
  misc_feature (8)..(287): Homolog of NCBI NO: 15219718 NR Description: putative 1-aminocyclopropane-1-carboxylate oxidase
  misc_feature (4)..(287): Homolog of NCBI NO: 15219715 NR Description: putative 1-aminocyclopropane-1-carboxylate oxidase
  misc_feature (1)..(287): Homolog of NCBI NO: 15238459 NR Description: 1-aminocyclopropane-1-carboxylate oxidase - like
  misc_feature (1)..(287): Homolog of NCBI NO: 15238458 NR Description: 1-aminocyclopropane-1-carboxylate oxidase - like
  misc_feature (1)..(287): Homolog of NCBI NO: 14596165 NR Description: 1-aminocyclopropane-1-carboxylate oxidase
  misc_feature (1)..(287): Homolog of NCBI NO: 15239870 NR Description: 1-aminocyclopropane-1-carboxylate oxidase
  misc_feature (1)..(287): Homolog of NCBI NO: 15239868 NR Description: 1-aminocyclopropane-1-carboxylate oxidase

SEQ ID NO: 32810 - DNA, 1422 bp, Arabidopsis thaliana; identical to SEQ ID NO: 29220
  misc_feature (1)..(1422): Ceres Seq. ID no. 12324257
  misc_feature: MA Experiment ID: 108435 Result: Down-regulated in Transcription
  misc_feature: MA Experiment 108435 PARAMETER Experiment Name: At_stm_Mutants_cDNA_P Parameter: Plant Line Value: wt Landsburg vs stm
  misc_feature: MA Experiment 108435 PARAMETER Experiment Name: At_stm_Mutants_cDNA_P Parameter: Tissue Value: Shoot Apical Meristem Region
  misc_feature: MA Experiment ID: 108595 Result: Down-regulated in Transcription
  misc_feature: MA Experiment 108595 PARAMETER Experiment Name: At_Ler-pi_Ovule_cDNA_P Parameter: Plant Line Value: null
  misc_feature: MA Experiment ID: 20000185 Result: Down-regulated in Transcription
  misc_feature: MA Experiment 20000185 PARAMETER Experiment Name: At_Roots__P Parameter: Age (day) Value: 7 vs. 21
  misc_feature: MA Experiment 20000185 PARAMETER Experiment Name: At_Roots__P Parameter: Organism Value: A. thaliana
  misc_feature: MA Experiment 20000185 PARAMETER Experiment Name: At_Roots__P Parameter: Tissue Value: Roots vs. Whole Plant
  misc_feature: MA Experiment ID: 20000286 Result: Down-regulated in Transcription
  misc_feature: MA Experiment 20000286 PARAMETER Experiment Name: At_Open_Flower_P Parameter: Age (day) Value: 21
  misc_feature: MA Experiment 20000286 PARAMETER Experiment Name: At_Open_Flower_P Parameter: Plant Line Value: WS
  misc_feature: MA Experiment 20000286 PARAMETER Experiment Name: At_Open_Flower_P Parameter: Tissue Value: Half Open vs. Whole Plant
  misc_feature: MA Experiment ID: 20000439 Result: Down-regulated in Transcription
  misc_feature: MA Experiment 20000439 PARAMETER Experiment Name: At_Roots__P Parameter: Age (day) Value: 14 vs. 21
  misc_feature: MA Experiment 20000439 PARAMETER Experiment Name: At_Roots__P Parameter: Organism Value: A. thaliana
  misc_feature: MA Experiment 20000439 PARAMETER Experiment Name: At_Roots__P Parameter: Tissue Value: Roots vs. Whole Plant

SEQ ID NO: 32811 - protein, 350 aa, Arabidopsis thaliana; identical to SEQ ID NO: 29221
  peptide (1)..(350): Ceres Seq. ID no. 12324258
  misc_feature (77)..(350): Homolog of NCBI NO: 15221116 NR Description: glyoxalase I, putative (lactoylglutathione lyase)
  misc_feature (72)..(350): Homolog of NCBI NO: 1808684 NR Description: hypothetical protein [Sporobolus stapfianus]
  misc_feature (66)..(350): Homolog of NCBI NO: 16580747 NR Description: glyoxalase I [Oryza sativa (japonica
  misc_feature (66)..(350): Homolog of NCBI NO: 4126809 NR Description: glyoxalase I [Oryza sativa (japonica
  misc_feature (68)..(350): Homolog of NCBI NO: 2213425 NR Description: hypothetical protein [Citrus x paradisi]
  misc_feature (68)..(350): Homolog of NCBI NO: 11281993 NR Description: lactoylglutathione lyase (EC 4.4.1.5)
  misc_feature (68)..(350): Homolog of NCBI NO: 7619802 NR Description: putative glyoxalase I [Triticum aestivum]
  misc_feature (1)..(350): Homolog of NCBI NO: 25350143 NR Description: protein F1N21.10 [imported] - Arabidopsis
  misc_feature (1)..(350): Homolog of NCBI NO: 21537360 NR Description: glyoxalase I, putative [Arabidopsis thaliana]
  misc_feature (1)..(350): Homolog of NCBI NO: 15220397 NR Description: glyoxalase I, putative (lactoylglutathione lyase)

SEQ ID NO: 32812 - protein, 344 aa, Arabidopsis thaliana; identical to SEQ ID NO: 29222
  peptide (1)..(344): Ceres Seq. ID no. 12324259
  misc_feature (71)..(344): Homolog of NCBI NO: 15221116 NR Description: glyoxalase I, putative (lactoylglutathione lyase)
  misc_feature (66)..(344): Homolog of NCBI NO: 1808684 NR Description: hypothetical protein [Sporobolus stapfianus]
  misc_feature (60)..(344): Homolog of NCBI NO: 16580747 NR Description: glyoxalase I [Oryza sativa (japonica
  misc_feature (60)..(344): Homolog of NCBI NO: 4126809 NR Description: glyoxalase I [Oryza sativa (japonica
  misc_feature (62)..(344): Homolog of NCBI NO: 2213425 NR Description: hypothetical protein [Citrus x paradisi]
  misc_feature (62)..(344): Homolog of NCBI NO: 11281993 NR Description: lactoylglutathione lyase (EC 4.4.1.5)
  misc_feature (62)..(344): Homolog of NCBI NO: 7619802 NR Description: putative glyoxalase I [Triticum aestivum]
  misc_feature (1)..(344): Homolog of NCBI NO: 25350143 NR Description: protein F1N21.10 [imported] - Arabidopsis
  misc_feature (1)..(344): Homolog of NCBI NO: 21537360 NR Description: glyoxalase I, putative [Arabidopsis thaliana]
  misc_feature (1)..(344): Homolog of NCBI NO: 15220397 NR Description: glyoxalase I, putative (lactoylglutathione lyase)

SEQ ID NO: 32813 - protein, 262 aa, Arabidopsis thaliana; identical to SEQ ID NO: 29223
  peptide (1)..(262): Ceres Seq. ID no. 12324260
  misc_feature (1)..(262): Homolog of NCBI NO: 15221116 NR Description: glyoxalase I, putative (lactoylglutathione lyase)
  misc_feature (1)..(262): Homolog of NCBI NO: 1808684 NR Description: hypothetical protein [Sporobolus stapfianus]
  misc_feature (1)..(262): Homolog of NCBI NO: 16580747 NR Description: glyoxalase I [Oryza sativa (japonica
  misc_feature (1)..(262): Homolog of NCBI NO: 4126809 NR Description: glyoxalase I [Oryza sativa (japonica
  misc_feature (1)..(262): Homolog of NCBI NO: 2213425 NR Description: hypothetical protein [Citrus x paradisi]
  misc_feature (1)..(262): Homolog of NCBI NO: 11281993 NR Description: lactoylglutathione lyase (EC 4.4.1.5)
  misc_feature (1)..(262): Homolog of NCBI NO: 7619802 NR Description: putative glyoxalase I [Triticum aestivum]
  misc_feature (1)..(262): Homolog of NCBI NO: 25350143 NR Description: protein F1N21.10 [imported] - Arabidopsis
  misc_feature (1)..(262): Homolog of NCBI NO: 21537360 NR Description: glyoxalase I, putative [Arabidopsis thaliana]
  misc_feature (1)..(262): Homolog of NCBI NO: 15220397 NR Description: glyoxalase I, putative (lactoylglutathione lyase)

SEQ ID NO: 32814 - DNA, 2118 bp, Arabidopsis thaliana; identical to SEQ ID NO: 29224
  misc_feature (1)..(2118): Ceres Seq. ID no. 13488391
  misc_feature: MA Experiment ID: 108434 Result: Up-regulated in Transcription
  misc_feature: MA Experiment 108434 PARAMETER Experiment Name: At_Root_Tips_cDNA_P Parameter: Tissue Value: Root Tips
  misc_feature: MA Experiment ID: 108488 Result: Up-regulated in Transcription
  misc_feature: MA Experiment ID: 108595 Result: Down-regulated in Transcription
  misc_feature: MA Experiment 108595 PARAMETER Experiment Name: At_Ler-pi_Ovule_cDNA_P Parameter: Plant Line Value: null
  misc_feature: MA Experiment ID: 20000113 Result: Down-regulated in Transcription
  misc_feature: MA Experiment 20000113 PARAMETER Experiment Name: At_42deg_Heat_cDNA_P Parameter: Temperature (deg C) Value: 42 vs. 22
  misc_feature: MA Experiment 20000113 PARAMETER Experiment Name: At_42deg_Heat_cDNA_P Parameter: Timepoint (hr) Value: 8
  misc_feature: MA Experiment 20000113 PARAMETER Experiment Name: At_42deg_Heat_cDNA_P Parameter: Tissue Value: Aerial
  misc_feature: MA Experiment ID: 20000179 Result: Up-regulated in Transcription
  misc_feature: MA Experiment 20000179 PARAMETER Experiment Name: At_Germinating_Seeds_P Parameter: Age (hr) Value: 6 vs. 0
  misc_feature: MA Experiment 20000179 PARAMETER Experiment Name: At_Germinating_Seeds_P Parameter: Tissue Value: Germinating Seeds
  misc_feature: MA Experiment ID: 20000214 Result: Down-regulated in Transcription
  misc_feature: MA Experiment 20000214 PARAMETER Experiment Name: At_4deg_Cold_P Parameter: Timepoint (hr) Value: 6
  misc_feature: MA Experiment ID: 20000224 Result: Down-regulated in Transcription
  misc_feature: MA Experiment ID: 20000234 Result: Down-regulated in Transcription
  misc_feature: MA Experiment 20000234 PARAMETER Experiment Name: At_Siliques_P Parameter: Age (day) Value: 21
  misc_feature: MA Experiment 20000234 PARAMETER Experiment Name: At_Siliques_P Parameter: Organism Value: A. thaliana
  misc_feature: MA Experiment 20000234 PARAMETER Experiment Name: At_Siliques_P Parameter: Plant Line Value: WS
  misc_feature: MA Experiment 20000234 PARAMETER Experiment Name: At_Siliques_P Parameter: Tissue Value: Less Than 5mm Siliques vs. Whole Plant
  misc_feature: MA Experiment ID: 20000264 Result: Down-regulated in Transcription
  misc_feature: MA Experiment 20000264 PARAMETER Experiment Name: At_Open_Flower_P Parameter: Age (day) Value: 21
  misc_feature: MA Experiment 20000264 PARAMETER Experiment Name: At_Open_Flower_P Parameter: Plant Line Value: WS
  misc_feature: MA Experiment 20000264 PARAMETER Experiment Name: At_Open_Flower_P Parameter: Tissue Value: Open Flower vs. Whole Plant
  misc_feature: MA Experiment ID: 20000265 Result: Down-regulated in Transcription
  misc_feature: MA Experiment 20000265 PARAMETER Experiment Name: At_Open_Flower_P Parameter: Age (day) Value: 21
  misc_feature: MA Experiment 20000265 PARAMETER Experiment Name: At_Open_Flower_P Parameter: Plant Line Value: WS
  misc_feature: MA Experiment 20000265 PARAMETER Experiment Name: At_Open_Flower_P Parameter: Tissue Value: Closed Flower vs. Whole Plant
  misc_feature: MA Experiment ID: 20000286 Result: Down-regulated in Transcription
  misc_feature: MA Experiment 20000286 PARAMETER Experiment Name: At_Open_Flower_P Parameter: Age (day) Value: 21
  misc_feature: MA Experiment 20000286 PARAMETER Experiment Name: At_Open_Flower_P Parameter: Plant Line Value: WS
  misc_feature: MA Experiment 20000286 PARAMETER Experiment Name: At_Open_Flower_P Parameter: Tissue Value: Half Open vs. Whole Plant
  misc_feature: MA Experiment ID: 20000794 Result: Down-regulated in Transcription
  misc_feature: MA Experiment 20000794 PARAMETER Experiment Name: At_Petals_P Parameter: Age (day) Value: 23-25 days
  misc_feature: MA Experiment 20000794 PARAMETER Experiment Name: At_Petals_P Parameter: Plant Line Value: WS
  misc_feature: MA Experiment 20000794 PARAMETER Experiment Name: At_Petals_P Parameter: Tissue Value: Petals vs. Whole plant
  misc_feature: MA Experiment ID: 20001248 Result: Up-regulated in Transcription
  misc_feature: MA Experiment 20001248 PARAMETER Experiment Name: At_Far-red-induction_P Parameter: Age (day) Value: 7
  misc_feature: MA Experiment 20001248 PARAMETER Experiment Name: At_Far-red-induction_P Parameter: Light Value: Far-red vs. White
  misc_feature: MA Experiment 20001248 PARAMETER Experiment Name: At_Far-red-induction_P Parameter: Organism Value: A. thaliana
  misc_feature: MA Experiment 20001248 PARAMETER Experiment Name: At_Far-red-induction_P Parameter: Plant Line Value: Columbia
  misc_feature: MA Experiment 20001248 PARAMETER Experiment Name: At_Far-red-induction_P Parameter: Timepoint (hr) Value: 4
  misc_feature: MA Experiment 20001248 PARAMETER Experiment Name: At_Far-red-induction_P Parameter: Tissue Value: Whole Plant
  misc_feature: MA Experiment ID: 20001450 Result: Up-regulated in Transcription
  misc_feature: MA Experiment 20001450 PARAMETER Experiment Name: At_Far-red-induction_P Parameter: Age (day) Value: 7
  misc_feature: MA Experiment 20001450 PARAMETER Experiment Name: At_Far-red-induction_P Parameter: Light Value: Far-red vs. White
  misc_feature: MA Experiment 20001450 PARAMETER Experiment Name: At_Far-red-induction_P Parameter: Organism Value: A. thaliana
  misc_feature: MA Experiment 20001450 PARAMETER Experiment Name: At_Far-red-induction_P Parameter: Plant Line Value: Columbia
  misc_feature: MA Experiment 20001450 PARAMETER Experiment Name: At_Far-red-induction_P Parameter: Timepoint (hr) Value: 8
  misc_feature: MA Experiment 20001450 PARAMETER Experiment Name: At_Far-red-induction_P Parameter: Tissue Value: Whole Plant

SEQ ID NO: 32815 - protein, 596 aa, Arabidopsis thaliana; identical to SEQ ID NO: 29225
  peptide (1)..(596): Ceres Seq. ID no. 13488392
  misc_feature (486)..(596): Pfam Name: Pyruvate kinase, alpha/beta domain Pfam Description: Pyruvate kinase, alpha/beta domain
  misc_feature (115)..(590): Homolog of NCBI NO: 37537030 NR Description: putative pyruvate kinase [Oryza sativa (japonica
  misc_feature (60)..(585): Homolog of NCBI NO: 29788835 NR Description: putative pyruvate kinase [Oryza sativa (japonica
  misc_feature (273)..(596): Homolog of NCBI NO: 21954080 NR Description: putative pyruvate kinase [Arabidopsis thaliana]
  misc_feature (143)..(596): Homolog of NCBI NO: 34393488 NR Description: putative Pyruvate kinase isozyme A, chloroplast
  misc_feature (140)..(596): Homolog of NCBI NO: 7434450 NR Description: pyruvate kinase (EC 2.7.1.40) isoform beta -
  misc_feature (1)..(596): Homolog of NCBI NO: 2129963 NR Description: pyruvate kinase (EC 2.7.1.40) A, chloroplast -
  misc_feature (1)..(596): Homolog of NCBI NO: 2497541 NR Description: Pyruvate kinase isozyme A, chloroplast precursor
  misc_feature (1)..(596): Homolog of NCBI NO: 2497539 NR Description: Pyruvate kinase isozyme A, chloroplast precursor
  misc_feature (1)..(596): Homolog of NCBI NO: 21537361 NR Description: pyruvate kinase, putative [Arabidopsis thaliana]
  misc_feature (1)..(596): Homolog of NCBI NO: 18403597 NR Description: pyruvate kinase, putative [Arabidopsis thaliana]

SEQ ID NO: 32816 - protein, 454 aa, Arabidopsis thaliana; identical to SEQ ID NO: 29226
  peptide (1)..(454): Ceres Seq. ID no. 13488393
  misc_feature (344)..(454): Pfam Name: Pyruvate kinase, alpha/beta domain Pfam Description: Pyruvate kinase, alpha/beta domain
  misc_feature (1)..(448): Homolog of NCBI NO: 37537030 NR Description: putative pyruvate kinase [Oryza sativa (japonica
  misc_feature (1)..(443): Homolog of NCBI NO: 29788835 NR Description: putative pyruvate kinase [Oryza sativa (japonica
  misc_feature (131)..(454): Homolog of NCBI NO: 21954080 NR Description: putative pyruvate kinase [Arabidopsis thaliana]
  misc_feature (1)..(454): Homolog of NCBI NO: 34393488 NR Description: putative Pyruvate kinase isozyme A, chloroplast
  misc_feature (1)..(454): Homolog of NCBI NO: 7434450 NR Description: pyruvate kinase (EC 2.7.1.40) isoform beta -
  misc_feature (1)..(454): Homolog of NCBI NO: 2129963 NR Description: pyruvate kinase (EC 2.7.1.40) A, chloroplast -
  misc_feature (1)..(454): Homolog of NCBI NO: 2497541 NR Description: Pyruvate kinase isozyme A, chloroplast precursor
  misc_feature (1)..(454): Homolog of NCBI NO: 2497539 NR Description: Pyruvate kinase isozyme A, chloroplast precursor
  misc_feature (1)..(454): Homolog of NCBI NO: 21537361 NR Description: pyruvate kinase, putative [Arabidopsis thaliana]
  misc_feature (1)..(454): Homolog of NCBI NO: 18403597 NR Description: pyruvate kinase, putative [Arabidopsis thaliana]

SEQ ID NO: 32817 - protein, 447 aa, Arabidopsis thaliana; identical to SEQ ID NO: 29227
  peptide (1)..(447): Ceres Seq. ID no. 13488394
  misc_feature (337)..(447): Pfam Name: Pyruvate kinase, alpha/beta domain Pfam Description: Pyruvate kinase, alpha/beta domain
  misc_feature (1)..(441): Homolog of NCBI NO: 37537030 NR Description: putative pyruvate kinase [Oryza sativa (japonica
  misc_feature (1)..(436): Homolog of NCBI NO: 29788835 NR Description: putative pyruvate kinase [Oryza sativa (japonica
  misc_feature (124)..(447): Homolog of NCBI NO: 21954080 NR Description: putative pyruvate kinase [Arabidopsis thaliana]
  misc_feature (1)..(447): Homolog of NCBI NO: 34393488 NR Description: putative Pyruvate kinase isozyme A, chloroplast
  misc_feature (1)..(447): Homolog of NCBI NO: 7434450 NR Description: pyruvate kinase (EC 2.7.1.40) isoform beta -
  misc_feature (1)..(447): Homolog of NCBI NO: 2129963 NR Description: pyruvate kinase (EC 2.7.1.40) A, chloroplast -
  misc_feature (1)..(447): Homolog of NCBI NO: 2497541 NR Description: Pyruvate kinase isozyme A, chloroplast precursor
  misc_feature (1)..(447): Homolog of NCBI NO: 2497539 NR Description: Pyruvate kinase isozyme A, chloroplast precursor
  misc_feature (1)..(447): Homolog of NCBI NO: 21537361 NR Description: pyruvate kinase, putative [Arabidopsis thaliana]
  misc_feature (1)..(447): Homolog of NCBI NO: 18403597 NR Description: pyruvate kinase, putative [Arabidopsis thaliana]

SEQ ID NO: 32818 - DNA, 1406 bp, Arabidopsis thaliana; identical to SEQ ID NO: 29228
  misc_feature (1)..(1406): Ceres Seq. ID no. 13490460
  misc_feature: MA Experiment ID: 108577 Result: Down-regulated in Transcription
  misc_feature: MA Experiment 108577 PARAMETER Experiment Name: At_42deg_Heat_cDNA_P Parameter: Temperature (deg C) Value: 42 vs. 22
  misc_feature: MA Experiment 108577 PARAMETER Experiment Name: At_42deg_Heat_cDNA_P Parameter: Timepoint (hr) Value: 6
  misc_feature: MA Experiment 108577 PARAMETER Experiment Name: At_42deg_Heat_cDNA_P Parameter: Tissue Value: Aerial
  misc_feature: MA Experiment ID: 108595 Result: Down-regulated in Transcription
  misc_feature: MA Experiment 108595 PARAMETER Experiment Name: At_Ler-pi_Ovule_cDNA_P Parameter: Plant Line Value: null
  misc_feature: MA Experiment ID: 20000224 Result: Down-regulated in Transcription
  misc_feature: MA Experiment ID: 20000794 Result: Down-regulated in Transcription
  misc_feature: MA Experiment 20000794 PARAMETER Experiment Name: At_Petals_P Parameter: Age (day) Value: 23-25 days
  misc_feature: MA Experiment 20000794 PARAMETER Experiment Name: At_Petals_P Parameter: Plant Line Value: WS
  misc_feature: MA Experiment 20000794 PARAMETER Experiment Name: At_Petals_P Parameter: Tissue Value: Petals vs. Whole plant

SEQ ID NO: 32819 - protein, 294 aa, Arabidopsis thaliana [sequence omitted]

SEQ ID NO: 32820 - protein, 237 aa, Arabidopsis thaliana; identical to SEQ ID NO: 29230
  peptide (1)..(237): Ceres Seq. ID no. 13490462
  misc_feature (1)..(230): Pfam Name: Protein kinase domain Pfam Description: Protein kinase domain
  misc_feature (1)..(237): Homolog of NCBI NO: 25989351 NR Description: cyclin-dependent kinase [Helianthus tuberosus]
  misc_feature (1)..(237): Homolog of NCBI NO: 3123614 NR Description: cyclin-dependent protein kinase p34cdc2
  misc_feature (1)..(237): Homolog of NCBI NO: 24636265 NR Description: Cell division control protein 2 homolog (p34cdc2)
  misc_feature (1)..(237): Homolog of NCBI NO: 17224978 NR Description: cyclin dependent kinase [Helianthus annuus]
  misc_feature (1)..(237): Homolog of NCBI NO: 9885803 NR Description: cyclin-dependent kinase A:4 [Nicotiana tabacum]
  misc_feature (1)..(237): Homolog of NCBI NO: 13249052 NR Description: CDC2 homolog [Populus tremula x Populus
  misc_feature (1)..(228): Homolog of NCBI NO: 19699294 NR Description: AT3g48750/T21J18_20 [Arabidopsis thaliana]
  misc_feature (1)..(237): Homolog of NCBI NO: 1236190 NR Description: cyclin dependent protein kinase homolog
  misc_feature (1)..(237): Homolog of NCBI NO: 11259538 NR Description: CELL DIVISION CONTROL PROTEIN 2 HOMOLOG A -
  misc_feature (1)..(237): Homolog of NCBI NO: 18408696 NR Description: cell division control protein 2 homolog A (CDC2A)

SEQ ID NO: 32821 - protein, 204 aa, Arabidopsis thaliana; identical to SEQ ID NO: 29231
  peptide (1)..(204): Ceres Seq. ID no. 13490463
  misc_feature (1)..(197): Pfam Name: Protein kinase domain Pfam Description: Protein kinase domain
  misc_feature (1)..(204): Homolog of NCBI NO: 25989351 NR Description: cyclin-dependent kinase [Helianthus tuberosus]
  misc_feature (1)..(204): Homolog of NCBI NO: 3123614 NR Description: cyclin-dependent protein kinase p34cdc2
  misc_feature (1)..(204): Homolog of NCBI NO: 24636265 NR Description: Cell division control protein 2 homolog (p34cdc2)
  misc_feature (1)..(204): Homolog of NCBI NO: 17224978 NR Description: cyclin dependent kinase [Helianthus annuus]
  misc_feature (1)..(204): Homolog of NCBI NO: 9885803 NR Description: cyclin-dependent kinase A:4 [Nicotiana tabacum]
  misc_feature (1)..(204): Homolog of NCBI NO: 13249052 NR Description: CDC2 homolog [Populus tremula x Populus
  misc_feature (1)..(195): Homolog of NCBI NO: 19699294 NR Description: AT3g48750/T21J18_20 [Arabidopsis thaliana]
  misc_feature (1)..(204): Homolog of NCBI NO: 1236190 NR Description: cyclin dependent protein kinase homolog
  misc_feature (1)..(204): Homolog of NCBI NO: 11259538 NR Description: CELL DIVISION CONTROL PROTEIN 2 HOMOLOG A -
  misc_feature (1)..(204): Homolog of NCBI NO: 18408696 NR Description: cell division control protein 2 homolog A (CDC2A)

SEQ ID NO: 32822 - DNA, 1444 bp, Arabidopsis thaliana; identical to SEQ ID NO: 29232
  misc_feature (1)..(1444): Ceres Seq. ID no. 13486778
  misc_feature: MA Experiment ID: 108561 Result: Up-regulated in Transcription
  misc_feature: MA Experiment 108561 PARAMETER Experiment Name: At_100uM_ABA_cDNA_P Parameter: Timepoint (hr) Value: 6
  misc_feature: MA Experiment 108561 PARAMETER Experiment Name: At_100uM_ABA_cDNA_P Parameter: Tissue Value: Aerial
  misc_feature: MA Experiment 108561 PARAMETER Experiment Name: At_100uM_ABA_cDNA_P Parameter: Treatment Value: 100uM ABA vs. No Treatment
  misc_feature: MA Experiment ID: 108572 Result: Up-regulated in Transcription
  misc_feature: MA Experiment 108572 PARAMETER Experiment Name: At_Drought_cDNA_P Parameter: Timepoint (hr) Value: 1
  misc_feature: MA Experiment 108572 PARAMETER Experiment Name: At_Drought_cDNA_P Parameter: Tissue Value: Aerial
  misc_feature: MA Experiment 108572 PARAMETER Experiment Name: At_Drought_cDNA_P Parameter: Treatment Value: Drought vs. No Drought
  misc_feature: MA Experiment ID: 108573 Result: Up-regulated in Transcription
  misc_feature: MA Experiment 108573 PARAMETER Experiment Name: At_Drought_cDNA_P Parameter: Timepoint (hr) Value: 6
  misc_feature: MA Experiment 108573 PARAMETER Experiment Name: At_Drought_cDNA_P Parameter: Tissue Value: Aerial
  misc_feature: MA Experiment 108573 PARAMETER Experiment Name: At_Drought_cDNA_P Parameter: Treatment Value: Drought vs. No Drought
  misc_feature: MA Experiment ID: 108585 Result: Up-regulated in Transcription
  misc_feature: MA Experiment 108585 PARAMETER Experiment Name: At_5mM_NaNP_cDNA_P Parameter: Timepoint (hr) Value: 6
  misc_feature: MA Experiment 108585 PARAMETER Experiment Name: At_5mM_NaNP_cDNA_P Parameter: Tissue Value: Aerial
  misc_feature: MA Experiment 108585 PARAMETER Experiment Name: At_5mM_NaNP_cDNA_P Parameter: Treatment Value: null
  misc_feature: MA Experiment ID: 108605 Result: Up-regulated in Transcription
  misc_feature: MA Experiment 108605 PARAMETER Experiment Name: At_100uM_ABA_cDNA_P Parameter: Timepoint (hr) Value: 6
  misc_feature: MA Experiment 108605 PARAMETER Experiment Name: At_100uM_ABA_cDNA_P Parameter: Tissue Value: Aerial
  misc_feature: MA Experiment 108605 PARAMETER Experiment Name: At_100uM_ABA_cDNA_P Parameter: Treatment Value: 100uM ABA vs. No Treatment
  misc_feature: MA Experiment ID: 108607 Result: Up-regulated in Transcription
  misc_feature: MA Experiment 108607 PARAMETER Experiment Name: At_100uM_ABA_cDNA_P Parameter: Timepoint (hr) Value: 4
  misc_feature: MA Experiment 108607 PARAMETER Experiment Name: At_100uM_ABA_cDNA_P Parameter: Tissue Value: Aerial
  misc_feature: MA Experiment 108607 PARAMETER Experiment Name: At_100uM_ABA_cDNA_P Parameter: Treatment Value: 100uM ABA vs. No Treatment
  misc_feature: MA Experiment ID: 20000069 Result: Up-regulated in Transcription
  misc_feature: MA Experiment 20000069 PARAMETER Experiment Name: At_100uM_ABA_Mutants_cDNA_P Parameter: Plant Line Value: CS23
  misc_feature: MA Experiment 20000069 PARAMETER Experiment Name: At_100uM_ABA_Mutants_cDNA_P Parameter: Timepoint (hr) Value: 6
  misc_feature: MA Experiment 20000069 PARAMETER Experiment Name: At_100uM_ABA_Mutants_cDNA_P Parameter: Tissue Value: Aerial
  misc_feature: MA Experiment 20000069 PARAMETER Experiment Name: At_100uM_ABA_Mutants_cDNA_P Parameter: Treatment Value: 100uM ABA vs. No Treatment
  misc_feature: MA Experiment ID: 20000070 Result: Up-regulated in Transcription
  misc_feature: MA Experiment 20000070 PARAMETER Experiment Name: At_100uM_ABA_Mutants_cDNA_P Parameter: Plant Line Value: CS24
  misc_feature: MA Experiment 20000070 PARAMETER Experiment Name: At_100uM_ABA_Mutants_cDNA_P Parameter: Timepoint (hr) Value: 6
  misc_feature: MA Experiment 20000070 PARAMETER Experiment Name: At_100uM_ABA_Mutants_cDNA_P Parameter: Tissue Value: Aerial
  misc_feature: MA Experiment 20000070 PARAMETER Experiment Name: At_100uM_ABA_Mutants_cDNA_P Parameter: Treatment Value: 100uM ABA vs. No Treatment
  misc_feature: MA Experiment ID: 20000071 Result: Up-regulated in Transcription
  misc_feature: MA Experiment 20000071 PARAMETER Experiment Name: At_100uM_ABA_Mutants_cDNA_P Parameter: Plant Line Value: CS8104
  misc_feature: MA Experiment 20000071 PARAMETER Experiment Name: At_100uM_ABA_Mutants_cDNA_P Parameter: Timepoint (hr) Value: 6
  misc_feature: MA Experiment 20000071 PARAMETER Experiment Name: At_100uM_ABA_Mutants_cDNA_P Parameter: Tissue Value: Aerial
  misc_feature: MA Experiment 20000071 PARAMETER Experiment Name: At_100uM_ABA_Mutants_cDNA_P Parameter: Treatment Value: 100uM ABA vs. No Treatment
  misc_feature: MA Experiment ID: 20000072 Result: Up-regulated in Transcription
  misc_feature: MA Experiment 20000072 PARAMETER Experiment Name: At_100uM_ABA_Mutants_cDNA_P Parameter: Plant Line Value: CS8105
  misc_feature: MA Experiment 20000072 PARAMETER Experiment Name: At_100uM_ABA_Mutants_cDNA_P Parameter: Timepoint (hr) Value: 6
  misc_feature: MA Experiment 20000072 PARAMETER Experiment Name: At_100uM_ABA_Mutants_cDNA_P Parameter: Tissue Value: Aerial
  misc_feature: MA Experiment 20000072 PARAMETER Experiment Name: At_100uM_ABA_Mutants_cDNA_P Parameter: Treatment Value: 100uM ABA vs. No Treatment
  misc_feature: MA Experiment ID: 20000086 Result: Up-regulated in Transcription
  misc_feature: MA Experiment 20000086 PARAMETER Experiment Name: At_100uM_ABA_Mutants_cDNA_P Parameter: Plant Line Value: CS22
  misc_feature: MA Experiment 20000086 PARAMETER Experiment Name: At_100uM_ABA_Mutants_cDNA_P Parameter: Timepoint (hr) Value: 6
  misc_feature: MA Experiment 20000086 PARAMETER Experiment Name: At_100uM_ABA_Mutants_cDNA_P Parameter: Tissue Value: Aerial
  misc_feature: MA Experiment 20000086 PARAMETER Experiment Name: At_100uM_ABA_Mutants_cDNA_P Parameter: Treatment Value: 100uM ABA vs. No Treatment
  misc_feature: MA Experiment ID: 20000087 Result: Up-regulated in Transcription
  misc_feature: MA Experiment 20000087 PARAMETER Experiment Name: At_100uM_ABA_Mutants_cDNA_P Parameter: Plant Line Value: WS
  misc_feature: MA Experiment 20000087 PARAMETER Experiment Name: At_100uM_ABA_Mutants_cDNA_P Parameter: Timepoint (hr) Value: 6
  misc_feature: MA Experiment 20000087 PARAMETER Experiment Name: At_100uM_ABA_Mutants_cDNA_P Parameter: Tissue Value: Aerial
  misc_feature: MA Experiment 20000087 PARAMETER Experiment Name: At_100uM_ABA_Mutants_cDNA_P Parameter: Treatment Value: 100uM ABA vs. No Treatment
  misc_feature: MA Experiment ID: 20000088 Result: Up-regulated in Transcription
  misc_feature: MA Experiment 20000088 PARAMETER Experiment Name: At_100uM_ABA_Mutants_cDNA_P Parameter: Plant Line Value: Landsberg
  misc_feature: MA Experiment 20000088 PARAMETER Experiment Name: At_100uM_ABA_Mutants_cDNA_P Parameter: Timepoint (hr) Value: 6
  misc_feature: MA Experiment 20000088 PARAMETER Experiment Name: At_100uM_ABA_Mutants_cDNA_P Parameter: Tissue Value: Aerial
  misc_feature: MA Experiment 20000088 PARAMETER Experiment Name: At_100uM_ABA_Mutants_cDNA_P Parameter: Treatment Value: 100uM ABA vs. No Treatment
  misc_feature: MA Experiment ID: 20000111 Result: Down-regulated in Transcription
  misc_feature: MA Experiment 20000111 PARAMETER Experiment Name: At_42deg_Heat_cDNA_P Parameter: Temperature (deg C) Value: 42 vs. 22
  misc_feature: MA Experiment 20000111 PARAMETER Experiment Name: At_42deg_Heat_cDNA_P Parameter: Timepoint (hr) Value: 6
  misc_feature: MA Experiment 20000111 PARAMETER Experiment Name: At_42deg_Heat_cDNA_P Parameter: Tissue Value: Aerial
  misc_feature: MA Experiment ID: 20000113 Result: Down-regulated in Transcription
  misc_feature: MA Experiment 20000113 PARAMETER Experiment Name: At_42deg_Heat_cDNA_P Parameter: Temperature (deg C) Value: 42 vs. 22
  misc_feature: MA Experiment 20000113 PARAMETER Experiment Name: At_42deg_Heat_cDNA_P Parameter: Timepoint (hr) Value: 8
  misc_feature: MA Experiment 20000113 PARAMETER Experiment Name: At_42deg_Heat_cDNA_P Parameter: Tissue Value: Aerial
  misc_feature: MA Experiment ID: 20000117 Result: Up-regulated in Transcription
  misc_feature: MA Experiment 20000117 PARAMETER Experiment Name: At_100uM_ABA_Mutants_cDNA_P Parameter: Plant Line Value: Columbia
  misc_feature: MA Experiment 20000117 PARAMETER Experiment Name: At_100uM_ABA_Mutants_cDNA_P Parameter: Timepoint (hr) Value: 6
  misc_feature: MA Experiment 20000117 PARAMETER Experiment Name: At_100uM_ABA_Mutants_cDNA_P Parameter: Tissue Value: Aerial
  misc_feature: MA Experiment 20000117 PARAMETER Experiment Name: At_100uM_ABA_Mutants_cDNA_P Parameter: Treatment Value: 100uM ABA vs. No Treatment
  misc_feature: MA Experiment ID: 20000224 Result: Up-regulated in Transcription
  misc_feature: MA Experiment ID: 20000437 Result: Up-regulated in Transcription
  misc_feature: MA Experiment 20000437 PARAMETER Experiment Name: At_Drought_P Parameter: Age (day) Value: 8
  misc_feature: MA Experiment 20000437 PARAMETER Experiment Name: At_Drought_P Parameter: Organism Value: A. thaliana
  misc_feature: MA Experiment 20000437 PARAMETER Experiment Name: At_Drought_P Parameter: Plant Line Value: WS
  misc_feature: MA Experiment 20000437 PARAMETER Experiment Name: At_Drought_P Parameter: Timepoint (hr) Value: 24
  misc_feature: MA Experiment 20000437 PARAMETER Experiment Name: At_Drought_P Parameter: Tissue Value: Whole Plant
  misc_feature: MA Experiment 20000437 PARAMETER Experiment Name: At_Drought_P Parameter: Treatment Value: Drought vs. No Drought
  misc_feature: MA Experiment ID: 20000438 Result: Down-regulated in Transcription
  misc_feature: MA Experiment 20000438 PARAMETER Experiment Name: At_Shoots__P Parameter: Age (day) Value: 14
  misc_feature: MA Experiment 20000438 PARAMETER Experiment Name: At_Shoots__P Parameter: Tissue Value: Shoots vs. Whole Plant
  misc_feature: MA Experiment ID: 20000453 Result: Up-regulated in Transcription
  misc_feature: MA Experiment 20000453 PARAMETER Experiment Name: At_100uM_ABA_P Parameter: Age (day) Value: 15
  misc_feature: MA Experiment 20000453 PARAMETER Experiment Name: At_100uM_ABA_P Parameter: Organism Value: A. thaliana
  misc_feature: MA Experiment 20000453 PARAMETER Experiment Name: At_100uM_ABA_P Parameter: Plant Line Value: WS
  misc_feature: MA Experiment 20000453 PARAMETER Experiment Name: At_100uM_ABA_P Parameter: Timepoint (hr) Value: 24
  misc_feature: MA Experiment 20000453 PARAMETER Experiment Name: At_100uM_ABA_P Parameter: Tissue Value: Aerial
  misc_feature: MA Experiment 20000453 PARAMETER Experiment Name: At_100uM_ABA_P Parameter: Treatment Value: 100uM ABA vs. No Treatment
  misc_feature: MA Experiment ID: 20000794 Result: Up-regulated in Transcription
  misc_feature: MA Experiment 20000794 PARAMETER Experiment Name: At_Petals_P Parameter: Age (day) Value: 23-25 days
  misc_feature: MA Experiment 20000794 PARAMETER Experiment Name: At_Petals_P Parameter: Plant Line Value: WS
  misc_feature: MA Experiment 20000794 PARAMETER Experiment Name: At_Petals_P Parameter: Tissue Value: Petals vs. Whole plant
  misc_feature: MA Experiment ID: 20001555 Result: Up-regulated in Transcription
  misc_feature: MA Experiment 20001555 PARAMETER Experiment Name: At_Drought_Soil_Dry_P Parameter: Age (day) Value: 24
  misc_feature: MA Experiment 20001555 PARAMETER Experiment Name: At_Drought_Soil_Dry_P Parameter: Organism Value: A. thaliana
  misc_feature: MA Experiment 20001555 PARAMETER Experiment Name: At_Drought_Soil_Dry_P Parameter: Plant Line Value: WS
  misc_feature: MA Experiment 20001555 PARAMETER Experiment Name: At_Drought_Soil_Dry_P Parameter: Post Timepoint (hr) Value: None
  misc_feature: MA Experiment 20001555 PARAMETER Experiment Name: At_Drought_Soil_Dry_P Parameter: Post-Treatment Value: None
  misc_feature: MA Experiment 20001555 PARAMETER Experiment Name: At_Drought_Soil_Dry_P Parameter: Timepoint (day) Value: 10
  misc_feature: MA Experiment 20001555 PARAMETER Experiment Name: At_Drought_Soil_Dry_P Parameter: Treatment Value: Drought vs. No Drought
  misc_feature: MA Experiment ID: 20001556 Result: Up-regulated in Transcription
  misc_feature: MA Experiment 20001556 PARAMETER Experiment Name: At_Drought_Soil_Dry_P Parameter: Age (day) Value: 26
  misc_feature: MA Experiment 20001556 PARAMETER Experiment Name: At_Drought_Soil_Dry_P Parameter: Organism Value: A. thaliana
  misc_feature: MA Experiment 20001556 PARAMETER Experiment Name: At_Drought_Soil_Dry_P Parameter: Plant Line Value: WS
  misc_feature: MA Experiment 20001556 PARAMETER Experiment Name: At_Drought_Soil_Dry_P Parameter: Post Timepoint (hr) Value: None
  misc_feature: MA Experiment 20001556 PARAMETER Experiment Name: At_Drought_Soil_Dry_P Parameter: Post-Treatment Value: None
  misc_feature: MA Experiment 20001556 PARAMETER Experiment Name: At_Drought_Soil_Dry_P Parameter: Timepoint (day) Value: 12
  misc_feature: MA Experiment 20001556 PARAMETER Experiment Name: At_Drought_Soil_Dry_P Parameter: Treatment Value: Drought vs. No Drought
  misc_feature: MA Experiment ID: 20001559 Result: Up-regulated in Transcription
  misc_feature: MA Experiment 20001559 PARAMETER Experiment Name: At_Drought_Soil_Dry_P Parameter: Age (day) Value: 28
  misc_feature: MA Experiment 20001559 PARAMETER Experiment Name: At_Drought_Soil_Dry_P Parameter: Organism Value: A. thaliana
  misc_feature: MA Experiment 20001559 PARAMETER Experiment Name: At_Drought_Soil_Dry_P Parameter: Plant Line Value: WS
  misc_feature: MA Experiment 20001559 PARAMETER Experiment Name: At_Drought_Soil_Dry_P Parameter: Post Timepoint (hr) Value: 29
  misc_feature: MA Experiment 20001559 PARAMETER Experiment Name: At_Drought_Soil_Dry_P Parameter: Post-Treatment Value: Re-Water vs. No Drought
  misc_feature: MA Experiment 20001559 PARAMETER Experiment Name: At_Drought_Soil_Dry_P Parameter: Timepoint (day) Value: 14
  misc_feature: MA Experiment 20001559 PARAMETER Experiment Name: At_Drought_Soil_Dry_P Parameter: Treatment Value: Drought vs. No Drought
  misc_feature: MA Experiment ID: 20001757 Result: Down-regulated in Transcription
  misc_feature: MA Experiment 20001757 PARAMETER Experiment Name: At_50mM_NH4NO3_L-to-H_P Parameter: Timepoint (hr) Value: 6
  misc_feature: MA Experiment 20001757 PARAMETER Experiment Name: At_50mM_NH4NO3_L-to-H_P Parameter: Tissue Value: Leaf
  misc_feature: MA Experiment 20001757 PARAMETER Experiment Name: At_50mM_NH4NO3_L-to-H_P Parameter: Treatment Value: 50mM NH4NO3 vs 100mM Mannitol
  misc_feature: MA Experiment ID: 20001905 Result: Up-regulated in Transcription
  misc_feature: MA Experiment 20001905 PARAMETER Experiment Name: At_Drought_Reproduction_P Parameter: Age (day) Value: 40
  misc_feature: MA Experiment 20001905 PARAMETER Experiment Name: At_Drought_Reproduction_P Parameter: Organism Value: A. thaliana
  misc_feature: MA Experiment 20001905 PARAMETER Experiment Name: At_Drought_Reproduction_P Parameter: Plant Line Value: WS
  misc_feature: MA Experiment 20001905 PARAMETER Experiment Name: At_Drought_Reproduction_P Parameter: Timepoint (day) Value: 10
  misc_feature: MA Experiment 20001905 PARAMETER Experiment Name: At_Drought_Reproduction_P Parameter: Tissue Value: Rosettes
  misc_feature: MA Experiment 20001905 PARAMETER Experiment Name: At_Drought_Reproduction_P Parameter: Treatment Value: Drought vs. No Drought
  misc_feature: MA Experiment ID: 20001908 Result: Up-regulated in Transcription
  misc_feature: MA Experiment 20001908 PARAMETER Experiment Name: At_Drought_Reproduction_P Parameter: Age (day) Value: 40
  misc_feature: MA Experiment 20001908 PARAMETER Experiment Name: At_Drought_Reproduction_P Parameter: Organism Value: A. thaliana
  misc_feature: MA Experiment 20001908 PARAMETER Experiment Name: At_Drought_Reproduction_P Parameter: Plant Line Value: WS
  misc_feature: MA Experiment 20001908 PARAMETER Experiment Name: At_Drought_Reproduction_P Parameter: Timepoint (day) Value: 10
  misc_feature: MA Experiment 20001908 PARAMETER Experiment Name: At_Drought_Reproduction_P Parameter: Tissue Value: Siliques
  misc_feature: MA Experiment 20001908 PARAMETER Experiment Name: At_Drought_Reproduction_P Parameter: Treatment Value: Drought vs. No Drought
  misc_feature: MA Experiment ID: 20001911 Result: Up-regulated in Transcription
  misc_feature: MA Experiment 20001911 PARAMETER Experiment Name: At_Drought_Reproduction_P Parameter: Age (day) Value: 40
  misc_feature: MA Experiment 20001911 PARAMETER Experiment Name: At_Drought_Reproduction_P Parameter: Organism Value: A. thaliana
  misc_feature: MA Experiment 20001911 PARAMETER Experiment Name: At_Drought_Reproduction_P Parameter: Plant Line Value: WS
  misc_feature: MA Experiment 20001911 PARAMETER Experiment Name: At_Drought_Reproduction_P Parameter: Timepoint (day) Value: 10
  misc_feature: MA Experiment 20001911 PARAMETER Experiment Name: At_Drought_Reproduction_P Parameter: Tissue Value: Flowers
  misc_feature: MA Experiment 20001911 PARAMETER Experiment Name: At_Drought_Reproduction_P Parameter: Treatment Value: Drought vs. No Drought

SEQ ID NO: 32823 - protein, 413 aa, Arabidopsis thaliana; identical to SEQ ID NO: 29233
  peptide (1)..(413): Ceres Seq. ID no. 13486779
  misc_feature (233)..(284): Pfam Name: Myb-like DNA-binding domain Pfam Description: Myb-like DNA-binding domain
  misc_feature (168)..(365): Homolog of NCBI NO: 4519671 NR Description: transfactor [Nicotiana tabacum]
  misc_feature (124)..(379): Homolog of NCBI NO: 7487685 NR Description: hypothetical protein T5F17.60 - Arabidopsis
  misc_feature (5)..(387): Homolog of NCBI NO: 6942190 NR Description: CDPK substrate protein 1; CSP1 [Mesembryanthemum
  misc_feature (124)..(379): Homolog of NCBI NO: 22329004 NR Description: expressed protein [Arabidopsis thaliana]
  misc_feature (45)..(377): Homolog of NCBI NO: 26452281 NR Description: putative transfactor [Arabidopsis thaliana]
  misc_feature (1)..(377): Homolog of NCBI NO: 15229298 NR Description: transfactor -related [Arabidopsis thaliana]
  misc_feature (44)..(413): Homolog of NCBI NO: 30692105 NR Description: expressed protein [Arabidopsis thaliana]
  misc_feature (39)..(413): Homolog of NCBI NO: 21954075 NR Description: unknown protein [Arabidopsis thaliana]
  misc_feature (1)..(413): Homolog of NCBI NO: 21537366 NR Description: transfactor, putative [Arabidopsis thaliana]
  misc_feature (1)..(413): Homolog of NCBI NO: 30692110 NR Description: expressed protein [Arabidopsis thaliana]

SEQ ID NO: 32824 - protein, 401 aa, Arabidopsis thaliana; identical to SEQ ID NO: 29234
  peptide (1)..(401): Ceres Seq. ID no. 13486780
  misc_feature (221)..(272): Pfam Name: Myb-like DNA-binding domain Pfam Description: Myb-like DNA-binding domain
  misc_feature (156)..(353): Homolog of NCBI NO: 4519671 NR Description: transfactor [Nicotiana tabacum]
  misc_feature (112)..(367): Homolog of NCBI NO: 7487685 NR Description: hypothetical protein T5F17.60 - Arabidopsis
  misc_feature (1)..(375): Homolog of NCBI NO: 6942190 NR Description: CDPK substrate protein 1; CSP1 [Mesembryanthemum
  misc_feature (112)..(367): Homolog of NCBI NO: 22329004 NR Description: expressed protein [Arabidopsis thaliana]
  misc_feature (33)..(365): Homolog of NCBI NO: 26452281 NR Description: putative transfactor [Arabidopsis thaliana]
  misc_feature (1)..(365): Homolog of NCBI NO: 15229298 NR Description: transfactor -related [Arabidopsis thaliana]
  misc_feature (32)..(401): Homolog of NCBI NO: 30692105 NR Description: expressed protein [Arabidopsis thaliana]
  misc_feature (27)..(401): Homolog of NCBI NO: 21954075 NR Description: unknown protein [Arabidopsis thaliana]
  misc_feature (1)..(401): Homolog of NCBI NO: 21537366 NR Description: transfactor, putative [Arabidopsis thaliana]
  misc_feature (1)..(401): Homolog of NCBI NO: 30692110 NR Description: expressed protein [Arabidopsis thaliana]

SEQ ID NO: 32825 - protein, 370 aa, Arabidopsis thaliana; identical to SEQ ID NO: 29235
  peptide (1)..(370): Ceres Seq. ID no. 13486781
  misc_feature (190)..(241): Pfam Name: Myb-like DNA-binding domain Pfam Description: Myb-like DNA-binding domain
  misc_feature (125)..(322): Homolog of NCBI NO: 4519671 NR Description: transfactor [Nicotiana tabacum]
  misc_feature (81)..(336): Homolog of NCBI NO: 7487685 NR Description: hypothetical protein T5F17.60 - Arabidopsis
  misc_feature (1)..(344): Homolog of NCBI NO: 6942190 NR Description: CDPK substrate protein 1; CSP1 [Mesembryanthemum
  misc_feature (81)..(336): Homolog of NCBI NO: 22329004 NR Description: expressed protein [Arabidopsis thaliana]
  misc_feature (2)..(334): Homolog of NCBI NO: 26452281 NR Description: putative transfactor [Arabidopsis thaliana]
  misc_feature (1)..(334): Homolog of NCBI NO: 15229298 NR Description: transfactor -related [Arabidopsis thaliana]
  misc_feature (1)..(370): Homolog of NCBI NO: 30692105 NR Description: expressed protein [Arabidopsis thaliana]
  misc_feature (1)..(370): Homolog of NCBI NO: 21954075 NR Description: unknown protein [Arabidopsis thaliana]
  misc_feature (1)..(370): Homolog of NCBI NO: 21537366 NR Description: transfactor, putative [Arabidopsis thaliana]
  misc_feature (1)..(370): Homolog of NCBI NO: 30692110 NR Description: expressed protein [Arabidopsis thaliana]

SEQ ID NO: 32826 - DNA, 1338 bp, Arabidopsis thaliana; identical to SEQ ID NO: 29236
  misc_feature (1)..(1338): Ceres Seq. ID no. 12324858
  misc_feature: MA Experiment ID: 108434 Result: Down-regulated in Transcription
  misc_feature: MA Experiment 108434 PARAMETER Experiment Name: At_Root_Tips_cDNA_P Parameter: Tissue Value: Root Tips
  misc_feature: MA Experiment ID: 108462 Result: Down-regulated in Transcription
  misc_feature: MA Experiment 108462 PARAMETER Experiment Name: At_Germinating_Seeds_cDNA_P Parameter: Age (day) Value: 2 vs. 0
  misc_feature: MA Experiment 108462 PARAMETER Experiment Name: At_Germinating_Seeds_cDNA_P Parameter: Tissue Value: Germinating Seeds
  misc_feature: MA Experiment ID: 20001451 Result: Down-regulated in Transcription
  misc_feature: MA Experiment 20001451 PARAMETER Experiment Name: At_Far-red-induction_P Parameter: Age (day) Value: 7
  misc_feature: MA Experiment 20001451 PARAMETER Experiment Name: At_Far-red-induction_P Parameter: Light Value: Far-red vs. White
  misc_feature: MA Experiment 20001451 PARAMETER Experiment Name: At_Far-red-induction_P Parameter: Organism Value: A. thaliana
  misc_feature: MA Experiment 20001451 PARAMETER Experiment Name: At_Far-red-induction_P Parameter: Plant Line Value: Columbia
  misc_feature: MA Experiment 20001451 PARAMETER Experiment Name: At_Far-red-induction_P Parameter: Timepoint (hr) Value: 24
  misc_feature: MA Experiment 20001451 PARAMETER Experiment Name: At_Far-red-induction_P Parameter: Tissue Value: Whole Plant

SEQ ID NO: 32827 - protein, 241 aa, Arabidopsis thaliana; identical to SEQ ID NO: 29237
  peptide (1)..(241): Ceres Seq. ID no. 12324859
  misc_feature (113)..(236): Pfam Name: 2OG-Fe(II) oxygenase superfamily Pfam Description: 2OG-Fe(II) oxygenase superfamily
  misc_feature (33)..(239): Homolog of NCBI NO: 29150365 NR Description: putative oxidoreductase [Oryza sativa (japonica
  misc_feature (1)..(82): Homolog of NCBI NO: 15233341 NR Description: putative protein; protein id: At4g35810.1
  misc_feature (79)..(218): Homolog of NCBI NO: 15233341 NR Description: putative protein; protein id: At4g35810.1
  misc_feature (23)..(218): Homolog of NCBI NO: 7488226 NR Description: procollagen-proline dioxygenase alpha chain
  misc_feature (23)..(223): Homolog of NCBI NO: 37535718 NR Description: putative prolyl 4-hydroxylase, alpha subunit
  misc_feature (23)..(241): Homolog of NCBI NO: 21593091 NR Description: putative prolyl 4-hydroxylase, alpha subunit
  misc_feature (23)..(241): Homolog of NCBI NO: 15227885 NR Description: putative prolyl 4-hydroxylase, alpha subunit
  misc_feature (31)..(218): Homolog of NCBI NO: 15239240 NR Description: prolyl 4-hydroxylase, alpha subunit-like protein
  misc_feature (22)..(241): Homolog of NCBI NO: 18394842 NR Description: expressed protein
  misc_feature (22)..(241): Homolog of NCBI NO: 21537370 NR Description: putative prolyl 4-hydroxylase, alpha subunit

SEQ ID NO: 32828 - protein, 180 aa, Arabidopsis thaliana; identical to SEQ ID NO: 29238
  peptide (1)..(180): Ceres Seq. ID no. 12324860
  misc_feature (52)..(175): Pfam Name: 2OG-Fe(II) oxygenase superfamily Pfam Description: 2OG-Fe(II) oxygenase superfamily
  misc_feature (1)..(178): Homolog of NCBI NO: 29150365 NR Description: putative oxidoreductase [Oryza sativa (japonica
  misc_feature (1)..(21): Homolog of NCBI NO: 15233341 NR Description: putative protein; protein id: At4g35810.1
  misc_feature (18)..(157): Homolog of NCBI NO: 15233341 NR Description: putative protein; protein id: At4g35810.1
  misc_feature (1)..(157): Homolog of NCBI NO: 7488226 NR Description: procollagen-proline dioxygenase alpha chain
  misc_feature (1)..(162): Homolog of NCBI NO: 37535718 NR Description: putative prolyl 4-hydroxylase, alpha subunit
  misc_feature (1)..(180): Homolog of NCBI NO: 21593091 NR Description: putative prolyl 4-hydroxylase, alpha subunit
  misc_feature (1)..(180): Homolog of NCBI NO: 15227885 NR Description: putative prolyl 4-hydroxylase, alpha subunit
  misc_feature (1)..(157): Homolog of NCBI NO: 15239240 NR Description: prolyl 4-hydroxylase, alpha subunit-like protein
  misc_feature (1)..(180): Homolog of NCBI NO: 18394842 NR Description: expressed protein
  misc_feature (1)..(180): Homolog of NCBI NO: 21537370 NR Description: putative prolyl 4-hydroxylase, alpha subunit

SEQ ID NO: 32829 - DNA, 1386 bp, Arabidopsis thaliana; identical to SEQ ID NO: 29239
  misc_feature (1)..(1386): Ceres Seq. ID no. 12321239
  misc_feature: MA Experiment ID: 108434 Result: Down-regulated in Transcription
  misc_feature: MA Experiment 108434 PARAMETER Experiment Name: At_Root_Tips_cDNA_P Parameter: Tissue Value: Root Tips
  misc_feature: MA Experiment ID: 108488 Result: Down-regulated in Transcription
  misc_feature: MA Experiment ID: 108489 Result: Up-regulated in Transcription
  misc_feature: MA Experiment ID: 108561 Result: Up-regulated in Transcription
  misc_feature: MA Experiment 108561 PARAMETER Experiment Name: At_100uM_ABA_cDNA_P Parameter: Timepoint (hr) Value: 6
  misc_feature: MA Experiment 108561 PARAMETER Experiment Name: At_100uM_ABA_cDNA_P Parameter: Tissue Value: Aerial
  misc_feature: MA Experiment 108561 PARAMETER Experiment Name: At_100uM_ABA_cDNA_P Parameter: Treatment Value: 100uM ABA vs. No Treatment
  misc_feature: MA Experiment ID: 108573 Result: Up-regulated in Transcription
  misc_feature: MA Experiment 108573 PARAMETER Experiment Name: At_Drought_cDNA_P Parameter: Timepoint (hr) Value: 6
  misc_feature: MA Experiment 108573 PARAMETER Experiment Name: At_Drought_cDNA_P Parameter: Tissue Value: Aerial
  misc_feature: MA Experiment 108573 PARAMETER Experiment Name: At_Drought_cDNA_P Parameter: Treatment Value: Drought vs. No Drought
  misc_feature: MA Experiment ID: 108577 Result: Up-regulated in Transcription
  misc_feature: MA Experiment 108577 PARAMETER Experiment Name: At_42deg_Heat_cDNA_P Parameter: Temperature (deg C) Value: 42 vs. 22
  misc_feature: MA Experiment 108577 PARAMETER Experiment Name: At_42deg_Heat_cDNA_P Parameter: Timepoint (hr) Value: 6
  misc_feature: MA Experiment 108577 PARAMETER Experiment Name: At_42deg_Heat_cDNA_P Parameter: Tissue Value: Aerial
  misc_feature: MA Experiment ID: 20000071 Result: Up-regulated in Transcription
  misc_feature: MA Experiment 20000071 PARAMETER Experiment Name: At_100uM_ABA_Mutants_cDNA_P Parameter: Plant Line Value: CS8104
  misc_feature: MA Experiment 20000071 PARAMETER Experiment Name: At_100uM_ABA_Mutants_cDNA_P Parameter: Timepoint (hr) Value: 6
  misc_feature: MA Experiment 20000071 PARAMETER Experiment Name: At_100uM_ABA_Mutants_cDNA_P Parameter: Tissue Value: Aerial
  misc_feature: MA Experiment 20000071 PARAMETER Experiment Name: At_100uM_ABA_Mutants_cDNA_P Parameter: Treatment Value: 100uM ABA vs. No Treatment
  misc_feature: MA Experiment ID: 20000111 Result: Up-regulated in Transcription
  misc_feature: MA Experiment 20000111 PARAMETER Experiment Name: At_42deg_Heat_cDNA_P Parameter: Temperature (deg C) Value: 42 vs. 22
  misc_feature: MA Experiment 20000111 PARAMETER Experiment Name: At_42deg_Heat_cDNA_P Parameter: Timepoint (hr) Value: 6
  misc_feature: MA Experiment 20000111 PARAMETER Experiment Name: At_42deg_Heat_cDNA_P Parameter: Tissue Value: Aerial
  misc_feature: MA Experiment ID: 20000112 Result: Up-regulated in Transcription
  misc_feature: MA Experiment 20000112 PARAMETER Experiment Name: At_42deg_Heat_cDNA_P Parameter: Temperature (deg C) Value: 42 vs. 22
  misc_feature: MA Experiment 20000112 PARAMETER Experiment Name: At_42deg_Heat_cDNA_P Parameter: Timepoint (hr) Value: 2
  misc_feature: MA Experiment 20000112 PARAMETER Experiment Name: At_42deg_Heat_cDNA_P Parameter: Tissue Value: Aerial
  misc_feature: MA Experiment ID: 20000144 Result: Up-regulated in Transcription
  misc_feature: MA Experiment 20000144 PARAMETER Experiment Name: At_42deg_Heat_cDNA_P Parameter: Temperature (deg C) Value: 42 vs. 22
  misc_feature: MA Experiment 20000144 PARAMETER Experiment Name: At_42deg_Heat_cDNA_P Parameter: Timepoint (hr) Value: 1
  misc_feature: MA Experiment 20000144 PARAMETER Experiment Name: At_42deg_Heat_cDNA_P Parameter: Tissue Value: Aerial
  misc_feature: MA Experiment ID: 20000173 Result: Up-regulated in Transcription
  misc_feature: MA Experiment 20000173 PARAMETER Experiment Name: At_42deg_Heat_P Parameter: Age (day) Value: 14
  misc_feature: MA Experiment 20000173 PARAMETER Experiment Name: At_42deg_Heat_P Parameter: Organism Value: A. thaliana
  misc_feature: MA Experiment 20000173 PARAMETER Experiment Name: At_42deg_Heat_P Parameter: Plant Line Value: WS
  misc_feature: MA Experiment 20000173 PARAMETER Experiment Name: At_42deg_Heat_P Parameter: Temperature (deg C) Value: 42 vs. 22
  misc_feature: MA Experiment 20000173 PARAMETER Experiment Name: At_42deg_Heat_P Parameter: Timepoint (hr) Value: 6
  misc_feature: MA Experiment 20000173 PARAMETER Experiment Name: At_42deg_Heat_P Parameter: Tissue Value: Aerial
  misc_feature: MA Experiment ID: 20000179 Result: Down-regulated in Transcription
  misc_feature: MA Experiment 20000179 PARAMETER Experiment Name: At_Germinating_Seeds_P Parameter: Age (hr) Value: 6 vs. 0
  misc_feature: MA Experiment 20000179 PARAMETER Experiment Name: At_Germinating_Seeds_P Parameter: Tissue Value: Germinating Seeds
  misc_feature: MA Experiment ID: 20000224 Result: Down-regulated in Transcription
  misc_feature: MA Experiment ID: 20000436 Result: Up-regulated in Transcription
  misc_feature: MA Experiment 20000436 PARAMETER Experiment Name: At_Drought_P Parameter: Age (day) Value: 7
  misc_feature: MA Experiment 20000436 PARAMETER Experiment Name: At_Drought_P Parameter: Organism Value: A. thaliana
  misc_feature: MA Experiment 20000436 PARAMETER Experiment Name: At_Drought_P Parameter: Plant Line Value: WS
  misc_feature: MA Experiment 20000436 PARAMETER Experiment Name: At_Drought_P Parameter: Timepoint (hr) Value: 12
  misc_feature: MA Experiment 20000436 PARAMETER Experiment Name: At_Drought_P Parameter: Tissue Value: Whole Plant
  misc_feature: MA Experiment 20000436 PARAMETER Experiment Name: At_Drought_P Parameter: Treatment Value: Drought vs. No Drought
  misc_feature: MA Experiment ID: 20000437 Result: Up-regulated in Transcription
  misc_feature: MA Experiment 20000437 PARAMETER Experiment Name: At_Drought_P Parameter: Age (day) Value: 8
  misc_feature: MA Experiment 20000437 PARAMETER Experiment Name: At_Drought_P Parameter: Organism Value: A. thaliana
  misc_feature: MA Experiment 20000437 PARAMETER Experiment Name: At_Drought_P Parameter: Plant Line Value: WS
  misc_feature: MA Experiment 20000437 PARAMETER Experiment Name: At_Drought_P Parameter: Timepoint (hr) Value: 24
  misc_feature: MA Experiment 20000437 PARAMETER Experiment Name: At_Drought_P Parameter: Tissue Value: Whole Plant
  misc_feature: MA Experiment 20000437 PARAMETER Experiment Name: At_Drought_P Parameter: Treatment Value: Drought vs. No Drought
  misc_feature: MA Experiment ID: 20000794 Result: Up-regulated in Transcription
  misc_feature: MA Experiment 20000794 PARAMETER Experiment Name: At_Petals_P Parameter: Age (day) Value: 23-25 days
  misc_feature: MA Experiment 20000794 PARAMETER Experiment Name: At_Petals_P Parameter: Plant Line Value: WS
  misc_feature: MA Experiment 20000794 PARAMETER Experiment Name: At_Petals_P Parameter: Tissue Value: Petals vs. Whole plant
  misc_feature: MA Experiment ID: 20001560 Result: Down-regulated in Transcription
  misc_feature: MA Experiment 20001560 PARAMETER Experiment Name: At_Drought_Soil_Dry_P Parameter: Age (day) Value: 28
  misc_feature: MA Experiment 20001560 PARAMETER Experiment Name: At_Drought_Soil_Dry_P Parameter: Organism Value: A. thaliana
  misc_feature: MA Experiment 20001560 PARAMETER Experiment Name: At_Drought_Soil_Dry_P Parameter: Plant Line Value: WS
  misc_feature: MA Experiment 20001560 PARAMETER Experiment Name: At_Drought_Soil_Dry_P Parameter: Post Timepoint (hr) Value: None
  misc_feature: MA Experiment 20001560 PARAMETER Experiment Name: At_Drought_Soil_Dry_P Parameter: Post-Treatment Value: None
  misc_feature: MA Experiment 20001560 PARAMETER Experiment Name: At_Drought_Soil_Dry_P Parameter: Timepoint (day) Value: 14
  misc_feature: MA Experiment 20001560 PARAMETER Experiment Name: At_Drought_Soil_Dry_P Parameter: Treatment Value: Drought vs. No Drought

SEQ ID NO: 32830 - protein, 296 aa, Arabidopsis thaliana; identical to SEQ ID NO: 29240
  peptide (1)..(296): Ceres Seq. ID no. 12321240
  misc_feature (89)..(296): Homolog of NCBI NO: 15238452 NR Description: putative protein; protein id: At5g05150.1
  misc_feature (89)..(287): Homolog of NCBI NO: 11288366 NR Description: hypothetical protein T5P19.90 - Arabidopsis
  misc_feature (89)..(287): Homolog of NCBI NO: 30688413 NR Description: WD-40 repeat protein family [Arabidopsis
  misc_feature (89)..(287): Homolog of NCBI NO: 7487233 NR Description: hypothetical protein At2g40810 [imported] -
  misc_feature (89)..(287): Homolog of NCBI NO: 34896164 NR Description: hypothetical protein~similar to Arabidopsis
  misc_feature (89)..(287): Homolog of NCBI NO: 30694449 NR Description: WD-40 repeat protein family [Arabidopsis thaliana]
  misc_feature (23)..(296): Homolog of NCBI NO: 34907164 NR Description: P0423A12.19 [Oryza sativa (japonica
  misc_feature (12)..(287): Homolog of NCBI NO: 18412493 NR Description: putative protein
  misc_feature (12)..(296): Homolog of NCBI NO: 11288364 NR Description: hypothetical protein F26K9.200 - Arabidopsis
  misc_feature (12)..(287): Homolog of NCBI NO: 14517420 NR Description: AT3g62770/F26K9_200 [Arabidopsis thaliana]

SEQ ID NO: 32831 - protein, 285 aa, Arabidopsis thaliana; identical to SEQ ID NO: 29241
  peptide (1)..(285): Ceres Seq. ID no. 12321241
  misc_feature (78)..(285): Homolog of NCBI NO: 15238452 NR Description: putative protein; protein id: At5g05150.1
  misc_feature (78)..(276): Homolog of NCBI NO: 11288366 NR Description: hypothetical protein T5P19.90 - Arabidopsis
  misc_feature (78)..(276): Homolog of NCBI NO: 30688413 NR Description: WD-40 repeat protein family [Arabidopsis
  misc_feature (78)..(276): Homolog of NCBI NO: 7487233 NR Description: hypothetical protein At2g40810 [imported] -
  misc_feature (78)..(276): Homolog of NCBI NO: 34896164 NR Description: hypothetical protein~similar to Arabidopsis
  misc_feature (78)..(276): Homolog of NCBI NO: 30694449 NR Description: WD-40 repeat protein family [Arabidopsis thaliana]
  misc_feature (12)..(285): Homolog of NCBI NO: 34907164 NR Description: P0423A12.19 [Oryza sativa (japonica
  misc_feature (1)..(276): Homolog of NCBI NO: 18412493 NR Description: putative protein
  misc_feature (1)..(285): Homolog of NCBI NO: 11288364 NR Description: hypothetical protein F26K9.200 - Arabidopsis
  misc_feature (1)..(276): Homolog of NCBI NO: 14517420 NR Description: AT3g62770/F26K9_200 [Arabidopsis thaliana]

SEQ ID NO: 32832 - protein, 239 aa, Arabidopsis thaliana; identical to SEQ ID NO: 29242
  peptide (1)..(239): Ceres Seq. ID no. 12321242
  misc_feature (32)..(239): Homolog of NCBI NO: 15238452 NR Description: putative protein; protein id: At5g05150.1
  misc_feature (32)..(230): Homolog of NCBI NO: 11288366 NR Description: hypothetical protein T5P19.90 - Arabidopsis
  misc_feature (32)..(230): Homolog of NCBI NO: 30688413 NR Description: WD-40 repeat protein family [Arabidopsis
  misc_feature (32)..(230): Homolog of NCBI NO: 7487233 NR Description: hypothetical protein At2g40810 [imported] -
  misc_feature (32)..(230): Homolog of NCBI NO: 34896164 NR Description: hypothetical protein~similar to Arabidopsis
  misc_feature (32)..(230): Homolog of NCBI NO: 30694449 NR Description: WD-40 repeat protein family [Arabidopsis thaliana]
  misc_feature (1)..(239): Homolog of NCBI NO: 34907164 NR Description: P0423A12.19 [Oryza sativa (japonica
  misc_feature (1)..(230): Homolog of NCBI NO: 18412493 NR Description: putative protein
  misc_feature (1)..(239): Homolog of NCBI NO: 11288364 NR Description: hypothetical protein F26K9.200 - Arabidopsis
  misc_feature (1)..(230): Homolog of NCBI NO: 14517420 NR Description: AT3g62770/F26K9_200 [Arabidopsis thaliana]

SEQ ID NO: 32833 - DNA, 468 bp, Arabidopsis thaliana; identical to SEQ ID NO: 29243
  misc_feature (1)..(468): Ceres Seq. ID no. 12397076
  misc_feature: MA Experiment ID: 108461 Result: Up-regulated in Transcription
  misc_feature: MA Experiment 108461 PARAMETER Experiment Name: At_Germinating_Seeds_cDNA_P Parameter: Age (day) Value: 1 vs. 0
  misc_feature: MA Experiment 108461 PARAMETER Experiment Name: At_Germinating_Seeds_cDNA_P Parameter: Tissue Value: Germinating Seeds
  misc_feature: MA Experiment ID: 108462 Result: Up-regulated in Transcription
  misc_feature: MA Experiment 108462 PARAMETER Experiment Name: At_Germinating_Seeds_cDNA_P Parameter: Age (day) Value: 2 vs. 0
  misc_feature: MA Experiment 108462 PARAMETER Experiment Name: At_Germinating_Seeds_cDNA_P Parameter: Tissue Value: Germinating Seeds
  misc_feature: MA Experiment ID: 108464 Result: Up-regulated in Transcription
  misc_feature: MA Experiment 108464 PARAMETER Experiment Name: At_Germinating_Seeds_cDNA_P Parameter: Age (day) Value: 4 vs. 0
  misc_feature: MA Experiment 108464 PARAMETER Experiment Name: At_Germinating_Seeds_cDNA_P Parameter: Tissue Value: Germinating Seeds
  misc_feature: MA Experiment ID: 108488 Result: Up-regulated in Transcription
  misc_feature: MA Experiment ID: 108572 Result: Up-regulated in Transcription
  misc_feature: MA Experiment 108572 PARAMETER Experiment Name: At_Drought_cDNA_P Parameter: Timepoint (hr) Value: 1
  misc_feature: MA Experiment 108572 PARAMETER Experiment Name: At_Drought_cDNA_P Parameter: Tissue Value: Aerial
  misc_feature: MA Experiment 108572 PARAMETER Experiment Name: At_Drought_cDNA_P Parameter: Treatment Value: Drought vs. No Drought
  misc_feature: MA Experiment ID: 108576 Result: Down-regulated in Transcription
  misc_feature: MA Experiment 108576 PARAMETER Experiment Name: At_42deg_Heat_cDNA_P Parameter: Temperature (deg C) Value: 42 vs. 22
  misc_feature: MA Experiment 108576 PARAMETER Experiment Name: At_42deg_Heat_cDNA_P Parameter: Timepoint (hr) Value: 1
  misc_feature: MA Experiment 108576 PARAMETER Experiment Name: At_42deg_Heat_cDNA_P Parameter: Tissue Value: Aerial
  misc_feature: MA Experiment ID: 108577 Result: Down-regulated in Transcription
  misc_feature: MA Experiment 108577 PARAMETER Experiment Name: At_42deg_Heat_cDNA_P Parameter: Temperature (deg C) Value: 42 vs. 22
  misc_feature: MA Experiment 108577 PARAMETER Experiment Name: At_42deg_Heat_cDNA_P Parameter: Timepoint (hr) Value: 6
  misc_feature: MA Experiment 108577 PARAMETER Experiment Name: At_42deg_Heat_cDNA_P Parameter: Tissue Value: Aerial
  misc_feature: MA Experiment ID: 108585 Result: Down-regulated in Transcription
  misc_feature: MA Experiment 108585 PARAMETER Experiment Name: At_5mM_NaNP_cDNA_P Parameter: Timepoint (hr) Value: 6
  misc_feature: MA Experiment 108585 PARAMETER Experiment Name: At_5mM_NaNP_cDNA_P Parameter: Tissue Value: Aerial
  misc_feature: MA Experiment 108585 PARAMETER Experiment Name: At_5mM_NaNP_cDNA_P Parameter: Treatment Value: null
  misc_feature: MA Experiment ID: 108594 Result: Down-regulated in Transcription
  misc_feature: MA Experiment 108594 PARAMETER Experiment Name: At_Ler-rhl_Root_cDNA_P Parameter: Plant Line Value: null
  misc_feature: MA Experiment ID: 108595 Result: Down-regulated in Transcription
  misc_feature: MA Experiment 108595 PARAMETER Experiment Name: At_Ler-pi_Ovule_cDNA_P Parameter: Plant Line Value: null
  misc_feature: MA Experiment ID: 108607 Result: Up-regulated in Transcription
  misc_feature: MA Experiment 108607 PARAMETER Experiment Name: At_100uM_ABA_cDNA_P Parameter: Timepoint (hr) Value: 4
  misc_feature: MA Experiment 108607 PARAMETER Experiment Name: At_100uM_ABA_cDNA_P Parameter: Tissue Value: Aerial
  misc_feature: MA Experiment 108607 PARAMETER Experiment Name: At_100uM_ABA_cDNA_P Parameter: Treatment Value: 100uM ABA vs. No Treatment
  misc_feature: MA Experiment ID: 108668 Result: Down-regulated in Transcription
  misc_feature: MA Experiment 108668 PARAMETER Experiment Name: At_2mM_SA_cDNA_P Parameter: Plant Line Value: WS
  misc_feature: MA Experiment 108668 PARAMETER Experiment Name: At_2mM_SA_cDNA_P Parameter: Timepoint (hr) Value: 6
  misc_feature: MA Experiment 108668 PARAMETER Experiment Name: At_2mM_SA_cDNA_P Parameter: Treatment Value: 2mM SA vs. No Treatment
  misc_feature: MA Experiment ID: 20000112 Result: Down-regulated in Transcription
  misc_feature: MA Experiment 20000112 PARAMETER Experiment Name: At_42deg_Heat_cDNA_P Parameter: Temperature (deg C) Value: 42 vs. 22
  misc_feature: MA Experiment 20000112 PARAMETER Experiment Name: At_42deg_Heat_cDNA_P Parameter: Timepoint (hr) Value: 2
  misc_feature: MA Experiment 20000112 PARAMETER Experiment Name: At_42deg_Heat_cDNA_P Parameter: Tissue Value: Aerial
  misc_feature: MA Experiment ID: 20000113 Result: Down-regulated in Transcription
  misc_feature: MA Experiment 20000113 PARAMETER Experiment Name: At_42deg_Heat_cDNA_P Parameter: Temperature (deg C) Value: 42 vs. 22
  misc_feature: MA Experiment 20000113 PARAMETER Experiment Name: At_42deg_Heat_cDNA_P Parameter: Timepoint (hr) Value: 8
  misc_feature: MA Experiment 20000113 PARAMETER Experiment Name: At_42deg_Heat_cDNA_P Parameter: Tissue Value: Aerial
  misc_feature: MA Experiment ID: 20000144 Result: Down-regulated in Transcription
  misc_feature: MA Experiment 20000144 PARAMETER Experiment Name: At_42deg_Heat_cDNA_P Parameter: Temperature (deg C) Value: 42 vs. 22
  misc_feature: MA Experiment 20000144 PARAMETER Experiment Name: At_42deg_Heat_cDNA_P Parameter: Timepoint (hr) Value: 1
  misc_feature: MA Experiment 20000144 PARAMETER Experiment Name: At_42deg_Heat_cDNA_P Parameter: Tissue Value: Aerial
  misc_feature: MA Experiment ID: 20000171 Result: Down-regulated in Transcription
  misc_feature: MA Experiment 20000171 PARAMETER Experiment Name: At_42deg_Heat_P Parameter: Age (day) Value: 14
  misc_feature: MA Experiment 20000171 PARAMETER Experiment Name: At_42deg_Heat_P Parameter: Organism Value: A. thaliana
  misc_feature: MA Experiment 20000171 PARAMETER Experiment Name: At_42deg_Heat_P Parameter: Plant Line Value: WS
  misc_feature: MA Experiment 20000171 PARAMETER Experiment Name: At_42deg_Heat_P Parameter: Temperature (deg C) Value: 42 vs. 22
  misc_feature: MA Experiment 20000171 PARAMETER Experiment Name: At_42deg_Heat_P Parameter: Timepoint (hr) Value: 1
  misc_feature: MA Experiment 20000171 PARAMETER Experiment Name: At_42deg_Heat_P Parameter: Tissue Value: Aerial
  misc_feature: MA Experiment ID: 20000173 Result: Down-regulated in Transcription
  misc_feature: MA Experiment 20000173 PARAMETER Experiment Name: At_42deg_Heat_P Parameter: Age (day) Value: 14
  misc_feature: MA Experiment 20000173 PARAMETER Experiment Name: At_42deg_Heat_P Parameter: Organism Value: A. thaliana
  misc_feature: MA Experiment 20000173 PARAMETER Experiment Name: At_42deg_Heat_P Parameter: Plant Line Value: WS
  misc_feature: MA Experiment 20000173 PARAMETER Experiment Name: At_42deg_Heat_P Parameter: Temperature (deg C) Value: 42 vs. 22
  misc_feature: MA Experiment 20000173 PARAMETER Experiment Name: At_42deg_Heat_P Parameter: Timepoint (hr) Value: 6
  misc_feature: MA Experiment 20000173 PARAMETER Experiment Name: At_42deg_Heat_P Parameter: Tissue Value: Aerial
  misc_feature: MA Experiment ID: 20000180 Result: Up-regulated in Transcription
  misc_feature: MA Experiment 20000180 PARAMETER Experiment Name: At_Germinating_Seeds_P Parameter: Age (hr) Value: 24 vs. 0
  misc_feature: MA Experiment 20000180 PARAMETER Experiment Name: At_Germinating_Seeds_P Parameter: Tissue Value: Germinating Seeds
  misc_feature: MA Experiment ID: 20000184 Result: Up-regulated in Transcription
  misc_feature: MA Experiment 20000184 PARAMETER Experiment Name: At_Shoots__P Parameter: Age (day) Value: 7
  misc_feature: MA Experiment 20000184 PARAMETER Experiment Name: At_Shoots__P Parameter: Tissue Value: Shoots vs. Whole Plant
  misc_feature: MA Experiment ID: 20000185 Result: Down-regulated in Transcription
  misc_feature: MA Experiment 20000185 PARAMETER Experiment Name: At_Roots__P Parameter: Age (day) Value: 7 vs. 21
  misc_feature: MA Experiment 20000185 PARAMETER Experiment Name: At_Roots__P Parameter: Organism Value: A. thaliana
  misc_feature: MA Experiment 20000185 PARAMETER Experiment Name: At_Roots__P Parameter: Tissue Value: Roots vs. Whole Plant
  misc_feature: MA Experiment ID: 20000224 Result: Down-regulated in Transcription
  misc_feature: MA Experiment ID: 20000234 Result: Up-regulated in Transcription
  misc_feature: MA Experiment 20000234 PARAMETER Experiment Name: At_Siliques_P Parameter: Age (day) Value: 21
  misc_feature: MA Experiment 20000234 PARAMETER Experiment Name: At_Siliques_P Parameter: Organism Value: A. thaliana
  misc_feature: MA Experiment 20000234 PARAMETER Experiment Name: At_Siliques_P Parameter: Plant Line Value: WS
  misc_feature: MA Experiment 20000234 PARAMETER Experiment Name: At_Siliques_P Parameter: Tissue Value: Less Than 5mm Siliques vs. Whole Plant
  misc_feature: MA Experiment ID: 20000286 Result: Up-regulated in Transcription
  misc_feature: MA Experiment 20000286 PARAMETER Experiment Name: At_Open_Flower_P Parameter: Age (day) Value: 21
  misc_feature: MA Experiment 20000286 PARAMETER Experiment Name: At_Open_Flower_P Parameter: Plant Line Value: WS
  misc_feature: MA Experiment 20000286 PARAMETER Experiment Name: At_Open_Flower_P Parameter: Tissue Value: Half Open vs. Whole Plant
  misc_feature: MA Experiment ID: 20000438 Result: Up-regulated in Transcription
  misc_feature: MA Experiment 20000438 PARAMETER Experiment Name: At_Shoots__P Parameter: Age (day) Value: 14
  misc_feature: MA Experiment 20000438 PARAMETER Experiment Name: At_Shoots__P Parameter: Tissue Value: Shoots vs. Whole Plant
  misc_feature: MA Experiment ID: 20000439 Result: Down-regulated in Transcription
  misc_feature: MA Experiment 20000439 PARAMETER Experiment Name: At_Roots__P Parameter: Age (day) Value: 14 vs. 21
  misc_feature: MA Experiment 20000439 PARAMETER Experiment Name: At_Roots__P Parameter: Organism Value: A. thaliana
  misc_feature: MA Experiment 20000439 PARAMETER Experiment Name: At_Roots__P Parameter: Tissue Value: Roots vs. Whole Plant
  misc_feature: MA Experiment ID: 20000451 Result: Up-regulated in Transcription
  misc_feature: MA Experiment 20000451 PARAMETER Experiment Name: At_CS6879_Shoots-Roots_P Parameter: Age (day) Value: 14
  misc_feature: MA Experiment 20000451 PARAMETER Experiment Name: At_CS6879_Shoots-Roots_P Parameter: Organism Value: A. thaliana
  misc_feature: MA Experiment 20000451 PARAMETER Experiment Name: At_CS6879_Shoots-Roots_P Parameter: Plant Line Value: CS6879 vs. WS
  misc_feature: MA Experiment 20000451 PARAMETER Experiment Name: At_CS6879_Shoots-Roots_P Parameter: Tissue Value: Roots
  misc_feature: MA Experiment ID: 20000573 Result: Down-regulated in Transcription
  misc_feature: MA Experiment 20000573 PARAMETER Experiment Name: At_100uM_ABA_Mutants__P Parameter: Organism Value: A. thaliana
  misc_feature: MA Experiment 20000573 PARAMETER Experiment Name: At_100uM_ABA_Mutants__P Parameter: Plant Line Value: CS22 vs. Ler wt
  misc_feature: MA Experiment 20000573 PARAMETER Experiment Name: At_100uM_ABA_Mutants__P Parameter: Timepoint (hr) Value: N/A
  misc_feature: MA Experiment 20000573 PARAMETER Experiment Name: At_100uM_ABA_Mutants__P Parameter: Tissue Value: Whole Plant
  misc_feature: MA Experiment 20000573 PARAMETER Experiment Name: At_100uM_ABA_Mutants__P Parameter: Treatment Value: None
  misc_feature: MA Experiment ID: 20000574 Result: Down-regulated in Transcription
  misc_feature: MA Experiment 20000574 PARAMETER Experiment Name: At_100uM_ABA_Mutants__P Parameter: Organism Value: A. thaliana
  misc_feature: MA Experiment 20000574 PARAMETER Experiment Name: At_100uM_ABA_Mutants__P Parameter: Plant Line Value: CS23 vs. Ler wt
  misc_feature: MA Experiment 20000574 PARAMETER Experiment Name: At_100uM_ABA_Mutants__P Parameter: Timepoint (hr) Value: N/A
  misc_feature: MA Experiment 20000574 PARAMETER Experiment Name: At_100uM_ABA_Mutants__P Parameter: Tissue Value: Whole Plant
  misc_feature: MA Experiment 20000574 PARAMETER Experiment Name: At_100uM_ABA_Mutants__P Parameter: Treatment Value: None
  misc_feature: MA Experiment ID: 20001248 Result: Down-regulated in Transcription
  misc_feature: MA Experiment 20001248 PARAMETER Experiment Name: At_Far-red-induction_P Parameter: Age (day) Value: 7
  misc_feature: MA Experiment 20001248 PARAMETER Experiment Name: At_Far-red-induction_P Parameter: Light Value: Far-red vs. White
  misc_feature: MA Experiment 20001248 PARAMETER Experiment Name: At_Far-red-induction_P Parameter: Organism Value: A. thaliana
  misc_feature: MA Experiment 20001248 PARAMETER Experiment Name: At_Far-red-induction_P Parameter: Plant Line Value: Columbia
  misc_feature: MA Experiment 20001248 PARAMETER Experiment Name: At_Far-red-induction_P Parameter: Timepoint (hr) Value: 4
  misc_feature: MA Experiment 20001248 PARAMETER Experiment Name: At_Far-red-induction_P Parameter: Tissue Value: Whole Plant
  misc_feature: MA Experiment ID: 20001558 Result: Up-regulated in Transcription
  misc_feature: MA Experiment 20001558 PARAMETER Experiment Name: At_Drought_Soil_Dry_P Parameter: Age (day) Value: 27
  misc_feature: MA Experiment 20001558 PARAMETER Experiment Name: At_Drought_Soil_Dry_P Parameter: Organism Value: A. thaliana
  misc_feature: MA Experiment 20001558 PARAMETER Experiment Name: At_Drought_Soil_Dry_P Parameter: Plant Line Value: WS
  misc_feature: MA Experiment 20001558 PARAMETER Experiment Name: At_Drought_Soil_Dry_P Parameter: Post Timepoint (hr) Value: 6
  misc_feature: MA Experiment 20001558 PARAMETER Experiment Name: At_Drought_Soil_Dry_P Parameter: Post-Treatment Value: Re-Water vs. No Drought
  misc_feature: MA Experiment 20001558 PARAMETER Experiment Name: At_Drought_Soil_Dry_P Parameter: Timepoint (day) Value: 13
  misc_feature: MA Experiment 20001558 PARAMETER Experiment Name: At_Drought_Soil_Dry_P Parameter: Treatment Value: Drought vs. No Drought
  misc_feature: MA Experiment ID: 20001906 Result: Down-regulated in Transcription
  misc_feature: MA Experiment 20001906 PARAMETER Experiment Name: At_Drought_Reproduction_P Parameter: Age (day) Value: 35
  misc_feature: MA Experiment 20001906 PARAMETER Experiment Name: At_Drought_Reproduction_P Parameter: Organism Value: A. thaliana
  misc_feature: MA Experiment 20001906 PARAMETER Experiment Name: At_Drought_Reproduction_P Parameter: Plant Line Value: WS
  misc_feature: MA Experiment 20001906 PARAMETER Experiment Name: At_Drought_Reproduction_P Parameter: Timepoint (day) Value: 5
  misc_feature: MA Experiment 20001906 PARAMETER Experiment Name: At_Drought_Reproduction_P Parameter: Tissue Value: Siliques
  misc_feature: MA Experiment 20001906 PARAMETER Experiment Name: At_Drought_Reproduction_P Parameter: Treatment Value: Drought vs. No Drought
  misc_feature: MA Experiment ID: 20001908 Result: Down-regulated in Transcription
  misc_feature: MA Experiment 20001908 PARAMETER Experiment Name: At_Drought_Reproduction_P Parameter: Age (day) Value: 40
  misc_feature: MA Experiment 20001908 PARAMETER Experiment Name: At_Drought_Reproduction_P Parameter: Organism Value: A. thaliana
  misc_feature: MA Experiment 20001908 PARAMETER Experiment Name: At_Drought_Reproduction_P Parameter: Plant Line Value: WS
  misc_feature: MA Experiment 20001908 PARAMETER Experiment Name: At_Drought_Reproduction_P Parameter: Timepoint (day) Value: 10
  misc_feature: MA Experiment 20001908 PARAMETER Experiment Name: At_Drought_Reproduction_P Parameter: Tissue Value: Siliques
  misc_feature: MA Experiment 20001908 PARAMETER Experiment Name: At_Drought_Reproduction_P Parameter: Treatment Value: Drought vs. No Drought
  misc_feature: MA Experiment ID: 20001911 Result: Down-regulated in Transcription
  misc_feature: MA Experiment 20001911 PARAMETER Experiment Name: At_Drought_Reproduction_P Parameter: Age (day) Value: 40
  misc_feature: MA Experiment 20001911 PARAMETER Experiment Name: At_Drought_Reproduction_P Parameter: Organism Value: A. thaliana
  misc_feature: MA Experiment 20001911 PARAMETER Experiment Name: At_Drought_Reproduction_P Parameter: Plant Line Value: WS
  misc_feature: MA Experiment 20001911 PARAMETER Experiment Name: At_Drought_Reproduction_P Parameter: Timepoint (day) Value: 10
  misc_feature: MA Experiment 20001911 PARAMETER Experiment Name: At_Drought_Reproduction_P Parameter: Tissue Value: Flowers
  misc_feature: MA Experiment 20001911 PARAMETER Experiment Name: At_Drought_Reproduction_P Parameter: Treatment Value: Drought vs. No Drought

SEQ ID NO: 32834 - protein, 113 aa, Arabidopsis thaliana; identical to SEQ ID NO: 29244
  peptide (1)..(113): Ceres Seq. ID no. 12397077
  misc_feature (1)..(104): Pfam Name: GDSL-like Lipase/Acylhydrolase Pfam Description: GDSL-like Lipase/Acylhydrolase
  misc_feature (1)..(105): Homolog of NCBI NO: 28393626 NR Description: putative family II extracellular lipase 1 (EXL1)
  misc_feature (1)..(112): Homolog of NCBI NO: 15237528 NR Description: putative protein; protein id: At5g03810.1
  misc_feature (1)..(112): Homolog of NCBI NO: 9758010 NR Description: proline-rich protein APG-like [Arabidopsis
  misc_feature (1)..(112): Homolog of NCBI NO: 30693763 NR Description: GDSL-motif lipase/hydrolase protein [Arabidopsis
  misc_feature (1)..(112): Homolog of NCBI NO: 15237531 NR Description: putative protein; protein id: At5g03820.1
  misc_feature (1)..(112): Homolog of NCBI NO: 15237137 NR Description: GDSL-motif lipase/hydrolase-like protein; protein
  misc_feature (1)..(112): Homolog of NCBI NO: 13174242 NR Description: putative proline-rich protein [Oryza sativa]
  misc_feature (1)..(112): Homolog of NCBI NO: 10638955 NR Description: putative proline-rich protein APG isolog [Cicer
  misc_feature (1)..(113): Homolog of NCBI NO: 15228189 NR Description: putative APG protein
  misc_feature (1)..(113): Homolog of NCBI NO: 2062167 NR Description: Proline-rich protein APG isolog [Arabidopsis

SEQ ID NO: 32835 - protein, 103 aa, Arabidopsis thaliana; identical to SEQ ID NO: 29245
  peptide (1)..(103): Ceres Seq. ID no. 12397078

SEQ ID NO: 32836 - protein, 99 aa, Arabidopsis thaliana; identical to SEQ ID NO: 29246
  peptide (1)..(99): Ceres Seq. ID no. 12397079

SEQ ID NO: 32837 - DNA, 726 bp, Arabidopsis thaliana; identical to SEQ ID NO: 29247
  misc_feature (1)..(726): Ceres Seq. ID no. 12372146
  misc_feature: MA Experiment ID: 108462 Result: Down-regulated in Transcription
  misc_feature: MA Experiment 108462 PARAMETER Experiment Name: At_Germinating_Seeds_cDNA_P Parameter: Age (day) Value: 2 vs. 0
  misc_feature: MA Experiment 108462 PARAMETER Experiment Name: At_Germinating_Seeds_cDNA_P Parameter: Tissue Value: Germinating Seeds
  misc_feature: MA Experiment ID: 108463 Result: Down-regulated in Transcription
  misc_feature: MA Experiment 108463 PARAMETER Experiment Name: At_Germinating_Seeds_cDNA_P Parameter: Age (day) Value: 3 vs. 0
  misc_feature: MA Experiment 108463 PARAMETER Experiment Name: At_Germinating_Seeds_cDNA_P Parameter: Tissue Value: Germinating Seeds
  misc_feature: MA Experiment ID: 108464 Result: Down-regulated in Transcription
  misc_feature: MA Experiment 108464 PARAMETER Experiment Name: At_Germinating_Seeds_cDNA_P Parameter: Age (day) Value: 4 vs. 0
  misc_feature: MA Experiment 108464 PARAMETER Experiment Name: At_Germinating_Seeds_cDNA_P Parameter: Tissue Value: Germinating Seeds
  misc_feature: MA Experiment ID: 108605 Result: Down-regulated in Transcription
  misc_feature: MA Experiment 108605 PARAMETER Experiment Name: At_100uM_ABA_cDNA_P Parameter: Timepoint (hr) Value: 6
  misc_feature: MA Experiment 108605 PARAMETER Experiment Name: At_100uM_ABA_cDNA_P Parameter: Tissue Value: Aerial
  misc_feature: MA Experiment 108605 PARAMETER Experiment Name: At_100uM_ABA_cDNA_P Parameter: Treatment Value: 100uM ABA vs. No Treatment
  misc_feature: MA Experiment ID: 108607 Result: Down-regulated in Transcription
  misc_feature: MA Experiment 108607 PARAMETER Experiment Name: At_100uM_ABA_cDNA_P Parameter: Timepoint (hr) Value: 4
  misc_feature: MA Experiment 108607 PARAMETER Experiment Name: At_100uM_ABA_cDNA_P Parameter: Tissue Value: Aerial
  misc_feature: MA Experiment 108607 PARAMETER Experiment Name: At_100uM_ABA_cDNA_P Parameter: Treatment Value: 100uM ABA vs. No Treatment
  misc_feature: MA Experiment ID: 108609 Result: Down-regulated in Transcription
  misc_feature: MA Experiment 108609 PARAMETER Experiment Name: At_100uM_ABA_cDNA_P Parameter: Timepoint (hr) Value: 24
  misc_feature: MA Experiment 108609 PARAMETER Experiment Name: At_100uM_ABA_cDNA_P Parameter: Tissue Value: Aerial
  misc_feature: MA Experiment 108609 PARAMETER Experiment Name: At_100uM_ABA_cDNA_P Parameter: Treatment Value: 100uM ABA vs. No Treatment
  misc_feature: MA Experiment ID: 20000069 Result: Up-regulated in Transcription
  misc_feature: MA Experiment 20000069 PARAMETER Experiment Name: At_100uM_ABA_Mutants_cDNA_P Parameter: Plant Line Value: CS23
  misc_feature: MA Experiment 20000069 PARAMETER Experiment Name: At_100uM_ABA_Mutants_cDNA_P Parameter: Timepoint (hr) Value: 6
  misc_feature: MA Experiment 20000069 PARAMETER Experiment Name: At_100uM_ABA_Mutants_cDNA_P Parameter: Tissue Value: Aerial
  misc_feature: MA Experiment 20000069 PARAMETER Experiment Name: At_100uM_ABA_Mutants_cDNA_P Parameter: Treatment Value: 100uM ABA vs. No Treatment
  misc_feature: MA Experiment ID: 20000070 Result: Up-regulated in Transcription
  misc_feature: MA Experiment 20000070 PARAMETER Experiment Name: At_100uM_ABA_Mutants_cDNA_P Parameter: Plant Line Value: CS24
  misc_feature: MA Experiment 20000070 PARAMETER Experiment Name: At_100uM_ABA_Mutants_cDNA_P Parameter: Timepoint (hr) Value: 6
  misc_feature: MA Experiment 20000070 PARAMETER Experiment Name: At_100uM_ABA_Mutants_cDNA_P Parameter: Tissue Value: Aerial
  misc_feature: MA Experiment 20000070 PARAMETER Experiment Name: At_100uM_ABA_Mutants_cDNA_P Parameter: Treatment Value: 100uM ABA vs. No Treatment
  misc_feature: MA Experiment ID: 20000072 Result: Up-regulated in Transcription
  misc_feature: MA Experiment 20000072 PARAMETER Experiment Name: At_100uM_ABA_Mutants_cDNA_P Parameter: Plant Line Value: CS8105
  misc_feature: MA Experiment 20000072 PARAMETER Experiment Name: At_100uM_ABA_Mutants_cDNA_P Parameter: Timepoint (hr) Value: 6
  misc_feature: MA Experiment 20000072 PARAMETER Experiment Name: At_100uM_ABA_Mutants_cDNA_P Parameter: Tissue Value: Aerial
  misc_feature: MA Experiment 20000072 PARAMETER Experiment Name: At_100uM_ABA_Mutants_cDNA_P Parameter: Treatment Value: 100uM ABA vs. No Treatment
  misc_feature: MA Experiment ID: 20000086 Result: Up-regulated in Transcription
  misc_feature: MA Experiment 20000086 PARAMETER Experiment Name: At_100uM_ABA_Mutants_cDNA_P Parameter: Plant Line Value: CS22
  misc_feature: MA Experiment 20000086 PARAMETER Experiment Name: At_100uM_ABA_Mutants_cDNA_P Parameter: Timepoint (hr) Value: 6
  misc_feature: MA Experiment 20000086 PARAMETER Experiment Name: At_100uM_ABA_Mutants_cDNA_P Parameter: Tissue Value: Aerial
  misc_feature: MA Experiment 20000086 PARAMETER Experiment Name: At_100uM_ABA_Mutants_cDNA_P Parameter: Treatment Value: 100uM ABA vs. No Treatment
  misc_feature: MA Experiment ID: 20000087 Result: Up-regulated in Transcription
  misc_feature: MA Experiment 20000087 PARAMETER Experiment Name: At_100uM_ABA_Mutants_cDNA_P Parameter: Plant Line Value: WS
  misc_feature: MA Experiment 20000087 PARAMETER Experiment Name: At_100uM_ABA_Mutants_cDNA_P Parameter: Timepoint (hr) Value: 6
  misc_feature: MA Experiment 20000087 PARAMETER Experiment Name: At_100uM_ABA_Mutants_cDNA_P Parameter: Tissue Value: Aerial
  misc_feature: MA Experiment 20000087 PARAMETER Experiment Name: At_100uM_ABA_Mutants_cDNA_P Parameter: Treatment Value: 100uM ABA vs. No Treatment
  misc_feature: MA Experiment ID: 20000088 Result: Up-regulated in Transcription
  misc_feature: MA Experiment 20000088 PARAMETER Experiment Name: At_100uM_ABA_Mutants_cDNA_P Parameter: Plant Line Value: Landsberg
  misc_feature: MA Experiment 20000088 PARAMETER Experiment Name: At_100uM_ABA_Mutants_cDNA_P Parameter: Timepoint (hr) Value: 6
  misc_feature: MA Experiment 20000088 PARAMETER Experiment Name: At_100uM_ABA_Mutants_cDNA_P Parameter: Tissue Value: Aerial
  misc_feature: MA Experiment 20000088 PARAMETER Experiment Name: At_100uM_ABA_Mutants_cDNA_P Parameter: Treatment Value: 100uM ABA vs. No Treatment
  misc_feature: MA Experiment ID: 20000089 Result: Up-regulated in Transcription
  misc_feature: MA Experiment ID: 20000090 Result: Up-regulated in Transcription
  misc_feature: MA Experiment ID: 20000111 Result: Down-regulated in Transcription
  misc_feature: MA Experiment 20000111 PARAMETER Experiment Name: At_42deg_Heat_cDNA_P Parameter: Temperature (deg C) Value: 42 vs. 22
  misc_feature: MA Experiment 20000111 PARAMETER Experiment Name: At_42deg_Heat_cDNA_P Parameter: Timepoint (hr) Value: 6
  misc_feature: MA Experiment 20000111 PARAMETER Experiment Name: At_42deg_Heat_cDNA_P Parameter: Tissue Value: Aerial
  misc_feature: MA Experiment ID: 20000112 Result: Down-regulated in Transcription
  misc_feature: MA Experiment 20000112 PARAMETER Experiment Name: At_42deg_Heat_cDNA_P Parameter: Temperature (deg C) Value: 42 vs. 22
  misc_feature: MA Experiment 20000112 PARAMETER Experiment Name: At_42deg_Heat_cDNA_P Parameter: Timepoint (hr) Value: 2
  misc_feature: MA Experiment 20000112 PARAMETER Experiment Name: At_42deg_Heat_cDNA_P Parameter: Tissue Value: Aerial
  misc_feature: MA Experiment ID: 20000117 Result: Up-regulated in Transcription
  misc_feature: MA Experiment 20000117 PARAMETER Experiment Name: At_100uM_ABA_Mutants_cDNA_P Parameter: Plant Line Value: Columbia
  misc_feature: MA Experiment 20000117 PARAMETER Experiment Name: At_100uM_ABA_Mutants_cDNA_P Parameter: Timepoint (hr) Value: 6
  misc_feature: MA Experiment 20000117 PARAMETER Experiment Name: At_100uM_ABA_Mutants_cDNA_P Parameter: Tissue Value: Aerial
  misc_feature: MA Experiment 20000117 PARAMETER Experiment Name: At_100uM_ABA_Mutants_cDNA_P Parameter: Treatment Value: 100uM ABA vs. No Treatment
  misc_feature: MA Experiment ID: 20000173 Result: Down-regulated in Transcription
  misc_feature: MA Experiment 20000173 PARAMETER Experiment Name: At_42deg_Heat_P Parameter: Age (day) Value: 14
  misc_feature: MA Experiment 20000173 PARAMETER Experiment Name: At_42deg_Heat_P Parameter: Organism Value: A. thaliana
  misc_feature: MA Experiment 20000173 PARAMETER Experiment Name: At_42deg_Heat_P Parameter: Plant Line Value: WS
  misc_feature: MA Experiment 20000173 PARAMETER Experiment Name: At_42deg_Heat_P Parameter: Temperature (deg C) Value: 42 vs. 22
  misc_feature: MA Experiment 20000173 PARAMETER Experiment Name: At_42deg_Heat_P Parameter: Timepoint (hr) Value: 6
  misc_feature: MA Experiment 20000173 PARAMETER Experiment Name: At_42deg_Heat_P Parameter: Tissue Value: Aerial
  misc_feature: MA Experiment ID: 20000213 Result: Up-regulated in Transcription
  misc_feature: MA Experiment 20000213 PARAMETER Experiment Name: At_4deg_Cold_P Parameter: Timepoint (hr) Value: 2
  misc_feature: MA Experiment ID: 20000453 Result: Down-regulated in Transcription
  misc_feature: MA Experiment 20000453 PARAMETER Experiment Name: At_100uM_ABA_P Parameter: Age (day) Value: 15
  misc_feature: MA Experiment 20000453 PARAMETER Experiment Name: At_100uM_ABA_P Parameter: Organism Value: A. thaliana
  misc_feature: MA Experiment 20000453 PARAMETER Experiment Name: At_100uM_ABA_P Parameter: Plant Line Value: WS
  misc_feature: MA Experiment 20000453 PARAMETER Experiment Name: At_100uM_ABA_P Parameter: Timepoint (hr) Value: 24
  misc_feature: MA Experiment 20000453 PARAMETER Experiment Name: At_100uM_ABA_P Parameter: Tissue Value: Aerial
  misc_feature: MA Experiment 20000453 PARAMETER Experiment Name: At_100uM_ABA_P Parameter: Treatment Value: 100uM ABA vs. No Treatment
  misc_feature: MA Experiment ID: 20001247 Result: Down-regulated in Transcription
  misc_feature: MA Experiment 20001247 PARAMETER Experiment Name: At_Far-red-induction_P Parameter: Age (day) Value: 7
  misc_feature: MA Experiment 20001247 PARAMETER Experiment Name: At_Far-red-induction_P Parameter: Light Value: Far-red vs. White
  misc_feature: MA Experiment 20001247 PARAMETER Experiment Name: At_Far-red-induction_P Parameter: Organism Value: A. thaliana
  misc_feature: MA Experiment 20001247 PARAMETER Experiment Name: At_Far-red-induction_P Parameter: Plant Line Value: Columbia
  misc_feature: MA Experiment 20001247 PARAMETER Experiment Name: At_Far-red-induction_P Parameter: Timepoint (hr) Value: 1
  misc_feature: MA Experiment 20001247 PARAMETER Experiment Name: At_Far-red-induction_P Parameter: Tissue Value: Whole Plant
  misc_feature: MA Experiment ID: 20001248 Result: Up-regulated in Transcription
  misc_feature: MA Experiment 20001248 PARAMETER Experiment Name: At_Far-red-induction_P Parameter: Age (day) Value: 7
  misc_feature: MA Experiment 20001248 PARAMETER Experiment Name: At_Far-red-induction_P Parameter: Light Value: Far-red vs. White
  misc_feature: MA Experiment 20001248 PARAMETER Experiment Name: At_Far-red-induction_P Parameter: Organism Value: A. thaliana
  misc_feature: MA Experiment 20001248 PARAMETER Experiment Name: At_Far-red-induction_P Parameter: Plant Line Value: Columbia
  misc_feature: MA Experiment 20001248 PARAMETER Experiment Name: At_Far-red-induction_P Parameter: Timepoint (hr) Value: 4
  misc_feature: MA Experiment 20001248 PARAMETER Experiment Name: At_Far-red-induction_P Parameter: Tissue Value: Whole Plant
  misc_feature: MA Experiment ID: 20001557 Result: Up-regulated in Transcription
  misc_feature: MA Experiment 20001557 PARAMETER Experiment Name: At_Drought_Soil_Dry_P Parameter: Age (day) Value: 27
  misc_feature: MA Experiment 20001557 PARAMETER Experiment Name: At_Drought_Soil_Dry_P Parameter: Organism Value: A. thaliana
  misc_feature: MA Experiment 20001557 PARAMETER Experiment Name: At_Drought_Soil_Dry_P Parameter: Plant Line Value: WS
  misc_feature: MA Experiment 20001557 PARAMETER Experiment Name: At_Drought_Soil_Dry_P Parameter: Post Timepoint (hr) Value: 3
  misc_feature: MA Experiment 20001557 PARAMETER Experiment Name: At_Drought_Soil_Dry_P Parameter: Post-Treatment Value: Re-Water vs. No Drought
  misc_feature: MA Experiment 20001557 PARAMETER Experiment Name: At_Drought_Soil_Dry_P Parameter: Timepoint (day) Value: 13
  misc_feature: MA Experiment 20001557 PARAMETER Experiment Name: At_Drought_Soil_Dry_P Parameter: Treatment Value: Drought vs. No Drought

SEQ ID NO: 32838 - protein, 169 aa, Arabidopsis thaliana; identical to SEQ ID NO: 22059
  peptide (1)..(169): Ceres Seq. ID no. 12372147
  misc_feature (8)..(79): Pfam Name: RNA recognition motif. (a.k.a. RRM, RBD, or RNP domain) Pfam Description: RNA recognition motif. (a.k.a. RRM, RBD, or RNP
  misc_feature (3)..(169): Homolog of NCBI NO: 30681492 NR Description: glycine-rich RNA-binding protein (AtGRP7)
  misc_feature (2)..(168): Homolog of NCBI NO: 34851124 NR Description: putative glycine-rich RNA-binding protein [Prunus
  misc_feature (1)..(161): Homolog of NCBI NO: 544426 NR Description: Glycine-rich RNA-binding protein
  misc_feature (1)..(124): Homolog of NCBI NO: 30692254 NR Description: glycine-rich RNA-binding protein 8 (GRP8) (CCR1)
  misc_feature (3)..(169): Homolog of NCBI NO: 1346180 NR Description: Glycine-rich RNA-binding protein GRP1A
  misc_feature (3)..(169): Homolog of NCBI NO: 21553354 NR Description: glycine-rich RNA binding protein 7 [Arabidopsis
  misc_feature (3)..(169): Homolog of NCBI NO: 1346181 NR Description: Glycine-rich RNA-binding protein GRP2A
  misc_feature (1)..(169): Homolog of NCBI NO: 544416 NR Description: Glycine-rich RNA-binding protein 10
  misc_feature (3)..(169): Homolog of NCBI NO: 15226605 NR Description: glycine-rich RNA binding protein AtGRP7
  misc_feature (1)..(169): Homolog of NCBI NO: 15235002 NR Description: glycine-rich RNA-binding protein 8 (GRP8)

SEQ ID NO: 32839 - protein, 110 aa, Arabidopsis thaliana; identical to SEQ ID NO: 22060
  peptide (1)..(110): Ceres Seq. ID no. 12372148
  misc_feature (30)..(109): Pfam Name: Herpesvirus large structural phosphoprotein UL32 Pfam Description: Herpesvirus large structural phosphoprotein UL32
  misc_feature (1)..(110): Homolog of NCBI NO: 30681492 NR Description: glycine-rich RNA-binding protein (AtGRP7)
  misc_feature (1)..(109): Homolog of NCBI NO: 34851124 NR Description: putative glycine-rich RNA-binding protein [Prunus
  misc_feature (1)..(102): Homolog of NCBI NO: 544426 NR Description: Glycine-rich RNA-binding protein
  misc_feature (1)..(65): Homolog of NCBI NO: 30692254 NR Description: glycine-rich RNA-binding protein 8 (GRP8) (CCR1)
  misc_feature (1)..(110): Homolog of NCBI NO: 1346180 NR Description: Glycine-rich RNA-binding protein GRP1A
  misc_feature (1)..(110): Homolog of NCBI NO: 21553354 NR Description: glycine-rich RNA binding protein 7 [Arabidopsis
  misc_feature (1)..(110): Homolog of NCBI NO: 1346181 NR Description: Glycine-rich RNA-binding protein GRP2A
  misc_feature (1)..(110): Homolog of NCBI NO: 544416 NR Description: Glycine-rich RNA-binding protein 10
  misc_feature (1)..(110): Homolog of NCBI NO: 15226605 NR Description: glycine-rich RNA binding protein AtGRP7
  misc_feature (1)..(110): Homolog of NCBI NO: 15235002 NR Description: glycine-rich RNA-binding protein 8 (GRP8)

SEQ ID NO: 32840 - protein, 103 aa, Arabidopsis thaliana; identical to SEQ ID NO: 22061
  peptide (1)..(103): Ceres Seq. ID no. 12372149
  misc_feature (23)..(102): Pfam Name: Herpesvirus large structural phosphoprotein UL32 Pfam Description: Herpesvirus large structural phosphoprotein UL32
  misc_feature (1)..(103): Homolog of NCBI NO: 30681492 NR Description: glycine-rich RNA-binding protein (AtGRP7)
  misc_feature (1)..(102): Homolog of NCBI NO: 34851124 NR Description: putative glycine-rich RNA-binding protein [Prunus
  misc_feature (1)..(95): Homolog of NCBI NO: 544426 NR Description: Glycine-rich RNA-binding protein
  misc_feature (1)..(58): Homolog of NCBI NO: 30692254 NR Description: glycine-rich RNA-binding protein 8 (GRP8) (CCR1)
  misc_feature (1)..(103): Homolog of NCBI NO: 1346180 NR Description: Glycine-rich RNA-binding protein GRP1A
  misc_feature (1)..(103): Homolog of NCBI NO: 21553354 NR Description: glycine-rich RNA binding protein 7 [Arabidopsis
  misc_feature (1)..(103): Homolog of NCBI NO: 1346181 NR Description: Glycine-rich RNA-binding protein GRP2A
  misc_feature (1)..(103): Homolog of NCBI NO: 544416 NR Description: Glycine-rich RNA-binding protein 10
  misc_feature (1)..(103): Homolog of NCBI NO: 15226605 NR Description: glycine-rich RNA binding protein AtGRP7
  misc_feature (1)..(103): Homolog of NCBI NO: 15235002 NR Description: glycine-rich RNA-binding protein 8 (GRP8)

SEQ ID NO: 32841 - DNA, 671 bp, Arabidopsis thaliana; identical to SEQ ID NO: 29251
  misc_feature (1)..(671): Ceres Seq. ID no. 12561505
  misc_feature: MA Experiment ID: 20000113 Result: Up-regulated in Transcription
  misc_feature: MA Experiment 20000113 PARAMETER Experiment Name: At_42deg_Heat_cDNA_P Parameter: Temperature (deg C) Value: 42 vs. 22
  misc_feature: MA Experiment 20000113 PARAMETER Experiment Name: At_42deg_Heat_cDNA_P Parameter: Timepoint (hr) Value: 8
  misc_feature: MA Experiment 20000113 PARAMETER Experiment Name: At_42deg_Heat_cDNA_P Parameter: Tissue Value: Aerial
  misc_feature: MA Experiment ID: 20000185 Result: Down-regulated in Transcription
  misc_feature: MA Experiment 20000185 PARAMETER Experiment Name: At_Roots__P Parameter: Age (day) Value: 7 vs. 21
  misc_feature: MA Experiment 20000185 PARAMETER Experiment Name: At_Roots__P Parameter: Organism Value: A. thaliana
  misc_feature: MA Experiment 20000185 PARAMETER Experiment Name: At_Roots__P Parameter: Tissue Value: Roots vs. Whole Plant
  misc_feature: MA Experiment ID: 20000234 Result: Down-regulated in Transcription
  misc_feature: MA Experiment 20000234 PARAMETER Experiment Name: At_Siliques_P Parameter: Age (day) Value: 21
  misc_feature: MA Experiment 20000234 PARAMETER Experiment Name: At_Siliques_P Parameter: Organism Value: A. thaliana
  misc_feature: MA Experiment 20000234 PARAMETER Experiment Name: At_Siliques_P Parameter: Plant Line Value: WS
  misc_feature: MA Experiment 20000234 PARAMETER Experiment Name: At_Siliques_P Parameter: Tissue Value: Less Than 5mm Siliques vs. Whole Plant
  misc_feature: MA Experiment ID: 20000235 Result: Down-regulated in Transcription
  misc_feature: MA Experiment 20000235 PARAMETER Experiment Name: At_Siliques_P Parameter: Age (day) Value: 21
  misc_feature: MA Experiment 20000235 PARAMETER Experiment Name: At_Siliques_P Parameter: Organism Value: A. thaliana
  misc_feature: MA Experiment 20000235 PARAMETER Experiment Name: At_Siliques_P Parameter: Plant Line Value: WS
  misc_feature: MA Experiment 20000235 PARAMETER Experiment Name: At_Siliques_P Parameter: Tissue Value: 5-10mm Siliques vs. Whole Plant
  misc_feature: MA Experiment ID: 20000264 Result: Down-regulated in Transcription
  misc_feature: MA Experiment 20000264 PARAMETER Experiment Name: At_Open_Flower_P Parameter: Age (day) Value: 21
  misc_feature: MA Experiment 20000264 PARAMETER Experiment Name: At_Open_Flower_P Parameter: Plant Line Value: WS
  misc_feature: MA Experiment 20000264 PARAMETER Experiment Name: At_Open_Flower_P Parameter: Tissue Value: Open Flower vs. Whole Plant
  misc_feature: MA Experiment ID: 20000265 Result: Down-regulated in Transcription
  misc_feature: MA Experiment 20000265 PARAMETER Experiment Name: At_Open_Flower_P Parameter: Age (day) Value: 21
  misc_feature: MA Experiment 20000265 PARAMETER Experiment Name: At_Open_Flower_P Parameter: Plant Line Value: WS
  misc_feature: MA Experiment 20000265 PARAMETER Experiment Name: At_Open_Flower_P Parameter: Tissue Value: Closed Flower vs. Whole Plant
  misc_feature: MA Experiment ID: 20000286 Result: Down-regulated in Transcription
  misc_feature: MA Experiment 20000286 PARAMETER Experiment Name: At_Open_Flower_P Parameter: Age (day) Value: 21
  misc_feature: MA Experiment 20000286 PARAMETER Experiment Name: At_Open_Flower_P Parameter: Plant Line Value: WS
  misc_feature: MA Experiment 20000286 PARAMETER Experiment Name: At_Open_Flower_P Parameter: Tissue Value: Half Open vs. Whole Plant
  misc_feature: MA Experiment ID: 20000439 Result: Down-regulated in Transcription
  misc_feature: MA Experiment 20000439 PARAMETER Experiment Name: At_Roots__P Parameter: Age (day) Value: 14 vs. 21
  misc_feature: MA Experiment 20000439 PARAMETER Experiment Name: At_Roots__P Parameter: Organism Value: A. thaliana
  misc_feature: MA Experiment 20000439 PARAMETER Experiment Name: At_Roots__P Parameter: Tissue Value: Roots vs. Whole Plant
  misc_feature: MA Experiment ID: 20001451 Result: Up-regulated in Transcription
  misc_feature: MA Experiment 20001451 PARAMETER Experiment Name: At_Far-red-induction_P Parameter: Age (day) Value: 7
  misc_feature: MA Experiment 20001451 PARAMETER Experiment Name: At_Far-red-induction_P Parameter: Light Value: Far-red vs. White
  misc_feature: MA Experiment 20001451 PARAMETER Experiment Name: At_Far-red-induction_P Parameter: Organism Value: A. thaliana
  misc_feature: MA Experiment 20001451 PARAMETER Experiment Name: At_Far-red-induction_P Parameter: Plant Line Value: Columbia
  misc_feature: MA Experiment 20001451 PARAMETER Experiment Name: At_Far-red-induction_P Parameter: Timepoint (hr) Value: 24
  misc_feature: MA Experiment 20001451 PARAMETER Experiment Name: At_Far-red-induction_P Parameter: Tissue Value: Whole Plant
  misc_feature: MA Experiment ID: 20001911 Result: Up-regulated in Transcription
  misc_feature: MA Experiment 20001911 PARAMETER Experiment Name: At_Drought_Reproduction_P Parameter: Age (day) Value: 40
  misc_feature: MA Experiment 20001911 PARAMETER Experiment Name: At_Drought_Reproduction_P Parameter: Organism Value: A. thaliana
  misc_feature: MA Experiment 20001911 PARAMETER Experiment Name: At_Drought_Reproduction_P Parameter: Plant Line Value: WS
  misc_feature: MA Experiment 20001911 PARAMETER Experiment Name: At_Drought_Reproduction_P Parameter: Timepoint (day) Value: 10
  misc_feature: MA Experiment 20001911 PARAMETER Experiment Name: At_Drought_Reproduction_P Parameter: Tissue Value: Flowers
  misc_feature: MA Experiment 20001911 PARAMETER Experiment Name: At_Drought_Reproduction_P Parameter: Treatment Value: Drought vs. No Drought

SEQ ID NO: 32842 - protein, 166 aa, Arabidopsis thaliana; identical to SEQ ID NO: 29252
  peptide (1)..(166): Ceres Seq. ID no. 12561506
  misc_feature (26)..(159): Homolog of NCBI NO: 25372889 NR Description: protein F26G16.9 [imported] - Arabidopsis
  misc_feature (13)..(166): Homolog of NCBI NO: 18405726 NR Description: expressed protein

SEQ ID NO: 32843 - protein, 154 aa, Arabidopsis thaliana; identical to SEQ ID NO: 29253
  peptide (1)..(154): Ceres Seq. ID no. 12561507
  misc_feature (14)..(147): Homolog of NCBI NO: 25372889 NR Description: protein F26G16.9 [imported] - Arabidopsis
  misc_feature (1)..(154): Homolog of NCBI NO: 18405726 NR Description: expressed protein

SEQ ID NO: 32844 - protein, 152 aa, Arabidopsis thaliana; identical to SEQ ID NO: 29254
  peptide (1)..(152): Ceres Seq. ID no. 12561508
  misc_feature (12)..(145): Homolog of NCBI NO: 25372889 NR Description: protein F26G16.9 [imported] - Arabidopsis
  misc_feature (1)..(152): Homolog of NCBI NO: 18405726 NR Description: expressed protein

SEQ ID NO: 32845 - DNA, 2743 bp, Arabidopsis thaliana; identical to SEQ ID NO: 29255
  misc_feature (1)..(2743): Ceres Seq. ID no. 13494317
  misc_feature: MA Experiment ID: 108434 Result: Down-regulated in Transcription
  misc_feature: MA Experiment 108434 PARAMETER Experiment Name: At_Root_Tips_cDNA_P Parameter: Tissue Value: Root Tips
  misc_feature: MA Experiment ID: 108501 Result: Up-regulated in Transcription
  misc_feature: MA Experiment 108501 PARAMETER Experiment Name: At_ap2_floral_buds_cDNA_P Parameter: Plant Line Value: ap2 (Ler.)
  misc_feature: MA Experiment 108501 PARAMETER Experiment Name: At_ap2_floral_buds_cDNA_P Parameter: Tissue Value: Closed Flower
  misc_feature: MA Experiment ID: 108579 Result: Up-regulated in Transcription
  misc_feature: MA Experiment 108579 PARAMETER Experiment Name: At_4deg_Cold_cDNA_P Parameter: Temperature (deg C) Value: 4 vs. 22
  misc_feature: MA Experiment 108579 PARAMETER Experiment Name: At_4deg_Cold_cDNA_P Parameter: Timepoint (hr) Value: 6
  misc_feature: MA Experiment 108579 PARAMETER Experiment Name: At_4deg_Cold_cDNA_P Parameter: Tissue Value: Aerial
  misc_feature: MA Experiment ID: 108585 Result: Up-regulated in Transcription
  misc_feature: MA Experiment 108585 PARAMETER Experiment Name: At_5mM_NaNP_cDNA_P Parameter: Timepoint (hr) Value: 6
  misc_feature: MA Experiment 108585 PARAMETER Experiment Name: At_5mM_NaNP_cDNA_P Parameter: Tissue Value: Aerial
  misc_feature: MA Experiment 108585 PARAMETER Experiment Name: At_5mM_NaNP_cDNA_P Parameter: Treatment Value: null
  misc_feature: MA Experiment ID: 108668 Result: Up-regulated in Transcription
  misc_feature: MA Experiment 108668 PARAMETER Experiment Name: At_2mM_SA_cDNA_P Parameter: Plant Line Value: WS
  misc_feature: MA Experiment 108668 PARAMETER Experiment Name: At_2mM_SA_cDNA_P Parameter: Timepoint (hr) Value: 6
  misc_feature: MA Experiment 108668 PARAMETER Experiment Name: At_2mM_SA_cDNA_P Parameter: Treatment Value: 2mM SA vs. No Treatment
  misc_feature: MA Experiment ID: 20000030 Result: Down-regulated in Transcription
  misc_feature: MA Experiment 20000030 PARAMETER Experiment Name: At_CS6630_Roots_cDNA_P Parameter: Plant Line Value: CS6630 vs. WS
  misc_feature: MA Experiment 20000030 PARAMETER Experiment Name: At_CS6630_Roots_cDNA_P Parameter: Tissue Value: Roots
  misc_feature: MA Experiment ID: 20000069 Result: Up-regulated in Transcription
  misc_feature: MA Experiment 20000069 PARAMETER Experiment Name: At_100uM_ABA_Mutants_cDNA_P Parameter: Plant Line Value: CS23
  misc_feature: MA Experiment 20000069 PARAMETER Experiment Name: At_100uM_ABA_Mutants_cDNA_P Parameter: Timepoint (hr) Value: 6
  misc_feature: MA Experiment 20000069 PARAMETER Experiment Name: At_100uM_ABA_Mutants_cDNA_P Parameter: Tissue Value: Aerial
  misc_feature: MA Experiment 20000069 PARAMETER Experiment Name: At_100uM_ABA_Mutants_cDNA_P Parameter: Treatment Value: 100uM ABA vs. No Treatment
  misc_feature: MA Experiment ID: 20000113 Result: Down-regulated in Transcription
  misc_feature: MA Experiment 20000113 PARAMETER Experiment Name: At_42deg_Heat_cDNA_P Parameter: Temperature (deg C) Value: 42 vs. 22
  misc_feature: MA Experiment 20000113 PARAMETER Experiment Name: At_42deg_Heat_cDNA_P Parameter: Timepoint (hr) Value: 8
  misc_feature: MA Experiment 20000113 PARAMETER Experiment Name: At_42deg_Heat_cDNA_P Parameter: Tissue Value: Aerial

SEQ ID NO: 32846 - protein, 805 aa, Arabidopsis thaliana; identical to SEQ ID NO: 29256
  peptide (1)..(805): Ceres Seq. ID no. 13494318
  misc_feature (66)..(176): Pfam Name: D-mannose binding lectin Pfam Description: D-mannose binding lectin
  misc_feature (148)..(211): Homolog of NCBI NO: 30696575 NR Description: S-locus protein kinase, putative [Arabidopsis
  misc_feature (680)..(805): Homolog of NCBI NO: 30696575 NR Description: S-locus protein kinase, putative [Arabidopsis
  misc_feature (241)..(677): Homolog of NCBI NO: 30696575 NR Description: S-locus protein kinase, putative [Arabidopsis
  misc_feature (1)..(805): Homolog of NCBI NO: 15219914 NR Description: receptor protein kinase (IRK1) -related
  misc_feature (1)..(805): Homolog of NCBI NO: 30682149 NR Description: S-locus protein kinase, putative [Arabidopsis
  misc_feature (1)..(805): Homolog of NCBI NO: 18391259 NR Description: S-locus protein kinase, putative [Arabidopsis
  misc_feature (1)..(805): Homolog of NCBI NO: 15810423 NR Description: putative serine/threonine kinase [Arabidopsis
  misc_feature (1)..(805): Homolog of NCBI NO: 24417324 NR Description: unknown [Arabidopsis thaliana]
  misc_feature (1)..(805): Homolog of NCBI NO: 30682152 NR Description: S-locus protein kinase, putative [Arabidopsis
  misc_feature (3)..(800): Homolog of NCBI NO: 15219912 NR Description: S-locus protein kinase family [Arabidopsis

SEQ ID NO: 32847 - protein, 803 aa, Arabidopsis thaliana; identical to SEQ ID NO: 29257
  peptide (1)..(803): Ceres Seq. ID no. 13494319
  misc_feature (64)..(174): Pfam Name: D-mannose binding lectin Pfam Description: D-mannose binding lectin
  misc_feature (146)..(209): Homolog of NCBI NO: 30696575 NR Description: S-locus protein kinase, putative [Arabidopsis
  misc_feature (678)..(803): Homolog of NCBI NO: 30696575 NR Description: S-locus protein kinase, putative [Arabidopsis
  misc_feature (239)..(675): Homolog of NCBI NO: 30696575 NR Description: S-locus protein kinase, putative [Arabidopsis
  misc_feature (1)..(803): Homolog of NCBI NO: 15219914 NR Description: receptor protein kinase (IRK1) -related
  misc_feature (1)..(803): Homolog of NCBI NO: 30682149 NR Description: S-locus protein kinase, putative [Arabidopsis
  misc_feature (1)..(803): Homolog of NCBI NO: 18391259 NR Description: S-locus protein kinase, putative [Arabidopsis
  misc_feature (1)..(803): Homolog of NCBI NO: 15810423 NR Description: putative serine/threonine kinase [Arabidopsis
  misc_feature (1)..(803): Homolog of NCBI NO: 24417324 NR Description: unknown [Arabidopsis thaliana]
  misc_feature (1)..(803): Homolog of NCBI NO: 30682152 NR Description: S-locus protein kinase, putative [Arabidopsis
  misc_feature (1)..(798): Homolog of NCBI NO: 15219912 NR Description: S-locus protein kinase family [Arabidopsis

SEQ ID NO: 32848 - protein, 658 aa, Arabidopsis thaliana; identical to SEQ ID NO: 29258
  peptide (1)..(658): Ceres Seq. ID no. 13494320
  misc_feature (1)..(64): Homolog of NCBI NO: 30696575 NR Description: S-locus protein kinase, putative [Arabidopsis
  misc_feature (533)..(658): Homolog of NCBI NO: 30696575 NR Description: S-locus protein kinase, putative [Arabidopsis
  misc_feature (94)..(530): Homolog of NCBI NO: 30696575 NR Description: S-locus protein kinase, putative [Arabidopsis
  misc_feature (1)..(658): Homolog of NCBI NO: 15219914 NR Description: receptor protein kinase (IRK1) -related
  misc_feature (1)..(658): Homolog of NCBI NO: 30682149 NR Description: S-locus protein kinase, putative [Arabidopsis
  misc_feature (1)..(658): Homolog of NCBI NO: 18391259 NR Description: S-locus protein kinase, putative [Arabidopsis
  misc_feature (1)..(658): Homolog of NCBI NO: 15810423 NR Description: putative serine/threonine kinase [Arabidopsis
  misc_feature (1)..(658): Homolog of NCBI NO: 24417324 NR Description: unknown [Arabidopsis thaliana]
  misc_feature (1)..(658): Homolog of NCBI NO: 30682152 NR Description: S-locus protein kinase, putative [Arabidopsis
  misc_feature (1)..(653): Homolog of NCBI NO: 15219912 NR Description: S-locus protein kinase family [Arabidopsis

SEQ ID NO: 32849 - DNA, 1187 bp, Arabidopsis thaliana; identical to SEQ ID NO: 29259
  misc_feature (1)..(1187): Ceres Seq. ID no. 13500226
  misc_feature: MA Experiment ID: 108434 Result: Up-regulated in Transcription
  misc_feature: MA Experiment 108434 PARAMETER Experiment Name: At_Root_Tips_cDNA_P Parameter: Tissue Value: Root Tips
  misc_feature: MA Experiment ID: 108462 Result: Down-regulated in Transcription
  misc_feature: MA Experiment 108462 PARAMETER Experiment Name: At_Germinating_Seeds_cDNA_P Parameter: Age (day) Value: 2 vs. 0
  misc_feature: MA Experiment 108462 PARAMETER Experiment Name: At_Germinating_Seeds_cDNA_P Parameter: Tissue Value: Germinating Seeds
  misc_feature: MA Experiment ID: 108463 Result: Down-regulated in Transcription
  misc_feature: MA Experiment 108463 PARAMETER Experiment Name: At_Germinating_Seeds_cDNA_P Parameter: Age (day) Value: 3 vs. 0
  misc_feature: MA Experiment 108463 PARAMETER Experiment Name: At_Germinating_Seeds_cDNA_P Parameter: Tissue Value: Germinating Seeds
  misc_feature: MA Experiment ID: 108464 Result: Down-regulated in Transcription
  misc_feature: MA Experiment 108464 PARAMETER Experiment Name: At_Germinating_Seeds_cDNA_P Parameter: Age (day) Value: 4 vs. 0
  misc_feature: MA Experiment 108464 PARAMETER Experiment Name: At_Germinating_Seeds_cDNA_P Parameter: Tissue Value: Germinating Seeds
  misc_feature: MA Experiment ID: 108577 Result: Up-regulated in Transcription
  misc_feature: MA Experiment 108577 PARAMETER Experiment Name: At_42deg_Heat_cDNA_P Parameter: Temperature (deg C) Value: 42 vs. 22
  misc_feature: MA Experiment 108577 PARAMETER Experiment Name: At_42deg_Heat_cDNA_P Parameter: Timepoint (hr) Value: 6
  misc_feature: MA Experiment 108577 PARAMETER Experiment Name: At_42deg_Heat_cDNA_P Parameter: Tissue Value: Aerial
  misc_feature: MA Experiment ID: 20000224 Result: Up-regulated in Transcription
  misc_feature: MA Experiment ID: 20000264 Result: Up-regulated in Transcription
  misc_feature: MA Experiment 20000264 PARAMETER Experiment Name: At_Open_Flower_P Parameter: Age (day) Value: 21
  misc_feature: MA Experiment 20000264 PARAMETER Experiment Name: At_Open_Flower_P Parameter: Plant Line Value: WS
  misc_feature: MA Experiment 20000264 PARAMETER Experiment Name: At_Open_Flower_P Parameter: Tissue Value: Open Flower vs. Whole Plant
  misc_feature: MA Experiment ID: 20000286 Result: Up-regulated in Transcription
  misc_feature: MA Experiment 20000286 PARAMETER Experiment Name: At_Open_Flower_P Parameter: Age (day) Value: 21
  misc_feature: MA Experiment 20000286 PARAMETER Experiment Name: At_Open_Flower_P Parameter: Plant Line Value: WS
  misc_feature: MA Experiment 20000286 PARAMETER Experiment Name: At_Open_Flower_P Parameter: Tissue Value: Half Open vs. Whole Plant
  misc_feature: MA Experiment ID: 20000451 Result: Up-regulated in Transcription
  misc_feature: MA Experiment 20000451 PARAMETER Experiment Name: At_CS6879_Shoots-Roots_P Parameter: Age (day) Value: 14
  misc_feature: MA Experiment 20000451 PARAMETER Experiment Name: At_CS6879_Shoots-Roots_P Parameter: Organism Value: A. thaliana
  misc_feature: MA Experiment 20000451 PARAMETER Experiment Name: At_CS6879_Shoots-Roots_P Parameter: Plant Line Value: CS6879 vs. WS
  misc_feature: MA Experiment 20000451 PARAMETER Experiment Name: At_CS6879_Shoots-Roots_P Parameter: Tissue Value: Roots
  misc_feature: MA Experiment ID: 20000794 Result: Up-regulated in Transcription
  misc_feature: MA Experiment 20000794 PARAMETER Experiment Name: At_Petals_P Parameter: Age (day) Value: 23-25 days
  misc_feature: MA Experiment 20000794 PARAMETER Experiment Name: At_Petals_P Parameter: Plant Line Value: WS
  misc_feature: MA Experiment 20000794 PARAMETER Experiment Name: At_Petals_P Parameter: Tissue Value: Petals vs. Whole plant
  misc_feature: MA Experiment ID: 20001560 Result: Up-regulated in Transcription
  misc_feature: MA Experiment 20001560 PARAMETER Experiment Name: At_Drought_Soil_Dry_P Parameter: Age (day) Value: 28
  misc_feature: MA Experiment 20001560 PARAMETER Experiment Name: At_Drought_Soil_Dry_P Parameter: Organism Value: A. thaliana
  misc_feature: MA Experiment 20001560 PARAMETER Experiment Name: At_Drought_Soil_Dry_P Parameter: Plant Line Value: WS
  misc_feature: MA Experiment 20001560 PARAMETER Experiment Name: At_Drought_Soil_Dry_P Parameter: Post Timepoint (hr) Value: None
  misc_feature: MA Experiment 20001560 PARAMETER Experiment Name: At_Drought_Soil_Dry_P Parameter: Post-Treatment Value: None
  misc_feature: MA Experiment 20001560 PARAMETER Experiment Name: At_Drought_Soil_Dry_P Parameter: Timepoint (day) Value: 14
  misc_feature: MA Experiment 20001560 PARAMETER Experiment Name: At_Drought_Soil_Dry_P Parameter: Treatment Value: Drought vs. No Drought

SEQ ID NO: 32850 - protein, 266 aa, Arabidopsis thaliana; identical to SEQ ID NO: 29260
  peptide (1)..(266): Ceres Seq. ID no. 13500227
  misc_feature (111)..(164): Pfam Name: CBS domain Pfam Description: CBS domain
  misc_feature (114)..(254): Homolog of NCBI NO: 15678671 NR Description: conserved protein [Methanothermobacter
  misc_feature (106)..(254): Homolog of NCBI NO: 23127710 NR Description: hypothetical protein [Nostoc punctiforme]
  misc_feature (120)..(254): Homolog of NCBI NO: 23040753 NR Description: hypothetical protein [Trichodesmium erythraeum
  misc_feature (106)..(254): Homolog of NCBI NO: 16331252 NR Description: IMP dehydrogenase [Synechocystis sp. PCC 6803]
  misc_feature (119)..(254): Homolog of NCBI NO: 17231305 NR Description: hypothetical protein [Nostoc sp. PCC 7120]
  misc_feature (184)..(245): Homolog of NCBI NO: 7486280 NR Description: hypothetical protein F28A23.120 - Arabidopsis
  misc_feature (37)..(166): Homolog of NCBI NO: 7486280 NR Description: hypothetical protein F28A23.120 - Arabidopsis
  misc_feature (37)..(265): Homolog of NCBI NO: 18418376 NR Description: CBS domain containing protein [Arabidopsis
  misc_feature (85)..(260): Homolog of NCBI NO: 34015153 NR Description: putative CBS domain containing protein
  misc_feature (31)..(266): Homolog of NCBI NO: 15234564 NR Description: CBS domain containing protein [Arabidopsis

SEQ ID NO: 32851 - protein, 236 aa, Arabidopsis thaliana; identical to SEQ ID NO: 29261
  peptide (1)..(236): Ceres Seq. ID no. 13500228
  misc_feature (81)..(134): Pfam Name: CBS domain Pfam Description: CBS domain
  misc_feature (84)..(224): Homolog of NCBI NO: 15678671 NR Description: conserved protein [Methanothermobacter
  misc_feature (76)..(224): Homolog of NCBI NO: 23127710 NR Description: hypothetical protein [Nostoc punctiforme]
  misc_feature (90)..(224): Homolog of NCBI NO: 23040753 NR Description: hypothetical protein [Trichodesmium erythraeum
  misc_feature (76)..(224): Homolog of NCBI NO: 16331252 NR Description: IMP dehydrogenase [Synechocystis sp. PCC 6803]
  misc_feature (89)..(224): Homolog of NCBI NO: 17231305 NR Description: hypothetical protein [Nostoc sp. PCC 7120]
  misc_feature (154)..(215): Homolog of NCBI NO: 7486280 NR Description: hypothetical protein F28A23.120 - Arabidopsis
  misc_feature (7)..(136): Homolog of NCBI NO: 7486280 NR Description: hypothetical protein F28A23.120 - Arabidopsis
  misc_feature (7)..(235): Homolog of NCBI NO: 18418376 NR Description: CBS domain containing protein [Arabidopsis
  misc_feature (55)..(230): Homolog of NCBI NO: 34015153 NR Description: putative CBS domain containing protein
  misc_feature (1)..(236): Homolog of NCBI NO: 15234564 NR Description: CBS domain containing protein [Arabidopsis

SEQ ID NO: 32852 - protein, 173 aa, Arabidopsis thaliana; identical to SEQ ID NO: 29262
  peptide (1)..(173): Ceres Seq. ID no. 13500229
  misc_feature (18)..(71): Pfam Name: CBS domain Pfam Description: CBS domain
  misc_feature (21)..(161): Homolog of NCBI NO: 15678671 NR Description: conserved protein [Methanothermobacter
  misc_feature (13)..(161): Homolog of NCBI NO: 23127710 NR Description: hypothetical protein [Nostoc punctiforme]
  misc_feature (27)..(161): Homolog of NCBI NO: 23040753 NR Description: hypothetical protein [Trichodesmium erythraeum
  misc_feature (13)..(161): Homolog of NCBI NO: 16331252 NR Description: IMP dehydrogenase [Synechocystis sp. PCC 6803]
  misc_feature (26)..(161): Homolog of NCBI NO: 17231305 NR Description: hypothetical protein [Nostoc sp. PCC 7120]
  misc_feature (91)..(152): Homolog of NCBI NO: 7486280 NR Description: hypothetical protein F28A23.120 - Arabidopsis
  misc_feature (1)..(73): Homolog of NCBI NO: 7486280 NR Description: hypothetical protein F28A23.120 - Arabidopsis
  misc_feature (1)..(172): Homolog of NCBI NO: 18418376 NR Description: CBS domain containing protein [Arabidopsis
  misc_feature (1)..(167): Homolog of NCBI NO: 34015153 NR Description: putative CBS domain containing protein
  misc_feature (1)..(173): Homolog of NCBI NO: 15234564 NR Description: CBS domain containing protein [Arabidopsis

SEQ ID NO: 32853 - DNA, 870 bp, Arabidopsis thaliana; identical to SEQ ID NO: 29263
  misc_feature (1)..(870): Ceres Seq. ID no. 12776994
  misc_feature: MA Experiment ID: 108434 Result: Up-regulated in Transcription
  misc_feature: MA Experiment 108434 PARAMETER Experiment Name: At_Root_Tips_cDNA_P Parameter: Tissue Value: Root Tips
  misc_feature: MA Experiment ID: 108463 Result: Down-regulated in Transcription
  misc_feature: MA Experiment 108463 PARAMETER Experiment Name: At_Germinating_Seeds_cDNA_P Parameter: Age (day) Value: 3 vs. 0
  misc_feature: MA Experiment 108463 PARAMETER Experiment Name: At_Germinating_Seeds_cDNA_P Parameter: Tissue Value: Germinating Seeds
  misc_feature: MA Experiment ID: 108464 Result: Down-regulated in Transcription
  misc_feature: MA Experiment 108464 PARAMETER Experiment Name: At_Germinating_Seeds_cDNA_P Parameter: Age (day) Value: 4 vs. 0
  misc_feature: MA Experiment 108464 PARAMETER Experiment Name: At_Germinating_Seeds_cDNA_P Parameter: Tissue Value: Germinating Seeds
  misc_feature: MA Experiment ID: 108474 Result: Up-regulated in Transcription
  misc_feature: MA Experiment 108474 PARAMETER Experiment Name: At_Drought_Flowers_cDNA_P Parameter: Timepoint (hr) Value: null
  misc_feature: MA Experiment 108474 PARAMETER Experiment Name: At_Drought_Flowers_cDNA_P Parameter: Treatment Value: Drought vs. No Drought
  misc_feature: MA Experiment ID: 108488 Result: Up-regulated in Transcription
  misc_feature: MA Experiment ID: 108561 Result: Down-regulated in Transcription
  misc_feature: MA Experiment 108561 PARAMETER Experiment Name: At_100uM_ABA_cDNA_P Parameter: Timepoint (hr) Value: 6
  misc_feature: MA Experiment 108561 PARAMETER Experiment Name: At_100uM_ABA_cDNA_P Parameter: Tissue Value: Aerial
  misc_feature: MA Experiment 108561 PARAMETER Experiment Name: At_100uM_ABA_cDNA_P Parameter: Treatment Value: 100uM ABA vs. No Treatment
  misc_feature: MA Experiment ID: 108573 Result: Down-regulated in Transcription
  misc_feature: MA Experiment 108573 PARAMETER Experiment Name: At_Drought_cDNA_P Parameter: Timepoint (hr) Value: 6
  misc_feature: MA Experiment 108573 PARAMETER Experiment Name: At_Drought_cDNA_P Parameter: Tissue Value: Aerial
  misc_feature: MA Experiment 108573 PARAMETER Experiment Name: At_Drought_cDNA_P Parameter: Treatment Value: Drought vs. No Drought
  misc_feature: MA Experiment ID: 108595 Result: Down-regulated in Transcription
  misc_feature: MA Experiment 108595 PARAMETER Experiment Name: At_Ler-pi_Ovule_cDNA_P Parameter: Plant Line Value: null
  misc_feature: MA Experiment ID: 20000069 Result: Down-regulated in Transcription
  misc_feature: MA Experiment 20000069 PARAMETER Experiment Name: At_100uM_ABA_Mutants_cDNA_P Parameter: Plant Line Value: CS23
  misc_feature: MA Experiment 20000069 PARAMETER Experiment Name: At_100uM_ABA_Mutants_cDNA_P Parameter: Timepoint (hr) Value: 6
  misc_feature: MA Experiment 20000069 PARAMETER Experiment Name: At_100uM_ABA_Mutants_cDNA_P Parameter: Tissue Value: Aerial
  misc_feature: MA Experiment 20000069 PARAMETER Experiment Name: At_100uM_ABA_Mutants_cDNA_P Parameter: Treatment Value: 100uM ABA vs. No Treatment
  misc_feature: MA Experiment ID: 20000070 Result: Down-regulated in Transcription
  misc_feature: MA Experiment 20000070 PARAMETER Experiment Name: At_100uM_ABA_Mutants_cDNA_P Parameter: Plant Line Value: CS24
  misc_feature: MA Experiment 20000070 PARAMETER Experiment Name: At_100uM_ABA_Mutants_cDNA_P Parameter: Timepoint (hr) Value: 6
  misc_feature: MA Experiment 20000070 PARAMETER Experiment Name: At_100uM_ABA_Mutants_cDNA_P Parameter: Tissue Value: Aerial
  misc_feature: MA Experiment 20000070 PARAMETER Experiment Name: At_100uM_ABA_Mutants_cDNA_P Parameter: Treatment Value: 100uM ABA vs. No Treatment
  misc_feature: MA Experiment ID: 20000086 Result: Down-regulated in Transcription
  misc_feature: MA Experiment 20000086 PARAMETER Experiment Name: At_100uM_ABA_Mutants_cDNA_P Parameter: Plant Line Value: CS22
  misc_feature: MA Experiment 20000086 PARAMETER Experiment Name: At_100uM_ABA_Mutants_cDNA_P Parameter: Timepoint (hr) Value: 6
  misc_feature: MA Experiment 20000086 PARAMETER Experiment Name: At_100uM_ABA_Mutants_cDNA_P Parameter: Tissue Value: Aerial
  misc_feature: MA Experiment 20000086 PARAMETER Experiment Name: At_100uM_ABA_Mutants_cDNA_P Parameter: Treatment Value: 100uM ABA vs. No Treatment
  misc_feature: MA Experiment ID: 20000087 Result: Down-regulated in Transcription
  misc_feature: MA Experiment 20000087 PARAMETER Experiment Name: At_100uM_ABA_Mutants_cDNA_P Parameter: Plant Line Value: WS
  misc_feature: MA Experiment 20000087 PARAMETER Experiment Name: At_100uM_ABA_Mutants_cDNA_P Parameter: Timepoint (hr) Value: 6
  misc_feature: MA Experiment 20000087 PARAMETER Experiment Name: At_100uM_ABA_Mutants_cDNA_P Parameter: Tissue Value: Aerial
  misc_feature: MA Experiment 20000087 PARAMETER Experiment Name: At_100uM_ABA_Mutants_cDNA_P Parameter: Treatment Value: 100uM ABA vs. No Treatment
  misc_feature: MA Experiment ID: 20000088 Result: Down-regulated in Transcription
  misc_feature: MA Experiment 20000088 PARAMETER Experiment Name: At_100uM_ABA_Mutants_cDNA_P Parameter: Plant Line Value: Landsberg
  misc_feature: MA Experiment 20000088 PARAMETER Experiment Name: At_100uM_ABA_Mutants_cDNA_P Parameter: Timepoint (hr) Value: 6
  misc_feature: MA Experiment 20000088 PARAMETER Experiment Name: At_100uM_ABA_Mutants_cDNA_P Parameter: Tissue Value: Aerial
  misc_feature: MA Experiment 20000088 PARAMETER Experiment Name: At_100uM_ABA_Mutants_cDNA_P Parameter: Treatment Value: 100uM ABA vs. No Treatment
  misc_feature: MA Experiment ID: 20000117 Result: Down-regulated in Transcription
  misc_feature: MA Experiment 20000117 PARAMETER Experiment Name: At_100uM_ABA_Mutants_cDNA_P Parameter: Plant Line Value: Columbia
  misc_feature: MA Experiment 20000117 PARAMETER Experiment Name: At_100uM_ABA_Mutants_cDNA_P Parameter: Timepoint (hr) Value: 6
  misc_feature: MA Experiment 20000117 PARAMETER Experiment Name: At_100uM_ABA_Mutants_cDNA_P Parameter: Tissue Value: Aerial
  misc_feature: MA Experiment 20000117 PARAMETER Experiment Name: At_100uM_ABA_Mutants_cDNA_P Parameter: Treatment Value: 100uM ABA vs. No Treatment
  misc_feature: MA Experiment ID: 20000185 Result: Down-regulated in Transcription
  misc_feature: MA Experiment 20000185 PARAMETER Experiment Name: At_Roots__P Parameter: Age (day) Value: 7 vs. 21
  misc_feature: MA Experiment 20000185 PARAMETER Experiment Name: At_Roots__P Parameter: Organism Value: A. thaliana
  misc_feature: MA Experiment 20000185 PARAMETER Experiment Name: At_Roots__P Parameter: Tissue Value: Roots vs. Whole Plant
  misc_feature: MA Experiment ID: 20000234 Result: Up-regulated in Transcription
  misc_feature: MA Experiment 20000234 PARAMETER Experiment Name: At_Siliques_P Parameter: Age (day) Value: 21
  misc_feature: MA Experiment 20000234 PARAMETER Experiment Name: At_Siliques_P Parameter: Organism Value: A. thaliana
  misc_feature: MA Experiment 20000234 PARAMETER Experiment Name: At_Siliques_P Parameter: Plant Line Value: WS
  misc_feature: MA Experiment 20000234 PARAMETER Experiment Name: At_Siliques_P Parameter: Tissue Value: Less Than 5mm Siliques vs. Whole Plant
  misc_feature: MA Experiment ID: 20000235 Result: Up-regulated in Transcription
  misc_feature: MA Experiment 20000235 PARAMETER Experiment Name: At_Siliques_P Parameter: Age (day) Value: 21
  misc_feature: MA Experiment 20000235 PARAMETER Experiment Name: At_Siliques_P Parameter: Organism Value: A. thaliana
  misc_feature: MA Experiment 20000235 PARAMETER Experiment Name: At_Siliques_P Parameter: Plant Line Value: WS
  misc_feature: MA Experiment 20000235 PARAMETER Experiment Name: At_Siliques_P Parameter: Tissue Value: 5-10mm Siliques vs. Whole Plant
  misc_feature: MA Experiment ID: 20000437 Result: Down-regulated in Transcription
  misc_feature: MA Experiment 20000437 PARAMETER Experiment Name: At_Drought_P Parameter: Age (day) Value: 8
  misc_feature: MA Experiment 20000437 PARAMETER Experiment Name: At_Drought_P Parameter: Organism Value: A. thaliana
  misc_feature: MA Experiment 20000437 PARAMETER Experiment Name: At_Drought_P Parameter: Plant Line Value: WS
  misc_feature: MA Experiment 20000437 PARAMETER Experiment Name: At_Drought_P Parameter: Timepoint (hr) Value: 24
  misc_feature: MA Experiment 20000437 PARAMETER Experiment Name: At_Drought_P Parameter: Tissue Value: Whole Plant
  misc_feature: MA Experiment 20000437 PARAMETER Experiment Name: At_Drought_P Parameter: Treatment Value: Drought vs. No Drought
  misc_feature: MA Experiment ID: 20000439 Result: Down-regulated in Transcription
  misc_feature: MA Experiment 20000439 PARAMETER Experiment Name: At_Roots__P Parameter: Age (day) Value: 14 vs. 21
  misc_feature: MA Experiment 20000439 PARAMETER Experiment Name: At_Roots__P Parameter: Organism Value: A. thaliana
  misc_feature: MA Experiment 20000439 PARAMETER Experiment Name: At_Roots__P Parameter: Tissue Value: Roots vs. Whole Plant
  misc_feature: MA Experiment ID: 20000794 Result: Down-regulated in Transcription
  misc_feature: MA Experiment 20000794 PARAMETER Experiment Name: At_Petals_P Parameter: Age (day) Value: 23-25 days
  misc_feature: MA Experiment 20000794 PARAMETER Experiment Name: At_Petals_P Parameter: Plant Line Value: WS
  misc_feature: MA Experiment 20000794 PARAMETER Experiment Name: At_Petals_P Parameter: Tissue Value: Petals vs. Whole plant
  misc_feature: MA Experiment ID: 20001450 Result: Down-regulated in Transcription
  misc_feature: MA Experiment 20001450 PARAMETER Experiment Name: At_Far-red-induction_P Parameter: Age (day) Value: 7
  misc_feature: MA Experiment 20001450 PARAMETER Experiment Name: At_Far-red-induction_P Parameter: Light Value: Far-red vs. White
  misc_feature: MA Experiment 20001450 PARAMETER Experiment Name: At_Far-red-induction_P Parameter: Organism Value: A. thaliana
  misc_feature: MA Experiment 20001450 PARAMETER Experiment Name: At_Far-red-induction_P Parameter: Plant Line Value: Columbia
  misc_feature: MA Experiment 20001450 PARAMETER Experiment Name: At_Far-red-induction_P Parameter: Timepoint (hr) Value: 8
  misc_feature: MA Experiment 20001450 PARAMETER Experiment Name: At_Far-red-induction_P Parameter: Tissue Value: Whole Plant
  misc_feature: MA Experiment ID: 20001560 Result: Up-regulated in Transcription
  misc_feature: MA Experiment 20001560 PARAMETER Experiment Name: At_Drought_Soil_Dry_P Parameter: Age (day) Value: 28
  misc_feature: MA Experiment 20001560 PARAMETER Experiment Name: At_Drought_Soil_Dry_P Parameter: Organism Value: A. thaliana
  misc_feature: MA Experiment 20001560 PARAMETER Experiment Name: At_Drought_Soil_Dry_P Parameter: Plant Line Value: WS
  misc_feature: MA Experiment 20001560 PARAMETER Experiment Name: At_Drought_Soil_Dry_P Parameter: Post Timepoint (hr) Value: None
  misc_feature: MA Experiment 20001560 PARAMETER Experiment Name: At_Drought_Soil_Dry_P Parameter: Post-Treatment Value: None
  misc_feature: MA Experiment 20001560 PARAMETER Experiment Name: At_Drought_Soil_Dry_P Parameter: Timepoint (day) Value: 14
  misc_feature: MA Experiment 20001560 PARAMETER Experiment Name: At_Drought_Soil_Dry_P Parameter: Treatment Value: Drought vs. No Drought
  misc_feature: MA Experiment ID: 20001757 Result: Up-regulated in Transcription
  misc_feature: MA Experiment 20001757 PARAMETER Experiment Name: At_50mM_NH4NO3_L-to-H_P Parameter: Timepoint (hr) Value: 6
  misc_feature: MA Experiment 20001757 PARAMETER Experiment Name: At_50mM_NH4NO3_L-to-H_P Parameter: Tissue Value: Leaf
  misc_feature: MA Experiment 20001757 PARAMETER Experiment Name: At_50mM_NH4NO3_L-to-H_P Parameter: Treatment Value: 50mM NH4NO3 vs 100mM Mannitol
  misc_feature: MA Experiment ID: 20001905 Result: Down-regulated in Transcription
  misc_feature: MA Experiment 20001905 PARAMETER Experiment Name: At_Drought_Reproduction_P Parameter: Age (day) Value: 40
  misc_feature: MA Experiment 20001905 PARAMETER Experiment Name: At_Drought_Reproduction_P Parameter: Organism Value: A. thaliana
  misc_feature: MA Experiment 20001905 PARAMETER Experiment Name: At_Drought_Reproduction_P Parameter: Plant Line Value: WS
  misc_feature: MA Experiment 20001905 PARAMETER Experiment Name: At_Drought_Reproduction_P Parameter: Timepoint (day) Value: 10
  misc_feature: MA Experiment 20001905 PARAMETER Experiment Name: At_Drought_Reproduction_P Parameter: Tissue Value: Rosettes
  misc_feature: MA Experiment 20001905 PARAMETER Experiment Name: At_Drought_Reproduction_P Parameter: Treatment Value: Drought vs. No Drought
  misc_feature: MA Experiment ID: 20001906 Result: Down-regulated in Transcription
  misc_feature: MA Experiment 20001906 PARAMETER Experiment Name: At_Drought_Reproduction_P Parameter: Age (day) Value: 35
  misc_feature: MA Experiment 20001906 PARAMETER Experiment Name: At_Drought_Reproduction_P Parameter: Organism Value: A. thaliana
  misc_feature: MA Experiment 20001906 PARAMETER Experiment Name: At_Drought_Reproduction_P Parameter: Plant Line Value: WS
  misc_feature: MA Experiment 20001906 PARAMETER Experiment Name: At_Drought_Reproduction_P Parameter: Timepoint (day) Value: 5
  misc_feature: MA Experiment 20001906 PARAMETER Experiment Name: At_Drought_Reproduction_P Parameter: Tissue Value: Siliques
  misc_feature: MA Experiment 20001906 PARAMETER Experiment Name: At_Drought_Reproduction_P Parameter: Treatment Value: Drought vs. No Drought
  misc_feature: MA Experiment ID: 20001908 Result: Down-regulated in Transcription
  misc_feature: MA Experiment 20001908 PARAMETER Experiment Name: At_Drought_Reproduction_P Parameter: Age (day) Value: 40
  misc_feature: MA Experiment 20001908 PARAMETER Experiment Name: At_Drought_Reproduction_P Parameter: Organism Value: A. thaliana
  misc_feature: MA Experiment 20001908 PARAMETER Experiment Name: At_Drought_Reproduction_P Parameter: Plant Line Value: WS
  misc_feature: MA Experiment 20001908 PARAMETER Experiment Name: At_Drought_Reproduction_P Parameter: Timepoint (day) Value: 10
  misc_feature: MA Experiment 20001908 PARAMETER Experiment Name: At_Drought_Reproduction_P Parameter: Tissue Value: Siliques
  misc_feature: MA Experiment 20001908 PARAMETER Experiment Name: At_Drought_Reproduction_P Parameter: Treatment Value: Drought vs. No Drought

SEQ ID NO: 32854 - protein, 171 aa, Arabidopsis thaliana; identical to SEQ ID NO: 29264
  peptide (1)..(171): Ceres Seq. ID no. 12776995
  misc_feature (111)..(171): Pfam Name: Ribosomal protein L9, C-terminal domain Pfam Description: Ribosomal protein L9, C-terminal domain
  misc_feature (51)..(171): Homolog of NCBI NO: 17228075 NR Description: 50S ribosomal protein L9 [Nostoc sp. PCC 7120]
  misc_feature (46)..(171): Homolog of NCBI NO: 16330765 NR Description: 50S ribosomal protein L9 [Synechocystis sp. PCC
  misc_feature (46)..(171): Homolog of NCBI NO: 7676164 NR Description: 50S RIBOSOMAL PROTEIN L9
  misc_feature (46)..(171): Homolog of NCBI NO: 33864439 NR Description: 50S ribosomal protein L9 [Prochlorococcus marinus
  misc_feature (46)..(171): Homolog of NCBI NO: 33241283 NR Description: Ribosomal protein L9
  misc_feature (46)..(171): Homolog of NCBI NO: 33862229 NR Description: 50S ribosomal protein L9
  misc_feature (40)..(171): Homolog of NCBI NO: 22204126 NR Description: putative plastid ribosomal protein CL9 [Triticum
  misc_feature (1)..(171): Homolog of NCBI NO: 71256 NR Description: ribosomal protein L9 precursor, chloroplast -
  misc_feature (1)..(171): Homolog of NCBI NO: 1173069 NR Description: 50S RIBOSOMAL PROTEIN L9, CHLOROPLAST PRECURSOR
  misc_feature (1)..(171): Homolog of NCBI NO: 15230544 NR Description: RP19 gene for chloroplast ribosomal protein CL9

SEQ ID NO: 32855 - DNA, 493 bp, Arabidopsis thaliana; identical to SEQ ID NO: 29265
  misc_feature (1)..(493): Ceres Seq. ID no. 13489281
  misc_feature: MA Experiment ID: 108433 Result: Down-regulated in Transcription
  misc_feature: MA Experiment 108433 PARAMETER Experiment Name: At_rhl_Mutant2_cDNA_P Parameter: Age (day) Value: 7
  misc_feature: MA Experiment 108433 PARAMETER Experiment Name: At_rhl_Mutant2_cDNA_P Parameter: Organism Value: A. thaliana
  misc_feature: MA Experiment 108433 PARAMETER Experiment Name: At_rhl_Mutant2_cDNA_P Parameter: Plant Line Value: rhl Mutant vs. wt landsburg
  misc_feature: MA Experiment 108433 PARAMETER Experiment Name: At_rhl_Mutant2_cDNA_P Parameter: Tissue Value: Roots
  misc_feature: MA Experiment ID: 108434 Result: Up-regulated in Transcription
  misc_feature: MA Experiment 108434 PARAMETER Experiment Name: At_Root_Tips_cDNA_P Parameter: Tissue Value: Root Tips
  misc_feature: MA Experiment ID: 108488 Result: Down-regulated in Transcription
  misc_feature: MA Experiment ID: 108569 Result: Down-regulated in Transcription
  misc_feature: MA Experiment 108569 PARAMETER Experiment Name: At_0.001%_MeJA__cDNA_P Parameter: Timepoint (hr) Value: 6
  misc_feature: MA Experiment 108569 PARAMETER Experiment Name: At_0.001%_MeJA__cDNA_P Parameter: Tissue Value: Aerial
  misc_feature: MA Experiment 108569 PARAMETER Experiment Name: At_0.001%_MeJA__cDNA_P Parameter: Treatment Value: 0.001% MeJA vs. No Treatment
  misc_feature: MA Experiment ID: 108573 Result: Down-regulated in Transcription
  misc_feature: MA Experiment 108573 PARAMETER Experiment Name: At_Drought_cDNA_P Parameter: Timepoint (hr) Value: 6
  misc_feature: MA Experiment 108573 PARAMETER Experiment Name: At_Drought_cDNA_P Parameter: Tissue Value: Aerial
  misc_feature: MA Experiment 108573 PARAMETER Experiment Name: At_Drought_cDNA_P Parameter: Treatment Value: Drought vs. No Drought
  misc_feature: MA Experiment ID: 108595 Result: Up-regulated in Transcription
  misc_feature: MA Experiment 108595 PARAMETER Experiment Name: At_Ler-pi_Ovule_cDNA_P Parameter: Plant Line Value: null
  misc_feature: MA Experiment ID: 20000093 Result: Down-regulated in Transcription
  misc_feature: MA Experiment 20000093 PARAMETER Experiment Name: At_42deg_Heat_cDNA_P Parameter: Temperature (deg C) Value: 42 vs. 22
  misc_feature: MA Experiment 20000093 PARAMETER Experiment Name: At_42deg_Heat_cDNA_P Parameter: Timepoint (hr) Value: 0.5
  misc_feature: MA Experiment 20000093 PARAMETER Experiment Name: At_42deg_Heat_cDNA_P Parameter: Tissue Value: Aerial
  misc_feature: MA Experiment ID: 20000112 Result: Down-regulated in Transcription
  misc_feature: MA Experiment 20000112 PARAMETER Experiment Name: At_42deg_Heat_cDNA_P Parameter: Temperature (deg C) Value: 42 vs. 22
  misc_feature: MA Experiment 20000112 PARAMETER Experiment Name: At_42deg_Heat_cDNA_P Parameter: Timepoint (hr) Value: 2
  misc_feature: MA Experiment 20000112 PARAMETER Experiment Name: At_42deg_Heat_cDNA_P Parameter: Tissue Value: Aerial
  misc_feature: MA Experiment ID: 20000171 Result: Down-regulated in Transcription
  misc_feature: MA Experiment 20000171 PARAMETER Experiment Name: At_42deg_Heat_P Parameter: Age (day) Value: 14
  misc_feature: MA Experiment 20000171 PARAMETER Experiment Name: At_42deg_Heat_P Parameter: Organism Value: A. thaliana
  misc_feature: MA Experiment 20000171 PARAMETER Experiment Name: At_42deg_Heat_P Parameter: Plant Line Value: WS
  misc_feature: MA Experiment 20000171 PARAMETER Experiment Name: At_42deg_Heat_P Parameter: Temperature (deg C) Value: 42 vs. 22
  misc_feature: MA Experiment 20000171 PARAMETER Experiment Name: At_42deg_Heat_P Parameter: Timepoint (hr) Value: 1
  misc_feature: MA Experiment 20000171 PARAMETER Experiment Name: At_42deg_Heat_P Parameter: Tissue Value: Aerial
  misc_feature: MA Experiment ID: 20000173 Result: Down-regulated in Transcription
  misc_feature: MA Experiment 20000173 PARAMETER Experiment Name: At_42deg_Heat_P Parameter: Age (day) Value: 14
  misc_feature: MA Experiment 20000173 PARAMETER Experiment Name: At_42deg_Heat_P Parameter: Organism Value: A. thaliana
  misc_feature: MA Experiment 20000173 PARAMETER Experiment Name: At_42deg_Heat_P Parameter: Plant Line Value: WS
  misc_feature: MA Experiment 20000173 PARAMETER Experiment Name: At_42deg_Heat_P Parameter: Temperature (deg C) Value: 42 vs. 22
  misc_feature: MA Experiment 20000173 PARAMETER Experiment Name: At_42deg_Heat_P Parameter: Timepoint (hr) Value: 6
  misc_feature: MA Experiment 20000173 PARAMETER Experiment Name: At_42deg_Heat_P Parameter: Tissue Value: Aerial
  misc_feature: MA Experiment ID: 20000437 Result: Down-regulated in Transcription
  misc_feature: MA Experiment 20000437 PARAMETER Experiment Name: At_Drought_P Parameter: Age (day) Value: 8
  misc_feature: MA Experiment 20000437 PARAMETER Experiment Name: At_Drought_P Parameter: Organism Value: A. thaliana
  misc_feature: MA Experiment 20000437 PARAMETER Experiment Name: At_Drought_P Parameter: Plant Line Value: WS
  misc_feature: MA Experiment 20000437 PARAMETER Experiment Name: At_Drought_P Parameter: Timepoint (hr) Value: 24
  misc_feature: MA Experiment 20000437 PARAMETER Experiment Name: At_Drought_P Parameter: Tissue Value: Whole Plant
  misc_feature: MA Experiment 20000437 PARAMETER Experiment Name: At_Drought_P Parameter: Treatment Value: Drought vs. No Drought
  misc_feature: MA Experiment ID: 20000451 Result: Up-regulated in Transcription
  misc_feature: MA Experiment 20000451 PARAMETER Experiment Name: At_CS6879_Shoots-Roots_P Parameter: Age (day) Value: 14
  misc_feature: MA Experiment 20000451 PARAMETER Experiment Name: At_CS6879_Shoots-Roots_P Parameter: Organism Value: A. thaliana
  misc_feature: MA Experiment 20000451 PARAMETER Experiment Name: At_CS6879_Shoots-Roots_P Parameter: Plant Line Value: CS6879 vs. WS
  misc_feature: MA Experiment 20000451 PARAMETER Experiment Name: At_CS6879_Shoots-Roots_P Parameter: Tissue Value: Roots
  misc_feature: MA Experiment ID: 20000452 Result: Up-regulated in Transcription
  misc_feature: MA Experiment 20000452 PARAMETER Experiment Name: At_CS6879_Shoots-Roots_P Parameter: Age (day) Value: 14
  misc_feature: MA Experiment 20000452 PARAMETER Experiment Name: At_CS6879_Shoots-Roots_P Parameter: Organism Value: A. thaliana
  misc_feature: MA Experiment 20000452 PARAMETER Experiment Name: At_CS6879_Shoots-Roots_P Parameter: Plant Line Value: CS6879 vs. WS
  misc_feature: MA Experiment 20000452 PARAMETER Experiment Name: At_CS6879_Shoots-Roots_P Parameter: Tissue Value: Shoots

SEQ ID NO: 32856 - protein, 103 aa, Arabidopsis thaliana; identical to SEQ ID NO: 7737
  peptide (1)..(103): Ceres Seq. ID no. 13489282
  misc_feature (1)..(103): Homolog of NCBI NO: 462242 NR Description: Histone H4
  misc_feature (1)..(103): Homolog of NCBI NO: 37590121 NR Description: Hist1h4h protein [Mus musculus]
  misc_feature (1)..(103): Homolog of NCBI NO: 34858262 NR Description: similar to germinal histone H4 gene [Rattus
  misc_feature (1)..(103): Homolog of NCBI NO: 27692935 NR Description: Hist1h4i protein [Mus musculus]
  misc_feature (1)..(103): Homolog of NCBI NO: 4504301 NR Description: H4 histone family, member A [Homo sapiens]
  misc_feature (1)..(103): Homolog of NCBI NO: 1806283 NR Description: Histone H4 homologue [Sesbania rostrata]
  misc_feature (1)..(103): Homolog of NCBI NO: 462243 NR Description: Histone H4
  misc_feature (1)..(103): Homolog of NCBI NO: 27692960 NR Description: Similar to germinal histone H4 gene [Mus musculus]
  misc_feature (1)..(103): Homolog of NCBI NO: 15226944 NR Description: histone H4 [Arabidopsis thaliana]
  misc_feature (1)..(103): Homolog of NCBI NO: 34876368 NR Description: similar to germinal histone H4 gene [Rattus

SEQ ID NO: 32857 - protein, 73 aa, Arabidopsis thaliana; identical to SEQ ID NO: 29267
  peptide (1)..(73): Ceres Seq. ID no. 13489283

SEQ ID NO: 32858 - DNA, 805 bp, Arabidopsis thaliana; identical to SEQ ID NO: 29268
  misc_feature (1)..(805): Ceres Seq. ID no. 12466452
  misc_feature: MA Experiment ID: 108461 Result: Up-regulated in Transcription
  misc_feature: MA Experiment 108461 PARAMETER Experiment Name: At_Germinating_Seeds_cDNA_P Parameter: Age (day) Value: 1 vs. 0
  misc_feature: MA Experiment 108461 PARAMETER Experiment Name: At_Germinating_Seeds_cDNA_P Parameter: Tissue Value: Germinating Seeds
  misc_feature: MA Experiment ID: 108462 Result: Up-regulated in Transcription
  misc_feature: MA Experiment 108462 PARAMETER Experiment Name: At_Germinating_Seeds_cDNA_P Parameter: Age (day) Value: 2 vs. 0
  misc_feature: MA Experiment 108462 PARAMETER Experiment Name: At_Germinating_Seeds_cDNA_P Parameter: Tissue Value: Germinating Seeds
  misc_feature: MA Experiment ID: 108463 Result: Up-regulated in Transcription
  misc_feature: MA Experiment 108463 PARAMETER Experiment Name: At_Germinating_Seeds_cDNA_P Parameter: Age (day) Value: 3 vs. 0
  misc_feature: MA Experiment 108463 PARAMETER Experiment Name: At_Germinating_Seeds_cDNA_P Parameter: Tissue Value: Germinating Seeds
  misc_feature: MA Experiment ID: 108464 Result: Up-regulated in Transcription
  misc_feature: MA Experiment 108464 PARAMETER Experiment Name: At_Germinating_Seeds_cDNA_P Parameter: Age (day) Value: 4 vs. 0
  misc_feature: MA Experiment 108464 PARAMETER Experiment Name: At_Germinating_Seeds_cDNA_P Parameter: Tissue Value: Germinating Seeds
  misc_feature: MA Experiment ID: 108474 Result: Down-regulated in Transcription
  misc_feature: MA Experiment 108474 PARAMETER Experiment Name: At_Drought_Flowers_cDNA_P Parameter: Timepoint (hr) Value: null
  misc_feature: MA Experiment 108474 PARAMETER Experiment Name: At_Drought_Flowers_cDNA_P Parameter: Treatment Value: Drought vs. No Drought
  misc_feature: MA Experiment ID: 108488 Result: Up-regulated in Transcription
  misc_feature: MA Experiment ID: 20000093 Result: Down-regulated in Transcription
  misc_feature: MA Experiment 20000093 PARAMETER Experiment Name: At_42deg_Heat_cDNA_P Parameter: Temperature (deg C) Value: 42 vs. 22
  misc_feature: MA Experiment 20000093 PARAMETER Experiment Name: At_42deg_Heat_cDNA_P Parameter: Timepoint (hr) Value: 0.5
  misc_feature: MA Experiment 20000093 PARAMETER Experiment Name: At_42deg_Heat_cDNA_P Parameter: Tissue Value: Aerial
  misc_feature: MA Experiment ID: 20000111 Result: Down-regulated in Transcription
  misc_feature: MA Experiment 20000111 PARAMETER Experiment Name: At_42deg_Heat_cDNA_P Parameter: Temperature (deg C) Value: 42 vs. 22
  misc_feature: MA Experiment 20000111 PARAMETER Experiment Name: At_42deg_Heat_cDNA_P Parameter: Timepoint (hr) Value: 6
  misc_feature: MA Experiment 20000111 PARAMETER Experiment Name: At_42deg_Heat_cDNA_P Parameter: Tissue Value: Aerial
  misc_feature: MA Experiment ID: 20000112 Result: Down-regulated in Transcription
  misc_feature: MA Experiment 20000112 PARAMETER Experiment Name: At_42deg_Heat_cDNA_P Parameter: Temperature (deg C) Value: 42 vs. 22
  misc_feature: MA Experiment 20000112 PARAMETER Experiment Name: At_42deg_Heat_cDNA_P Parameter: Timepoint (hr) Value: 2
  misc_feature: MA Experiment 20000112 PARAMETER Experiment Name: At_42deg_Heat_cDNA_P Parameter: Tissue Value: Aerial
  misc_feature: MA Experiment ID: 20000113 Result: Down-regulated in Transcription
  misc_feature: MA Experiment 20000113 PARAMETER Experiment Name: At_42deg_Heat_cDNA_P Parameter: Temperature (deg C) Value: 42 vs. 22
  misc_feature: MA Experiment 20000113 PARAMETER Experiment Name: At_42deg_Heat_cDNA_P Parameter: Timepoint (hr) Value: 8
  misc_feature: MA Experiment 20000113 PARAMETER Experiment Name: At_42deg_Heat_cDNA_P Parameter: Tissue Value: Aerial
  misc_feature: MA Experiment ID: 20000144 Result: Down-regulated in Transcription
  misc_feature: MA Experiment 20000144 PARAMETER Experiment Name: At_42deg_Heat_cDNA_P Parameter: Temperature (deg C) Value: 42 vs. 22
  misc_feature: MA Experiment 20000144 PARAMETER Experiment Name: At_42deg_Heat_cDNA_P Parameter: Timepoint (hr) Value: 1
  misc_feature: MA Experiment 20000144 PARAMETER Experiment Name: At_42deg_Heat_cDNA_P Parameter: Tissue Value: Aerial
  misc_feature: MA Experiment ID: 20000171 Result: Down-regulated in Transcription
  misc_feature: MA Experiment 20000171 PARAMETER Experiment Name: At_42deg_Heat_P Parameter: Age (day) Value: 14
  misc_feature: MA Experiment 20000171 PARAMETER Experiment Name: At_42deg_Heat_P Parameter: Organism Value: A. thaliana
  misc_feature: MA Experiment 20000171 PARAMETER Experiment Name: At_42deg_Heat_P Parameter: Plant Line Value: WS
  misc_feature: MA Experiment 20000171 PARAMETER Experiment Name: At_42deg_Heat_P Parameter: Temperature (deg C) Value: 42 vs. 22
  misc_feature: MA Experiment 20000171 PARAMETER Experiment Name: At_42deg_Heat_P Parameter: Timepoint (hr) Value: 1
  misc_feature: MA Experiment 20000171 PARAMETER Experiment Name: At_42deg_Heat_P Parameter: Tissue Value: Aerial
  misc_feature: MA Experiment ID: 20000173 Result: Down-regulated in Transcription
  misc_feature: MA Experiment 20000173 PARAMETER Experiment Name: At_42deg_Heat_P Parameter: Age (day) Value: 14
  misc_feature: MA Experiment 20000173 PARAMETER Experiment Name: At_42deg_Heat_P Parameter: Organism Value: A. thaliana
  misc_feature: MA Experiment 20000173 PARAMETER Experiment Name: At_42deg_Heat_P Parameter: Plant Line Value: WS
  misc_feature: MA Experiment 20000173 PARAMETER Experiment Name: At_42deg_Heat_P Parameter: Temperature (deg C) Value: 42 vs. 22
  misc_feature: MA Experiment 20000173 PARAMETER Experiment Name: At_42deg_Heat_P Parameter: Timepoint (hr) Value: 6
  misc_feature: MA Experiment 20000173 PARAMETER Experiment Name: At_42deg_Heat_P Parameter: Tissue Value: Aerial
  misc_feature: MA Experiment ID: 20000180 Result: Up-regulated in Transcription
  misc_feature: MA Experiment 20000180 PARAMETER Experiment Name: At_Germinating_Seeds_P Parameter: Age (hr) Value: 24 vs. 0
  misc_feature: MA Experiment 20000180 PARAMETER Experiment Name: At_Germinating_Seeds_P Parameter: Tissue Value: Germinating Seeds
  misc_feature: MA Experiment ID: 20000185 Result: Down-regulated in Transcription
  misc_feature: MA Experiment 20000185 PARAMETER Experiment Name: At_Roots__P Parameter: Age (day) Value: 7 vs. 21
  misc_feature: MA Experiment 20000185 PARAMETER Experiment Name: At_Roots__P Parameter: Organism Value: A. thaliana
  misc_feature: MA Experiment 20000185 PARAMETER Experiment Name: At_Roots__P Parameter: Tissue Value: Roots vs. Whole Plant
  misc_feature: MA Experiment ID: 20000234 Result: Up-regulated in Transcription
  misc_feature: MA Experiment 20000234 PARAMETER Experiment Name: At_Siliques_P Parameter: Age (day) Value: 21
  misc_feature: MA Experiment 20000234 PARAMETER Experiment Name: At_Siliques_P Parameter: Organism Value: A. thaliana
  misc_feature: MA Experiment 20000234 PARAMETER Experiment Name: At_Siliques_P Parameter: Plant Line Value: WS
  misc_feature: MA Experiment 20000234 PARAMETER Experiment Name: At_Siliques_P Parameter: Tissue Value: Less Than 5mm Siliques vs. Whole Plant
  misc_feature: MA Experiment ID: 20000264 Result: Up-regulated in Transcription
  misc_feature: MA Experiment 20000264 PARAMETER Experiment Name: At_Open_Flower_P Parameter: Age (day) Value: 21
  misc_feature: MA Experiment 20000264 PARAMETER Experiment Name: At_Open_Flower_P Parameter: Plant Line Value: WS
  misc_feature: MA Experiment 20000264 PARAMETER Experiment Name: At_Open_Flower_P Parameter: Tissue Value: Open Flower vs. Whole Plant
  misc_feature: MA Experiment ID: 20000265 Result: Up-regulated in Transcription
  misc_feature: MA Experiment 20000265 PARAMETER Experiment Name: At_Open_Flower_P Parameter: Age (day) Value: 21
  misc_feature: MA Experiment 20000265 PARAMETER Experiment Name: At_Open_Flower_P Parameter: Plant Line Value: WS
  misc_feature: MA Experiment 20000265 PARAMETER Experiment Name: At_Open_Flower_P Parameter: Tissue Value: Closed Flower vs. Whole Plant
  misc_feature: MA Experiment ID: 20000286 Result: Up-regulated in Transcription
  misc_feature: MA Experiment 20000286 PARAMETER Experiment Name: At_Open_Flower_P Parameter: Age (day) Value: 21
  misc_feature: MA Experiment 20000286 PARAMETER Experiment Name: At_Open_Flower_P Parameter: Plant Line Value: WS
  misc_feature: MA Experiment 20000286 PARAMETER Experiment Name: At_Open_Flower_P Parameter: Tissue Value: Half Open vs. Whole Plant
  misc_feature: MA Experiment ID: 20000436 Result: Down-regulated in Transcription
  misc_feature: MA Experiment 20000436 PARAMETER Experiment Name: At_Drought_P Parameter: Age (day) Value: 7
  misc_feature: MA Experiment 20000436 PARAMETER Experiment Name: At_Drought_P Parameter: Organism Value: A. thaliana
  misc_feature: MA Experiment 20000436 PARAMETER Experiment Name: At_Drought_P Parameter: Plant Line Value: WS
  misc_feature: MA Experiment 20000436 PARAMETER Experiment Name: At_Drought_P Parameter: Timepoint (hr) Value: 12
  misc_feature: MA Experiment 20000436 PARAMETER Experiment Name: At_Drought_P Parameter: Tissue Value: Whole Plant
  misc_feature: MA Experiment 20000436 PARAMETER Experiment Name: At_Drought_P Parameter: Treatment Value: Drought vs. No Drought
  misc_feature: MA Experiment ID: 20000437 Result: Down-regulated in Transcription
  misc_feature: MA Experiment 20000437 PARAMETER Experiment Name: At_Drought_P Parameter: Age (day) Value: 8
  misc_feature: MA Experiment 20000437 PARAMETER Experiment Name: At_Drought_P Parameter: Organism Value: A. thaliana
  misc_feature: MA Experiment 20000437 PARAMETER Experiment Name: At_Drought_P Parameter: Plant Line Value: WS
  misc_feature: MA Experiment 20000437 PARAMETER Experiment Name: At_Drought_P Parameter: Timepoint (hr) Value: 24
  misc_feature: MA Experiment 20000437 PARAMETER Experiment Name: At_Drought_P Parameter: Tissue Value: Whole Plant
  misc_feature: MA Experiment 20000437 PARAMETER Experiment Name: At_Drought_P Parameter: Treatment Value: Drought vs. No Drought
  misc_feature: MA Experiment ID: 20000438 Result: Up-regulated in Transcription
  misc_feature: MA Experiment 20000438 PARAMETER Experiment Name: At_Shoots__P Parameter: Age (day) Value: 14
  misc_feature: MA Experiment 20000438 PARAMETER Experiment Name: At_Shoots__P Parameter: Tissue Value: Shoots vs. Whole Plant
  misc_feature: MA Experiment ID: 20000439 Result: Down-regulated in Transcription
  misc_feature: MA Experiment 20000439 PARAMETER Experiment Name: At_Roots__P Parameter: Age (day) Value: 14 vs. 21
  misc_feature: MA Experiment 20000439 PARAMETER Experiment Name: At_Roots__P Parameter: Organism Value: A. thaliana
  misc_feature: MA Experiment 20000439 PARAMETER Experiment Name: At_Roots__P Parameter: Tissue Value: Roots vs. Whole Plant
  misc_feature: MA Experiment ID: 20000441 Result: Down-regulated in Transcription
  misc_feature: MA Experiment 20000441 PARAMETER Experiment Name: At_1uM_BR-BRZ__P Parameter: Tissue Value: Shoot Apices
  misc_feature: MA Experiment 20000441 PARAMETER Experiment Name: At_1uM_BR-BRZ__P Parameter: Treatment Value: 1uM BR vs. No Treatment
  misc_feature: MA Experiment ID: 20000451 Result: Up-regulated in Transcription
  misc_feature: MA Experiment 20000451 PARAMETER Experiment Name: At_CS6879_Shoots-Roots_P Parameter: Age (day) Value: 14
  misc_feature: MA Experiment 20000451 PARAMETER Experiment Name: At_CS6879_Shoots-Roots_P Parameter: Organism Value: A. thaliana
  misc_feature: MA Experiment 20000451 PARAMETER Experiment Name: At_CS6879_Shoots-Roots_P Parameter: Plant Line Value: CS6879 vs. WS
  misc_feature: MA Experiment 20000451 PARAMETER Experiment Name: At_CS6879_Shoots-Roots_P Parameter: Tissue Value: Roots
  misc_feature: MA Experiment ID: 20000573 Result: Down-regulated in Transcription
  misc_feature: MA Experiment 20000573 PARAMETER Experiment Name: At_100uM_ABA_Mutants__P Parameter: Organism Value: A. thaliana
  misc_feature: MA Experiment 20000573 PARAMETER Experiment Name: At_100uM_ABA_Mutants__P Parameter: Plant Line Value: CS22 vs. Ler wt
  misc_feature: MA Experiment 20000573 PARAMETER Experiment Name: At_100uM_ABA_Mutants__P Parameter: Timepoint (hr) Value: N/A
  misc_feature: MA Experiment 20000573 PARAMETER Experiment Name: At_100uM_ABA_Mutants__P Parameter: Tissue Value: Whole Plant
  misc_feature: MA Experiment 20000573 PARAMETER Experiment Name: At_100uM_ABA_Mutants__P Parameter: Treatment Value: None
  misc_feature: MA Experiment ID: 20000794 Result: Up-regulated in Transcription
  misc_feature: MA Experiment 20000794 PARAMETER Experiment Name: At_Petals_P Parameter: Age (day) Value: 23-25 days
  misc_feature: MA Experiment 20000794 PARAMETER Experiment Name: At_Petals_P Parameter: Plant Line Value: WS
  misc_feature: MA Experiment 20000794 PARAMETER Experiment Name: At_Petals_P Parameter: Tissue Value: Petals vs. Whole plant
  misc_feature: MA Experiment ID: 20001248 Result: Down-regulated in Transcription
  misc_feature: MA Experiment 20001248 PARAMETER Experiment Name: At_Far-red-induction_P Parameter: Age (day) Value: 7
  misc_feature: MA Experiment 20001248 PARAMETER Experiment Name: At_Far-red-induction_P Parameter: Light Value: Far-red vs. White
  misc_feature: MA Experiment 20001248 PARAMETER Experiment Name: At_Far-red-induction_P Parameter: Organism Value: A. thaliana
  misc_feature: MA Experiment 20001248 PARAMETER Experiment Name: At_Far-red-induction_P Parameter: Plant Line Value: Columbia
  misc_feature: MA Experiment 20001248 PARAMETER Experiment Name: At_Far-red-induction_P Parameter: Timepoint (hr) Value: 4
  misc_feature: MA Experiment 20001248 PARAMETER Experiment Name: At_Far-red-induction_P Parameter: Tissue Value: Whole Plant
  misc_feature: MA Experiment ID: 20001450 Result: Down-regulated in Transcription
  misc_feature: MA Experiment 20001450 PARAMETER Experiment Name: At_Far-red-induction_P Parameter: Age (day) Value: 7
  misc_feature: MA Experiment 20001450 PARAMETER Experiment Name: At_Far-red-induction_P Parameter: Light Value: Far-red vs. White
  misc_feature: MA Experiment 20001450 PARAMETER Experiment Name: At_Far-red-induction_P Parameter: Organism Value: A. thaliana
  misc_feature: MA Experiment 20001450 PARAMETER Experiment Name: At_Far-red-induction_P Parameter: Plant Line Value: Columbia
  misc_feature: MA Experiment 20001450 PARAMETER Experiment Name: At_Far-red-induction_P Parameter: Timepoint (hr) Value: 8
  misc_feature: MA Experiment 20001450 PARAMETER Experiment Name: At_Far-red-induction_P Parameter: Tissue Value: Whole Plant
  misc_feature: MA Experiment ID: 20001558 Result: Up-regulated in Transcription
  misc_feature: MA Experiment 20001558 PARAMETER Experiment Name: At_Drought_Soil_Dry_P Parameter: Age (day) Value: 27
  misc_feature: MA Experiment 20001558 PARAMETER Experiment Name: At_Drought_Soil_Dry_P Parameter: Organism Value: A. thaliana
  misc_feature: MA Experiment 20001558 PARAMETER Experiment Name: At_Drought_Soil_Dry_P Parameter: Plant Line Value: WS
  misc_feature: MA Experiment 20001558 PARAMETER Experiment Name: At_Drought_Soil_Dry_P Parameter: Post Timepoint (hr) Value: 6
  misc_feature: MA Experiment 20001558 PARAMETER Experiment Name: At_Drought_Soil_Dry_P Parameter: Post-Treatment Value: Re-Water vs. No Drought
  misc_feature: MA Experiment 20001558 PARAMETER Experiment Name: At_Drought_Soil_Dry_P Parameter: Timepoint (day) Value: 13
  misc_feature: MA Experiment 20001558 PARAMETER Experiment Name: At_Drought_Soil_Dry_P Parameter: Treatment Value: Drought vs. No Drought
  misc_feature: MA Experiment ID: 20001560 Result: Up-regulated in Transcription
  misc_feature: MA Experiment 20001560 PARAMETER Experiment Name: At_Drought_Soil_Dry_P Parameter: Age (day) Value: 28
  misc_feature: MA Experiment 20001560 PARAMETER Experiment Name: At_Drought_Soil_Dry_P Parameter: Organism Value: A. thaliana
  misc_feature: MA Experiment 20001560 PARAMETER Experiment Name: At_Drought_Soil_Dry_P Parameter: Plant Line Value: WS
  misc_feature: MA Experiment 20001560 PARAMETER Experiment Name: At_Drought_Soil_Dry_P Parameter: Post Timepoint (hr) Value: None
  misc_feature: MA Experiment 20001560 PARAMETER Experiment Name: At_Drought_Soil_Dry_P Parameter: Post-Treatment Value: None
  misc_feature: MA Experiment 20001560 PARAMETER Experiment Name: At_Drought_Soil_Dry_P Parameter: Timepoint (day) Value: 14
  misc_feature: MA Experiment 20001560 PARAMETER Experiment Name: At_Drought_Soil_Dry_P Parameter: Treatment Value: Drought vs. No Drought

SEQ ID NO: 32859 - protein, 197 aa, Arabidopsis thaliana; identical to SEQ ID NO: 29269
  peptide (1)..(197): Ceres Seq. ID no. 12466453
  misc_feature (46)..(124): Pfam Name: Protease inhibitor/seed storage/LTP family Pfam Description: Protease inhibitor/seed storage/LTP family
  misc_feature (19)..(124): Homolog of NCBI NO: 18407534 NR Description: expressed protein
  misc_feature (25)..(126): Homolog of NCBI NO: 25553602 NR Description: OJ1656_E11.34 [Oryza sativa (japonica
  misc_feature (19)..(175): Homolog of NCBI NO: 21592774 NR Description: unknown [Arabidopsis thaliana]
  misc_feature (21)..(141): Homolog of NCBI NO: 21555220 NR Description: unknown [Arabidopsis thaliana]
  misc_feature (16)..(141): Homolog of NCBI NO: 15231070 NR Description: putative protein
  misc_feature (11)..(185): Homolog of NCBI NO: 34394084 NR Description: lipid transfer protein-like
  misc_feature (23)..(197): Homolog of NCBI NO: 15224862 NR Description: unknown protein; protein id: At2g44290.1
  misc_feature (23)..(197): Homolog of NCBI NO: 15224863 NR Description: unknown protein; protein id: At2g44300.1
  misc_feature (30)..(197): Homolog of NCBI NO: 21537387 NR Description: unknown [Arabidopsis thaliana]
  misc_feature (14)..(197): Homolog of NCBI NO: 18405294 NR Description: expressed protein

SEQ ID NO: 32860 - protein, 184 aa, Arabidopsis thaliana; identical to SEQ ID NO: 29270
  peptide (1)..(184): Ceres Seq. ID no. 12466454
  misc_feature (33)..(111): Pfam Name: Protease inhibitor/seed storage/LTP family Pfam Description: Protease inhibitor/seed storage/LTP family
  misc_feature (6)..(111): Homolog of NCBI NO: 18407534 NR Description: expressed protein
  misc_feature (12)..(113): Homolog of NCBI NO: 25553602 NR Description: OJ1656_E11.34 [Oryza sativa (japonica
  misc_feature (6)..(162): Homolog of NCBI NO: 21592774 NR Description: unknown [Arabidopsis thaliana]
  misc_feature (8)..(128): Homolog of NCBI NO: 21555220 NR Description: unknown [Arabidopsis thaliana]
  misc_feature (3)..(128): Homolog of NCBI NO: 15231070 NR Description: putative protein
  misc_feature (1)..(172): Homolog of NCBI NO: 34394084 NR Description: lipid transfer protein-like
  misc_feature (10)..(184): Homolog of NCBI NO: 15224862 NR Description: unknown protein; protein id: At2g44290.1
  misc_feature (10)..(184): Homolog of NCBI NO: 15224863 NR Description: unknown protein; protein id: At2g44300.1
  misc_feature (17)..(184): Homolog of NCBI NO: 21537387 NR Description: unknown [Arabidopsis thaliana]
  misc_feature (1)..(184): Homolog of NCBI NO: 18405294 NR Description: expressed protein

SEQ ID NO: 32861 - protein, 168 aa, Arabidopsis thaliana; identical to SEQ ID NO: 29271
  peptide (1)..(168): Ceres Seq. ID no. 12466455
  misc_feature (17)..(95): Pfam Name: Protease inhibitor/seed storage/LTP family Pfam Description: Protease inhibitor/seed storage/LTP family
  misc_feature (1)..(95): Homolog of NCBI NO: 18407534 NR Description: expressed protein
  misc_feature (1)..(97): Homolog of NCBI NO: 25553602 NR Description: OJ1656_E11.34 [Oryza sativa (japonica
  misc_feature (1)..(146): Homolog of NCBI NO: 21592774 NR Description: unknown [Arabidopsis thaliana]
  misc_feature (1)..(112): Homolog of NCBI NO: 21555220 NR Description: unknown [Arabidopsis thaliana]
  misc_feature (1)..(112): Homolog of NCBI NO: 15231070 NR Description: putative protein
  misc_feature (1)..(156): Homolog of NCBI NO: 34394084 NR Description: lipid transfer protein-like
  misc_feature (1)..(168): Homolog of NCBI NO: 15224862 NR Description: unknown protein; protein id: At2g44290.1
  misc_feature (1)..(168): Homolog of NCBI NO: 15224863 NR Description: unknown protein; protein id: At2g44300.1
  misc_feature (1)..(168): Homolog of NCBI NO: 21537387 NR Description: unknown [Arabidopsis thaliana]
  misc_feature (1)..(168): Homolog of NCBI NO: 18405294 NR Description: expressed protein

SEQ ID NO: 32862 - DNA, 703 bp, Arabidopsis thaliana; identical to SEQ ID NO: 29272
  misc_feature (1)..(703): Ceres Seq. ID no. 12393111
  misc_feature: MA Experiment ID: 108461 Result: Up-regulated in Transcription
  misc_feature: MA Experiment 108461 PARAMETER Experiment Name: At_Germinating_Seeds_cDNA_P Parameter: Age (day) Value: 1 vs. 0
  misc_feature: MA Experiment 108461 PARAMETER Experiment Name: At_Germinating_Seeds_cDNA_P Parameter: Tissue Value: Germinating Seeds
  misc_feature: MA Experiment ID: 108474 Result: Down-regulated in Transcription
  misc_feature: MA Experiment 108474 PARAMETER Experiment Name: At_Drought_Flowers_cDNA_P Parameter: Timepoint (hr) Value: null
  misc_feature: MA Experiment 108474 PARAMETER Experiment Name: At_Drought_Flowers_cDNA_P Parameter: Treatment Value: Drought vs. No Drought
  misc_feature: MA Experiment ID: 108489 Result: Up-regulated in Transcription
  misc_feature: MA Experiment ID: 20000111 Result: Up-regulated in Transcription
  misc_feature: MA Experiment 20000111 PARAMETER Experiment Name: At_42deg_Heat_cDNA_P Parameter: Temperature (deg C) Value: 42 vs. 22
  misc_feature: MA Experiment 20000111 PARAMETER Experiment Name: At_42deg_Heat_cDNA_P Parameter: Timepoint (hr) Value: 6
  misc_feature: MA Experiment 20000111 PARAMETER Experiment Name: At_42deg_Heat_cDNA_P Parameter: Tissue Value: Aerial
  misc_feature: MA Experiment ID: 20000113 Result: Up-regulated in Transcription
  misc_feature: MA Experiment 20000113 PARAMETER Experiment Name: At_42deg_Heat_cDNA_P Parameter: Temperature (deg C) Value: 42 vs. 22
  misc_feature: MA Experiment 20000113 PARAMETER Experiment Name: At_42deg_Heat_cDNA_P Parameter: Timepoint (hr) Value: 8
  misc_feature: MA Experiment 20000113 PARAMETER Experiment Name: At_42deg_Heat_cDNA_P Parameter: Tissue Value: Aerial
  misc_feature: MA Experiment ID: 20000144 Result: Up-regulated in Transcription
  misc_feature: MA Experiment 20000144 PARAMETER Experiment Name: At_42deg_Heat_cDNA_P Parameter: Temperature (deg C) Value: 42 vs. 22
  misc_feature: MA Experiment 20000144 PARAMETER Experiment Name: At_42deg_Heat_cDNA_P Parameter: Timepoint (hr) Value: 1
  misc_feature: MA Experiment 20000144 PARAMETER Experiment Name: At_42deg_Heat_cDNA_P Parameter: Tissue Value: Aerial
  misc_feature: MA Experiment ID: 20000265 Result: Up-regulated in Transcription
  misc_feature: MA Experiment 20000265 PARAMETER Experiment Name: At_Open_Flower_P Parameter: Age (day) Value: 21
  misc_feature: MA Experiment 20000265 PARAMETER Experiment Name: At_Open_Flower_P Parameter: Plant Line Value: WS
  misc_feature: MA Experiment 20000265 PARAMETER Experiment Name: At_Open_Flower_P Parameter: Tissue Value: Closed Flower vs. Whole Plant
  misc_feature: MA Experiment ID: 20000286 Result: Up-regulated in Transcription
  misc_feature: MA Experiment 20000286 PARAMETER Experiment Name: At_Open_Flower_P Parameter: Age (day) Value: 21
  misc_feature: MA Experiment 20000286 PARAMETER Experiment Name: At_Open_Flower_P Parameter: Plant Line Value: WS
  misc_feature: MA Experiment 20000286 PARAMETER Experiment Name: At_Open_Flower_P Parameter: Tissue Value: Half Open vs. Whole Plant
  misc_feature: MA Experiment ID: 20001910 Result: Up-regulated in Transcription
  misc_feature: MA Experiment 20001910 PARAMETER Experiment Name: At_Drought_Reproduction_P Parameter: Age (day) Value: 37
  misc_feature: MA Experiment 20001910 PARAMETER Experiment Name: At_Drought_Reproduction_P Parameter: Organism Value: A. thaliana
  misc_feature: MA Experiment 20001910 PARAMETER Experiment Name: At_Drought_Reproduction_P Parameter: Plant Line Value: WS
  misc_feature: MA Experiment 20001910 PARAMETER Experiment Name: At_Drought_Reproduction_P Parameter: Timepoint (day) Value: 7
  misc_feature: MA Experiment 20001910 PARAMETER Experiment Name: At_Drought_Reproduction_P Parameter: Tissue Value: Flowers
  misc_feature: MA Experiment 20001910 PARAMETER Experiment Name: At_Drought_Reproduction_P Parameter: Treatment Value: Drought vs. No Drought

SEQ ID NO: 32863 - protein, 134 aa, Arabidopsis thaliana; identical to SEQ ID NO: 29273
  peptide (1)..(134): Ceres Seq. ID no. 12393112
  misc_feature (2)..(129): Pfam Name: Profilin Pfam Description: Profilin
  misc_feature (1)..(133): Homolog of NCBI NO: 2129962 NR Description: profilin - common tobacco
  misc_feature (1)..(134): Homolog of NCBI NO: 464471 NR Description: PROFILIN 1 (POLLEN ALLERGEN PHL P 11) (PHL P XI)
  misc_feature (1)..(133): Homolog of NCBI NO: 6469497 NR Description: profilin [Nicotiana tabacum]
  misc_feature (1)..(134): Homolog of NCBI NO: 1942360 NR Description: Birch Pollen Profilin
  misc_feature (1)..(134): Homolog of NCBI NO: 3914432 NR Description: PROFILIN 2/4 (POLLEN ALLERGEN PHL P 11) (PHL P
  misc_feature (1)..(134): Homolog of NCBI NO: 3914446 NR Description: Profilin (Pollen allergen Mer a 1)
  misc_feature (1)..(134): Homolog of NCBI NO: 15224839 NR Description: profilin 4; protein id: At2g19770.1, supported by
  misc_feature (1)..(134): Homolog of NCBI NO: 14423854 NR Description: Profilin
  misc_feature (1)..(134): Homolog of NCBI NO: 28393116 NR Description: putative profilin 3 [Arabidopsis thaliana]
  misc_feature (1)..(134): Homolog of NCBI NO: 15233536 NR Description: profilin 3; protein id: At4g29340.1, supported by

SEQ ID NO: 32864 - protein, 123 aa, Arabidopsis thaliana; identical to SEQ ID NO: 29274
  peptide (1)..(123): Ceres Seq. ID no. 12393113
  misc_feature (1)..(118): Pfam Name: Profilin Pfam Description: Profilin
  misc_feature (1)..(122): Homolog of NCBI NO: 2129962 NR Description: profilin - common tobacco
  misc_feature (1)..(123): Homolog of NCBI NO: 464471 NR Description: PROFILIN 1 (POLLEN ALLERGEN PHL P 11) (PHL P XI)
  misc_feature (1)..(122): Homolog of NCBI NO: 6469497 NR Description: profilin [Nicotiana tabacum]
  misc_feature (1)..(123): Homolog of NCBI NO: 1942360 NR Description: Birch Pollen Profilin
  misc_feature (1)..(123): Homolog of NCBI NO: 3914432 NR Description: PROFILIN 2/4 (POLLEN ALLERGEN PHL P 11) (PHL P
  misc_feature (1)..(123): Homolog of NCBI NO: 3914446 NR Description: Profilin (Pollen allergen Mer a 1)
  misc_feature (1)..(123): Homolog of NCBI NO: 15224839 NR Description: profilin 4; protein id: At2g19770.1, supported by
  misc_feature (1)..(123): Homolog of NCBI NO: 14423854 NR Description: Profilin
  misc_feature (1)..(123): Homolog of NCBI NO: 28393116 NR Description: putative profilin 3 [Arabidopsis thaliana]
  misc_feature (1)..(123): Homolog of NCBI NO: 15233536 NR Description: profilin 3; protein id: At4g29340.1, supported by

SEQ ID NO: 32865 - protein, 81 aa, Arabidopsis thaliana; identical to SEQ ID NO: 29275
  peptide (1)..(81): Ceres Seq. ID no. 12393114
  misc_feature (1)..(76): Pfam Name: Profilin Pfam Description: Profilin
  misc_feature (1)..(80): Homolog of NCBI NO: 2129962 NR Description: profilin - common tobacco
  misc_feature (1)..(81): Homolog of NCBI NO: 464471 NR Description: PROFILIN 1 (POLLEN ALLERGEN PHL P 11) (PHL P XI)
  misc_feature (1)..(80): Homolog of NCBI NO: 6469497 NR Description: profilin [Nicotiana tabacum]
  misc_feature (1)..(81): Homolog of NCBI NO: 1942360 NR Description: Birch Pollen Profilin
  misc_feature (1)..(81): Homolog of NCBI NO: 3914432 NR Description: PROFILIN 2/4 (POLLEN ALLERGEN PHL P 11) (PHL P
  misc_feature (1)..(81): Homolog of NCBI NO: 3914446 NR Description: Profilin (Pollen allergen Mer a 1)
  misc_feature (1)..(81): Homolog of NCBI NO: 15224839 NR Description: profilin 4; protein id: At2g19770.1, supported by
  misc_feature (1)..(81): Homolog of NCBI NO: 14423854 NR Description: Profilin
  misc_feature (1)..(81): Homolog of NCBI NO: 28393116 NR Description: putative profilin 3 [Arabidopsis thaliana]
  misc_feature (1)..(81): Homolog of NCBI NO: 15233536 NR Description: profilin 3; protein id: At4g29340.1, supported by

SEQ ID NO: 32866 - DNA, 684 bp, Arabidopsis thaliana; identical to SEQ ID NO: 29276
  misc_feature (1)..(684): Ceres Seq. ID no. 13593010
  misc_feature: MA Experiment ID: 108434 Result: Down-regulated in Transcription
  misc_feature: MA Experiment 108434 PARAMETER Experiment Name: At_Root_Tips_cDNA_P Parameter: Tissue Value: Root Tips
  misc_feature: MA Experiment ID: 108488 Result: Down-regulated in Transcription
  misc_feature: MA Experiment ID: 108573 Result: Up-regulated in Transcription
  misc_feature: MA Experiment 108573 PARAMETER Experiment Name: At_Drought_cDNA_P Parameter: Timepoint (hr) Value: 6
  misc_feature: MA Experiment 108573 PARAMETER Experiment Name: At_Drought_cDNA_P Parameter: Tissue Value: Aerial
  misc_feature: MA Experiment 108573 PARAMETER Experiment Name: At_Drought_cDNA_P Parameter: Treatment Value: Drought vs. No Drought
  misc_feature: MA Experiment ID: 108579 Result: Up-regulated in Transcription
  misc_feature: MA Experiment 108579 PARAMETER Experiment Name: At_4deg_Cold_cDNA_P Parameter: Temperature (deg C) Value: 4 vs. 22
  misc_feature: MA Experiment 108579 PARAMETER Experiment Name: At_4deg_Cold_cDNA_P Parameter: Timepoint (hr) Value: 6
  misc_feature: MA Experiment 108579 PARAMETER Experiment Name: At_4deg_Cold_cDNA_P Parameter: Tissue Value: Aerial
  misc_feature: MA Experiment ID: 108585 Result: Up-regulated in Transcription
  misc_feature: MA Experiment 108585 PARAMETER Experiment Name: At_5mM_NaNP_cDNA_P Parameter: Timepoint (hr) Value: 6
  misc_feature: MA Experiment 108585 PARAMETER Experiment Name: At_5mM_NaNP_cDNA_P Parameter: Tissue Value: Aerial
  misc_feature: MA Experiment 108585 PARAMETER Experiment Name: At_5mM_NaNP_cDNA_P Parameter: Treatment Value: null
  misc_feature: MA Experiment ID: 20000224 Result: Down-regulated in Transcription
  misc_feature: MA Experiment ID: 20000307 Result: Up-regulated in Transcription
  misc_feature: MA Experiment 20000307 PARAMETER Experiment Name: At_Germinating_Seeds_Sub_P Parameter: Age (hr) Value: 24 vs. 0
  misc_feature: MA Experiment 20000307 PARAMETER Experiment Name: At_Germinating_Seeds_Sub_P Parameter: Organism Value: A. thaliana
  misc_feature: MA Experiment 20000307 PARAMETER Experiment Name: At_Germinating_Seeds_Sub_P Parameter: Plant Line Value: WS
  misc_feature: MA Experiment 20000307 PARAMETER Experiment Name: At_Germinating_Seeds_Sub_P Parameter: Tissue Value: Germinating Seeds
  misc_feature: MA Experiment ID: 20000314 Result: Down-regulated in Transcription
  misc_feature: MA Experiment 20000314 PARAMETER Experiment Name: At_14day_Shoots-Roots_Sub_P Parameter: Age (day) Value: 14
  misc_feature: MA Experiment 20000314 PARAMETER Experiment Name: At_14day_Shoots-Roots_Sub_P Parameter: Organism Value: A. thaliana
  misc_feature: MA Experiment 20000314 PARAMETER Experiment Name: At_14day_Shoots-Roots_Sub_P Parameter: Plant Line Value: WS
  misc_feature: MA Experiment 20000314 PARAMETER Experiment Name: At_14day_Shoots-Roots_Sub_P Parameter: Tissue Value: Roots vs. Whole Plant
  misc_feature: MA Experiment ID: 20000329 Result: Up-regulated in Transcription
  misc_feature: MA Experiment 20000329 PARAMETER Experiment Name: At_4deg_Cold_Sub_P Parameter: Age (day) Value: 14
  misc_feature: MA Experiment 20000329 PARAMETER Experiment Name: At_4deg_Cold_Sub_P Parameter: Organism Value: A. thaliana
  misc_feature: MA Experiment 20000329 PARAMETER Experiment Name: At_4deg_Cold_Sub_P Parameter: Plant Line Value: WS
  misc_feature: MA Experiment 20000329 PARAMETER Experiment Name: At_4deg_Cold_Sub_P Parameter: Temperature (deg C) Value: 4 vs. 22
  misc_feature: MA Experiment 20000329 PARAMETER Experiment Name: At_4deg_Cold_Sub_P Parameter: Timepoint (hr) Value: 6
  misc_feature: MA Experiment 20000329 PARAMETER Experiment Name: At_4deg_Cold_Sub_P Parameter: Tissue Value: Aerial

SEQ ID NO: 32867 - protein, 141 aa, Arabidopsis thaliana; identical to SEQ ID NO: 29277
  peptide (1)..(141): Ceres Seq. ID no. 13593011
  misc_feature (66)..(140): Homolog of NCBI NO: 8515092 NR Description: adhesive/proline-rich protein homolog [Pinus
  misc_feature (44)..(126): Homolog of NCBI NO: 34901106 NR Description: contains ESTs
  misc_feature (44)..(141): Homolog of NCBI NO: 21618167 NR Description: adhesive/proline-rich protein homolog
  misc_feature (44)..(141): Homolog of NCBI NO: 18425209 NR Description: expressed protein [Arabidopsis thaliana]
  misc_feature (41)..(141): Homolog of NCBI NO: 15229624 NR Description: proline-rich protein family [Arabidopsis
  misc_feature (44)..(141): Homolog of NCBI NO: 1808688 NR Description: hypothetical protein [Sporobolus stapfianus]
  misc_feature (44)..(141): Homolog of NCBI NO: 34393718 NR Description: adhesive/proline-rich protein homolog-like
  misc_feature (44)..(141): Homolog of NCBI NO: 21554421 NR Description: unknown [Arabidopsis thaliana]
  misc_feature (44)..(141): Homolog of NCBI NO: 40538901 NR Description: expressed protein [Oryza sativa (japonica
  misc_feature (44)..(141): Homolog of NCBI NO: 15227350 NR Description: proline-rich protein family [Arabidopsis

SEQ ID NO: 32868 - protein, 98 aa, Arabidopsis thaliana; identical to SEQ ID NO: 29278
  peptide (1)..(98): Ceres Seq. ID no. 13593012
  misc_feature (23)..(97): Homolog of NCBI NO: 8515092 NR Description: adhesive/proline-rich protein homolog [Pinus
  misc_feature (1)..(83): Homolog of NCBI NO: 34901106 NR Description: contains ESTs
  misc_feature (1)..(98): Homolog of NCBI NO: 21618167 NR Description: adhesive/proline-rich protein homolog
  misc_feature (1)..(98): Homolog of NCBI NO: 18425209 NR Description: expressed protein [Arabidopsis thaliana]
  misc_feature (1)..(98): Homolog of NCBI NO: 15229624 NR Description: proline-rich protein family [Arabidopsis
  misc_feature (1)..(98): Homolog of NCBI NO: 1808688 NR Description: hypothetical protein [Sporobolus stapfianus]
  misc_feature (1)..(98): Homolog of NCBI NO: 34393718 NR Description: adhesive/proline-rich protein homolog-like
  misc_feature (1)..(98): Homolog of NCBI NO: 21554421 NR Description: unknown [Arabidopsis thaliana]
  misc_feature (1)..(98): Homolog of NCBI NO: 40538901 NR Description: expressed protein [Oryza sativa (japonica
  misc_feature (1)..(98): Homolog of NCBI NO: 15227350 NR Description: proline-rich protein family [Arabidopsis

SEQ ID NO: 32869 - DNA, 841 bp, Arabidopsis thaliana; identical to SEQ ID NO: 29279
  misc_feature (1)..(841): Ceres Seq. ID no. 12379214
  misc_feature: MA Experiment ID: 108435 Result: Down-regulated in Transcription
  misc_feature: MA Experiment 108435 PARAMETER Experiment Name: At_stm_Mutants_cDNA_P Parameter: Plant Line Value: wt Landsburg vs stm
  misc_feature: MA Experiment 108435 PARAMETER Experiment Name: At_stm_Mutants_cDNA_P Parameter: Tissue Value: Shoot Apical Meristem Region
  misc_feature: MA Experiment ID: 108461 Result: Up-regulated in Transcription
  misc_feature: MA Experiment 108461 PARAMETER Experiment Name: At_Germinating_Seeds_cDNA_P Parameter: Age (day) Value: 1 vs. 0
  misc_feature: MA Experiment 108461 PARAMETER Experiment Name: At_Germinating_Seeds_cDNA_P Parameter: Tissue Value: Germinating Seeds
  misc_feature: MA Experiment ID: 108462 Result: Up-regulated in Transcription
  misc_feature: MA Experiment 108462 PARAMETER Experiment Name: At_Germinating_Seeds_cDNA_P Parameter: Age (day) Value: 2 vs. 0
  misc_feature: MA Experiment 108462 PARAMETER Experiment Name: At_Germinating_Seeds_cDNA_P Parameter: Tissue Value: Germinating Seeds
  misc_feature: MA Experiment ID: 108463 Result: Up-regulated in Transcription
  misc_feature: MA Experiment 108463 PARAMETER Experiment Name: At_Germinating_Seeds_cDNA_P Parameter: Age (day) Value: 3 vs. 0
  misc_feature: MA Experiment 108463 PARAMETER Experiment Name: At_Germinating_Seeds_cDNA_P Parameter: Tissue Value: Germinating Seeds
  misc_feature: MA Experiment ID: 108464 Result: Up-regulated in Transcription
  misc_feature: MA Experiment 108464 PARAMETER Experiment Name: At_Germinating_Seeds_cDNA_P Parameter: Age (day) Value: 4 vs. 0
  misc_feature: MA Experiment 108464 PARAMETER Experiment Name: At_Germinating_Seeds_cDNA_P Parameter: Tissue Value: Germinating Seeds
  misc_feature: MA Experiment ID: 108469 Result: Down-regulated in Transcription
  misc_feature: MA Experiment ID: 108561 Result: Down-regulated in Transcription
  misc_feature: MA Experiment 108561 PARAMETER Experiment Name: At_100uM_ABA_cDNA_P Parameter: Timepoint (hr) Value: 6
  misc_feature: MA Experiment 108561 PARAMETER Experiment Name: At_100uM_ABA_cDNA_P Parameter: Tissue Value: Aerial
  misc_feature: MA Experiment 108561 PARAMETER Experiment Name: At_100uM_ABA_cDNA_P Parameter: Treatment Value: 100uM ABA vs. No Treatment
  misc_feature: MA Experiment ID: 108573 Result: Down-regulated in Transcription
  misc_feature: MA Experiment 108573 PARAMETER Experiment Name: At_Drought_cDNA_P Parameter: Timepoint (hr) Value: 6
  misc_feature: MA Experiment 108573 PARAMETER Experiment Name: At_Drought_cDNA_P Parameter: Tissue Value: Aerial
  misc_feature: MA Experiment 108573 PARAMETER Experiment Name: At_Drought_cDNA_P Parameter: Treatment Value: Drought vs. No Drought
  misc_feature: MA Experiment ID: 108579 Result: Up-regulated in Transcription
  misc_feature: MA Experiment 108579 PARAMETER Experiment Name: At_4deg_Cold_cDNA_P Parameter: Temperature (deg C) Value: 4 vs. 22
  misc_feature: MA Experiment 108579 PARAMETER Experiment Name: At_4deg_Cold_cDNA_P Parameter: Timepoint (hr) Value: 6
  misc_feature: MA Experiment 108579 PARAMETER Experiment Name: At_4deg_Cold_cDNA_P Parameter: Tissue Value: Aerial
  misc_feature: MA Experiment ID: 108585 Result: Down-regulated in Transcription
  misc_feature: MA Experiment 108585 PARAMETER Experiment Name: At_5mM_NaNP_cDNA_P Parameter: Timepoint (hr) Value: 6
  misc_feature: MA Experiment 108585 PARAMETER Experiment Name: At_5mM_NaNP_cDNA_P Parameter: Tissue Value: Aerial
  misc_feature: MA Experiment 108585 PARAMETER Experiment Name: At_5mM_NaNP_cDNA_P Parameter: Treatment Value: null
  misc_feature: MA Experiment ID: 108595 Result: Down-regulated in Transcription
  misc_feature: MA Experiment 108595 PARAMETER Experiment Name: At_Ler-pi_Ovule_cDNA_P Parameter: Plant Line Value: null
  misc_feature: MA Experiment ID: 108605 Result: Down-regulated in Transcription
  misc_feature: MA Experiment 108605 PARAMETER Experiment Name: At_100uM_ABA_cDNA_P Parameter: Timepoint (hr) Value: 6
  misc_feature: MA Experiment 108605 PARAMETER Experiment Name: At_100uM_ABA_cDNA_P Parameter: Tissue Value: Aerial
  misc_feature: MA Experiment 108605 PARAMETER Experiment Name: At_100uM_ABA_cDNA_P Parameter: Treatment Value: 100uM ABA vs. No Treatment
  misc_feature: MA Experiment ID: 108607 Result: Down-regulated in Transcription
  misc_feature: MA Experiment 108607 PARAMETER Experiment Name: At_100uM_ABA_cDNA_P Parameter: Timepoint (hr) Value: 4
  misc_feature: MA Experiment 108607 PARAMETER Experiment Name: At_100uM_ABA_cDNA_P Parameter: Tissue Value: Aerial
  misc_feature: MA Experiment 108607 PARAMETER Experiment Name: At_100uM_ABA_cDNA_P Parameter: Treatment Value: 100uM ABA vs. No Treatment
  misc_feature: MA Experiment ID: 20000069 Result: Down-regulated in Transcription
  misc_feature: MA Experiment 20000069 PARAMETER Experiment Name: At_100uM_ABA_Mutants_cDNA_P Parameter: Plant Line Value: CS23
  misc_feature: MA Experiment 20000069 PARAMETER Experiment Name: At_100uM_ABA_Mutants_cDNA_P Parameter: Timepoint (hr) Value: 6
  misc_feature: MA Experiment 20000069 PARAMETER Experiment Name: At_100uM_ABA_Mutants_cDNA_P Parameter: Tissue Value: Aerial
  misc_feature: MA Experiment 20000069 PARAMETER Experiment Name: At_100uM_ABA_Mutants_cDNA_P Parameter: Treatment Value: 100uM ABA vs. No Treatment
  misc_feature: MA Experiment ID: 20000070 Result: Down-regulated in Transcription
  misc_feature: MA Experiment 20000070 PARAMETER Experiment Name: At_100uM_ABA_Mutants_cDNA_P Parameter: Plant Line Value: CS24
  misc_feature: MA Experiment 20000070 PARAMETER Experiment Name: At_100uM_ABA_Mutants_cDNA_P Parameter: Timepoint (hr) Value: 6
  misc_feature: MA Experiment 20000070 PARAMETER Experiment Name: At_100uM_ABA_Mutants_cDNA_P Parameter: Tissue Value: Aerial
  misc_feature: MA Experiment 20000070 PARAMETER Experiment Name: At_100uM_ABA_Mutants_cDNA_P Parameter: Treatment Value: 100uM ABA vs. No Treatment
  misc_feature: MA Experiment ID: 20000071 Result: Down-regulated in Transcription
  misc_feature: MA Experiment 20000071 PARAMETER Experiment Name: At_100uM_ABA_Mutants_cDNA_P Parameter: Plant Line Value: CS8104
  misc_feature: MA Experiment 20000071 PARAMETER Experiment Name: At_100uM_ABA_Mutants_cDNA_P Parameter: Timepoint (hr) Value: 6
  misc_feature: MA Experiment 20000071 PARAMETER Experiment Name: At_100uM_ABA_Mutants_cDNA_P Parameter: Tissue Value: Aerial
  misc_feature: MA Experiment 20000071 PARAMETER Experiment Name: At_100uM_ABA_Mutants_cDNA_P Parameter: Treatment Value: 100uM ABA vs. No Treatment
  misc_feature: MA Experiment ID: 20000086 Result: Down-regulated in Transcription
  misc_feature: MA Experiment 20000086 PARAMETER Experiment Name: At_100uM_ABA_Mutants_cDNA_P Parameter: Plant Line Value: CS22
  misc_feature: MA Experiment 20000086 PARAMETER Experiment Name: At_100uM_ABA_Mutants_cDNA_P Parameter: Timepoint (hr) Value: 6
  misc_feature: MA Experiment 20000086 PARAMETER Experiment Name: At_100uM_ABA_Mutants_cDNA_P Parameter: Tissue Value: Aerial
  misc_feature: MA Experiment 20000086 PARAMETER Experiment Name: At_100uM_ABA_Mutants_cDNA_P Parameter: Treatment Value: 100uM ABA vs. No Treatment
  misc_feature: MA Experiment ID: 20000087 Result: Down-regulated in Transcription
  misc_feature: MA Experiment 20000087 PARAMETER Experiment Name: At_100uM_ABA_Mutants_cDNA_P Parameter: Plant Line Value: WS
  misc_feature: MA Experiment 20000087 PARAMETER Experiment Name: At_100uM_ABA_Mutants_cDNA_P Parameter: Timepoint (hr) Value: 6
  misc_feature: MA Experiment 20000087 PARAMETER Experiment Name: At_100uM_ABA_Mutants_cDNA_P Parameter: Tissue Value: Aerial
  misc_feature: MA Experiment 20000087 PARAMETER Experiment Name: At_100uM_ABA_Mutants_cDNA_P Parameter: Treatment Value: 100uM ABA vs. No Treatment
  misc_feature: MA Experiment ID: 20000088 Result: Down-regulated in Transcription
  misc_feature: MA Experiment 20000088 PARAMETER Experiment Name: At_100uM_ABA_Mutants_cDNA_P Parameter: Plant Line Value: Landsberg
  misc_feature: MA Experiment 20000088 PARAMETER Experiment Name: At_100uM_ABA_Mutants_cDNA_P Parameter: Timepoint (hr) Value: 6
  misc_feature: MA Experiment 20000088 PARAMETER Experiment Name: At_100uM_ABA_Mutants_cDNA_P Parameter: Tissue Value: Aerial
  misc_feature: MA Experiment 20000088 PARAMETER Experiment Name: At_100uM_ABA_Mutants_cDNA_P Parameter: Treatment Value: 100uM ABA vs. No Treatment
  misc_feature: MA Experiment ID: 20000090 Result: Down-regulated in Transcription
  misc_feature: MA Experiment ID: 20000117 Result: Down-regulated in Transcription
  misc_feature: MA Experiment 20000117 PARAMETER Experiment Name: At_100uM_ABA_Mutants_cDNA_P Parameter: Plant Line Value: Columbia
  misc_feature: MA Experiment 20000117 PARAMETER Experiment Name: At_100uM_ABA_Mutants_cDNA_P Parameter: Timepoint (hr) Value: 6
  misc_feature: MA Experiment 20000117 PARAMETER Experiment Name: At_100uM_ABA_Mutants_cDNA_P Parameter: Tissue Value: Aerial
  misc_feature: MA Experiment 20000117 PARAMETER Experiment Name: At_100uM_ABA_Mutants_cDNA_P Parameter: Treatment Value: 100uM ABA vs. No Treatment
  misc_feature: MA Experiment ID: 20000169 Result: Down-regulated in Transcription
  misc_feature: MA Experiment 20000169 PARAMETER Experiment Name: At_100uM_ABA_P Parameter: Age (day) Value: 14
  misc_feature: MA Experiment 20000169 PARAMETER Experiment Name: At_100uM_ABA_P Parameter: Organism Value: A. thaliana
  misc_feature: MA Experiment 20000169 PARAMETER Experiment Name: At_100uM_ABA_P Parameter: Plant Line Value: WS
  misc_feature: MA Experiment 20000169 PARAMETER Experiment Name: At_100uM_ABA_P Parameter: Timepoint (hr) Value: 6
  misc_feature: MA Experiment 20000169 PARAMETER Experiment Name: At_100uM_ABA_P Parameter: Tissue Value: Aerial
  misc_feature: MA Experiment 20000169 PARAMETER Experiment Name: At_100uM_ABA_P Parameter: Treatment Value: 100uM ABA vs. No Treatment
  misc_feature: MA Experiment ID: 20000182 Result: Down-regulated in Transcription
  misc_feature: MA Experiment 20000182 PARAMETER Experiment Name: At_2mM_SA_P Parameter: Age (day) Value: 14
  misc_feature: MA Experiment 20000182 PARAMETER Experiment Name: At_2mM_SA_P Parameter: Organism Value: A. thaliana
  misc_feature: MA Experiment 20000182 PARAMETER Experiment Name: At_2mM_SA_P Parameter: Plant Line Value: WS
  misc_feature: MA Experiment 20000182 PARAMETER Experiment Name: At_2mM_SA_P Parameter: Timepoint (hr) Value: 6
  misc_feature: MA Experiment 20000182 PARAMETER Experiment Name: At_2mM_SA_P Parameter: Tissue Value: Aerial
  misc_feature: MA Experiment 20000182 PARAMETER Experiment Name: At_2mM_SA_P Parameter: Treatment Value: 2mM SA vs. No Treatment
  misc_feature: MA Experiment ID: 20000185 Result: Down-regulated in Transcription
  misc_feature: MA Experiment 20000185 PARAMETER Experiment Name: At_Roots__P Parameter: Age (day) Value: 7 vs. 21
  misc_feature: MA Experiment 20000185 PARAMETER Experiment Name: At_Roots__P Parameter: Organism Value: A. thaliana
  misc_feature: MA Experiment 20000185 PARAMETER Experiment Name: At_Roots__P Parameter: Tissue Value: Roots vs. Whole Plant
  misc_feature: MA Experiment ID: 20000224 Result: Up-regulated in Transcription
  misc_feature: MA Experiment ID: 20000436 Result: Down-regulated in Transcription
  misc_feature: MA Experiment 20000436 PARAMETER Experiment Name: At_Drought_P Parameter: Age (day) Value: 7
  misc_feature: MA Experiment 20000436 PARAMETER Experiment Name: At_Drought_P Parameter: Organism Value: A. thaliana
  misc_feature: MA Experiment 20000436 PARAMETER Experiment Name: At_Drought_P Parameter: Plant Line Value: WS
  misc_feature: MA Experiment 20000436 PARAMETER Experiment Name: At_Drought_P Parameter: Timepoint (hr) Value: 12
  misc_feature: MA Experiment 20000436 PARAMETER Experiment Name: At_Drought_P Parameter: Tissue Value: Whole Plant
  misc_feature: MA Experiment 20000436 PARAMETER Experiment Name: At_Drought_P Parameter: Treatment Value: Drought vs. No Drought
  misc_feature: MA Experiment ID: 20000437 Result: Down-regulated in Transcription
  misc_feature: MA Experiment 20000437 PARAMETER Experiment Name: At_Drought_P Parameter: Age (day) Value: 8
  misc_feature: MA Experiment 20000437 PARAMETER Experiment Name: At_Drought_P Parameter: Organism Value: A. thaliana
  misc_feature: MA Experiment 20000437 PARAMETER Experiment Name: At_Drought_P Parameter: Plant Line Value: WS
  misc_feature: MA Experiment 20000437 PARAMETER Experiment Name: At_Drought_P Parameter: Timepoint (hr) Value: 24
  misc_feature: MA Experiment 20000437 PARAMETER Experiment Name: At_Drought_P Parameter: Tissue Value: Whole Plant
  misc_feature: MA Experiment 20000437 PARAMETER Experiment Name: At_Drought_P Parameter: Treatment Value: Drought vs. No Drought
  misc_feature: MA Experiment ID: 20000439 Result: Down-regulated in Transcription
  misc_feature: MA Experiment 20000439 PARAMETER Experiment Name: At_Roots__P Parameter: Age (day) Value: 14 vs. 21
  misc_feature: MA Experiment 20000439 PARAMETER Experiment Name: At_Roots__P Parameter: Organism Value: A. thaliana
  misc_feature: MA Experiment 20000439 PARAMETER Experiment Name: At_Roots__P Parameter: Tissue Value: Roots vs. Whole Plant
  misc_feature: MA Experiment ID: 20000495 Result: Down-regulated in Transcription
  misc_feature: MA Experiment 20000495 PARAMETER Experiment Name: At_Guard_Cells_P Parameter: Harvest Date Value: 8/2/2002
  misc_feature: MA Experiment 20000495 PARAMETER Experiment Name: At_Guard_Cells_P Parameter: Organism Value: A. thaliana
  misc_feature: MA Experiment 20000495 PARAMETER Experiment Name: At_Guard_Cells_P Parameter: Tissue Value: Guard Cells vs. Leaves
  misc_feature: MA Experiment ID: 20000527 Result: Up-regulated in Transcription
  misc_feature: MA Experiment 20000527 PARAMETER Experiment Name: At_10percent_PEG_P Parameter: Age (day) Value: 20
  misc_feature: MA Experiment 20000527 PARAMETER Experiment Name: At_10percent_PEG_P Parameter: Organism Value: A. thaliana
  misc_feature: MA Experiment 20000527 PARAMETER Experiment Name: At_10percent_PEG_P Parameter: Plant Line Value: WS
  misc_feature: MA Experiment 20000527 PARAMETER Experiment Name: At_10percent_PEG_P Parameter: Timepoint (day) Value: 20
  misc_feature: MA Experiment 20000527 PARAMETER Experiment Name: At_10percent_PEG_P Parameter: Tissue Value: Whole Plant
  misc_feature: MA Experiment 20000527 PARAMETER Experiment Name: At_10percent_PEG_P Parameter: Treatment Value: 10percent PEG vs. No Treatment
  misc_feature: MA Experiment ID: 20000794 Result: Down-regulated in Transcription
  misc_feature: MA Experiment 20000794 PARAMETER Experiment Name: At_Petals_P Parameter: Age (day) Value: 23-25 days
  misc_feature: MA Experiment 20000794 PARAMETER Experiment Name: At_Petals_P Parameter: Plant Line Value: WS
  misc_feature: MA Experiment 20000794 PARAMETER Experiment Name: At_Petals_P Parameter: Tissue Value: Petals vs. Whole plant
  misc_feature: MA Experiment ID: 20001247 Result: Down-regulated in Transcription
  misc_feature: MA Experiment 20001247 PARAMETER Experiment Name: At_Far-red-induction_P Parameter: Age (day) Value: 7
  misc_feature: MA Experiment 20001247 PARAMETER Experiment Name: At_Far-red-induction_P Parameter: Light Value: Far-red vs. White
  misc_feature: MA Experiment 20001247 PARAMETER Experiment Name: At_Far-red-induction_P Parameter: Organism Value: A. thaliana
  misc_feature: MA Experiment 20001247 PARAMETER Experiment Name: At_Far-red-induction_P Parameter: Plant Line Value: Columbia
  misc_feature: MA Experiment 20001247 PARAMETER Experiment Name: At_Far-red-induction_P Parameter: Timepoint (hr) Value: 1
  misc_feature: MA Experiment 20001247 PARAMETER Experiment Name: At_Far-red-induction_P Parameter: Tissue Value: Whole Plant
  misc_feature: MA Experiment ID: 20001248 Result: Down-regulated in Transcription
  misc_feature: MA Experiment 20001248 PARAMETER Experiment Name: At_Far-red-induction_P Parameter: Age (day) Value: 7
  misc_feature: MA Experiment 20001248 PARAMETER Experiment Name: At_Far-red-induction_P Parameter: Light Value: Far-red vs. White
  misc_feature: MA Experiment 20001248 PARAMETER Experiment Name: At_Far-red-induction_P Parameter: Organism Value: A. thaliana
  misc_feature: MA Experiment 20001248 PARAMETER Experiment Name: At_Far-red-induction_P Parameter: Plant Line Value: Columbia
  misc_feature: MA Experiment 20001248 PARAMETER Experiment Name: At_Far-red-induction_P Parameter: Timepoint (hr) Value: 4
  misc_feature: MA Experiment 20001248 PARAMETER Experiment Name: At_Far-red-induction_P Parameter: Tissue Value: Whole Plant
  misc_feature: MA Experiment ID: 20001450 Result: Down-regulated in Transcription
  misc_feature: MA Experiment 20001450 PARAMETER Experiment Name: At_Far-red-induction_P Parameter: Age (day) Value: 7
  misc_feature: MA Experiment 20001450 PARAMETER Experiment Name: At_Far-red-induction_P Parameter: Light Value: Far-red vs. White
  misc_feature: MA Experiment 20001450 PARAMETER Experiment Name: At_Far-red-induction_P Parameter: Organism Value: A. thaliana
  misc_feature: MA Experiment 20001450 PARAMETER Experiment Name: At_Far-red-induction_P Parameter: Plant Line Value: Columbia
  misc_feature: MA Experiment 20001450 PARAMETER Experiment Name: At_Far-red-induction_P Parameter: Timepoint (hr) Value: 8
  misc_feature: MA Experiment 20001450 PARAMETER Experiment Name: At_Far-red-induction_P Parameter: Tissue Value: Whole Plant
  misc_feature: MA Experiment ID: 20001905 Result: Down-regulated in Transcription
  misc_feature: MA Experiment 20001905 PARAMETER Experiment Name: At_Drought_Reproduction_P Parameter: Age (day) Value: 40
  misc_feature: MA Experiment 20001905 PARAMETER Experiment Name: At_Drought_Reproduction_P Parameter: Organism Value: A. thaliana
  misc_feature: MA Experiment 20001905 PARAMETER Experiment Name: At_Drought_Reproduction_P Parameter: Plant Line Value: WS
  misc_feature: MA Experiment 20001905 PARAMETER Experiment Name: At_Drought_Reproduction_P Parameter: Timepoint (day) Value: 10
  misc_feature: MA Experiment 20001905 PARAMETER Experiment Name: At_Drought_Reproduction_P Parameter: Tissue Value: Rosettes
  misc_feature: MA Experiment 20001905 PARAMETER Experiment Name: At_Drought_Reproduction_P Parameter: Treatment Value: Drought vs. No Drought
  misc_feature: MA Experiment ID: 20001906 Result: Down-regulated in Transcription
  misc_feature: MA Experiment 20001906 PARAMETER Experiment Name: At_Drought_Reproduction_P Parameter: Age (day) Value: 35
  misc_feature: MA Experiment 20001906 PARAMETER Experiment Name: At_Drought_Reproduction_P Parameter: Organism Value: A. thaliana
  misc_feature: MA Experiment 20001906 PARAMETER Experiment Name: At_Drought_Reproduction_P Parameter: Plant Line Value: WS
  misc_feature: MA Experiment 20001906 PARAMETER Experiment Name: At_Drought_Reproduction_P Parameter: Timepoint (day) Value: 5
  misc_feature: MA Experiment 20001906 PARAMETER Experiment Name: At_Drought_Reproduction_P Parameter: Tissue Value: Siliques
  misc_feature: MA Experiment 20001906 PARAMETER Experiment Name: At_Drought_Reproduction_P Parameter: Treatment Value: Drought vs. No Drought
  misc_feature: MA Experiment ID: 20001908 Result: Down-regulated in Transcription
  misc_feature: MA Experiment 20001908 PARAMETER Experiment Name: At_Drought_Reproduction_P Parameter: Age (day) Value: 40
  misc_feature: MA Experiment 20001908 PARAMETER Experiment Name: At_Drought_Reproduction_P Parameter: Organism Value: A. thaliana
  misc_feature: MA Experiment 20001908 PARAMETER Experiment Name: At_Drought_Reproduction_P Parameter: Plant Line Value: WS
  misc_feature: MA Experiment 20001908 PARAMETER Experiment Name: At_Drought_Reproduction_P Parameter: Timepoint (day) Value: 10
  misc_feature: MA Experiment 20001908 PARAMETER Experiment Name: At_Drought_Reproduction_P Parameter: Tissue Value: Siliques
  misc_feature: MA Experiment 20001908 PARAMETER Experiment Name: At_Drought_Reproduction_P Parameter: Treatment Value: Drought vs. No Drought

SEQ ID NO: 32870 - protein, 234 aa, Arabidopsis thaliana; identical to SEQ ID NO: 29280
  peptide (1)..(234): Ceres Seq. ID no. 12379215
  misc_feature (30)..(234): Pfam Name: Oxygen evolving enhancer protein 3 (PsbQ) Pfam Description: Oxygen evolving enhancer protein 3 (PsbQ)
  misc_feature (61)..(233): Homolog of NCBI NO: 131397 NR Description: Oxygen-evolving enhancer protein 3, chloroplast (OEE3) (16 kDa subunit of oxygen evolving system of photosystem
  misc_feature (33)..(233): Homolog of NCBI NO: 34393258 NR Description: putative Oxygen-evolving enhancer protein 3-1,
  misc_feature (115)..(233): Homolog of NCBI NO: 11134066 NR Description: Oxygen-evolving enhancer protein 3-2, chloroplast (OEE3) (16 kDa subunit of oxygen evolving system of photosystem (OEC 16 kDa subunit) (Ferredoxin-NADP reductase binding protein)
  misc_feature (40)..(233): Homolog of NCBI NO: 11134057 NR Description: Oxygen-evolving enhancer protein 3-1, chloroplast (OEE3) (16 kDa subunit of oxygen evolving system of photosystem
  misc_feature (119)..(229): Homolog of NCBI NO: 8131595 NR Description: oxygen evolving enhancer protein 3 [Bruguiera
  misc_feature (44)..(233): Homolog of NCBI NO: 15234637 NR Description: oxygen-evolving complex protein 16, chloroplast
  misc_feature (37)..(233): Homolog of NCBI NO: 15233587 NR Description: oxygen-evolving complex protein 16, chloroplast
  misc_feature (90)..(234): Homolog of NCBI NO: 34915502 NR Description: hypothetical protein~similar to Arabidopsis
  misc_feature (15)..(234): Homolog of NCBI NO: 21537394 NR Description: unknown [Arabidopsis thaliana]
  misc_feature (15)..(234): Homolog of NCBI NO: 18395819 NR Description: PsbQ domain protein family, putative

SEQ ID NO: 32871 - protein, 220 aa, Arabidopsis thaliana; identical to SEQ ID NO: 29281
  peptide (1)..(220): Ceres Seq. ID no. 12379216
  misc_feature (16)..(220): Pfam Name: Oxygen evolving enhancer protein 3 (PsbQ) Pfam Description: Oxygen evolving enhancer protein 3 (PsbQ)
  misc_feature (47)..(219): Homolog of NCBI NO: 131397 NR Description: Oxygen-evolving enhancer protein 3, chloroplast (OEE3) (16 kDa subunit of oxygen evolving system of photosystem
  misc_feature (19)..(219): Homolog of NCBI NO: 34393258 NR Description: putative Oxygen-evolving enhancer protein 3-1,
  misc_feature (101)..(219): Homolog of NCBI NO: 11134066 NR Description: Oxygen-evolving enhancer protein 3-2, chloroplast (OEE3) (16 kDa subunit of oxygen evolving system of photosystem (OEC 16 kDa subunit) (Ferredoxin-NADP reductase binding protein)
  misc_feature (26)..(219): Homolog of NCBI NO: 11134057 NR Description: Oxygen-evolving enhancer protein 3-1, chloroplast (OEE3) (16 kDa subunit of oxygen evolving system of photosystem
  misc_feature (105)..(215): Homolog of NCBI NO: 8131595 NR Description: oxygen evolving enhancer protein 3 [Bruguiera
  misc_feature (30)..(219): Homolog of NCBI NO: 15234637 NR Description: oxygen-evolving complex protein 16, chloroplast
  misc_feature (23)..(219): Homolog of NCBI NO: 15233587 NR Description: oxygen-evolving complex protein 16, chloroplast
  misc_feature (76)..(220): Homolog of NCBI NO: 34915502 NR Description: hypothetical protein~similar to Arabidopsis
  misc_feature (1)..(220): Homolog of NCBI NO: 21537394 NR Description: unknown [Arabidopsis thaliana]
  misc_feature (1)..(220): Homolog of NCBI NO: 18395819 NR Description: PsbQ domain protein family, putative

SEQ ID NO: 32872 - protein, 169 aa, Arabidopsis thaliana; identical to SEQ ID NO: 29282
  peptide (1)..(169): Ceres Seq. ID no. 12379217
  misc_feature (1)..(169): Pfam Name: Oxygen evolving enhancer protein 3 (PsbQ) Pfam Description: Oxygen evolving enhancer protein 3 (PsbQ)
  misc_feature (1)..(168): Homolog of NCBI NO: 131397 NR Description: Oxygen-evolving enhancer protein 3, chloroplast (OEE3) (16 kDa subunit of oxygen evolving system of photosystem
  misc_feature (1)..(168): Homolog of NCBI NO: 34393258 NR Description: putative Oxygen-evolving enhancer protein 3-1,
  misc_feature (50)..(168): Homolog of NCBI NO: 11134066 NR Description: Oxygen-evolving enhancer protein 3-2, chloroplast (OEE3) (16 kDa subunit of oxygen evolving system of photosystem (OEC 16 kDa subunit) (Ferredoxin-NADP reductase binding protein)
  misc_feature (1)..(168): Homolog of NCBI NO: 11134057 NR Description: Oxygen-evolving enhancer protein 3-1, chloroplast (OEE3) (16 kDa subunit of oxygen evolving system of photosystem
  misc_feature (54)..(164): Homolog of NCBI NO: 8131595 NR Description: oxygen evolving enhancer protein 3 [Bruguiera
  misc_feature (1)..(168): Homolog of NCBI NO: 15234637 NR Description: oxygen-evolving complex protein 16, chloroplast
  misc_feature (1)..(168): Homolog of NCBI NO: 15233587 NR Description: oxygen-evolving complex protein 16, chloroplast
  misc_feature (25)..(169): Homolog of NCBI NO: 34915502 NR Description: hypothetical protein~similar to Arabidopsis
  misc_feature (1)..(169): Homolog of NCBI NO: 21537394 NR Description: unknown [Arabidopsis thaliana]
  misc_feature (1)..(169): Homolog of NCBI NO: 18395819 NR Description: PsbQ domain protein family, putative

SEQ ID NO: 32873 - DNA, 708 bp, Arabidopsis thaliana; identical to SEQ ID NO: 29283
  misc_feature (1)..(708): Ceres Seq. ID no. 12331871
  misc_feature: MA Experiment ID: 108433 Result: Up-regulated in Transcription
  misc_feature: MA Experiment 108433 PARAMETER Experiment Name: At_rhl_Mutant2_cDNA_P Parameter: Age (day) Value: 7
  misc_feature: MA Experiment 108433 PARAMETER Experiment Name: At_rhl_Mutant2_cDNA_P Parameter: Organism Value: A. thaliana
  misc_feature: MA Experiment 108433 PARAMETER Experiment Name: At_rhl_Mutant2_cDNA_P Parameter: Plant Line Value: rhl Mutant vs. wt landsburg
  misc_feature: MA Experiment 108433 PARAMETER Experiment Name: At_rhl_Mutant2_cDNA_P Parameter: Tissue Value: Roots
  misc_feature: MA Experiment ID: 108435 Result: Down-regulated in Transcription
  misc_feature: MA Experiment 108435 PARAMETER Experiment Name: At_stm_Mutants_cDNA_P Parameter: Plant Line Value: wt Landsburg vs stm
  misc_feature: MA Experiment 108435 PARAMETER Experiment Name: At_stm_Mutants_cDNA_P Parameter: Tissue Value: Shoot Apical Meristem Region
  misc_feature: MA Experiment ID: 108461 Result: Up-regulated in Transcription
  misc_feature: MA Experiment 108461 PARAMETER Experiment Name: At_Germinating_Seeds_cDNA_P Parameter: Age (day) Value: 1 vs. 0
  misc_feature: MA Experiment 108461 PARAMETER Experiment Name: At_Germinating_Seeds_cDNA_P Parameter: Tissue Value: Germinating Seeds
  misc_feature: MA Experiment ID: 108462 Result: Up-regulated in Transcription
  misc_feature: MA Experiment 108462 PARAMETER Experiment Name: At_Germinating_Seeds_cDNA_P Parameter: Age (day) Value: 2 vs. 0
  misc_feature: MA Experiment 108462 PARAMETER Experiment Name: At_Germinating_Seeds_cDNA_P Parameter: Tissue Value: Germinating Seeds
  misc_feature: MA Experiment ID: 108463 Result: Up-regulated in Transcription
  misc_feature: MA Experiment 108463 PARAMETER Experiment Name: At_Germinating_Seeds_cDNA_P Parameter: Age (day) Value: 3 vs. 0
  misc_feature: MA Experiment 108463 PARAMETER Experiment Name: At_Germinating_Seeds_cDNA_P Parameter: Tissue Value: Germinating Seeds
  misc_feature: MA Experiment ID: 108473 Result: Up-regulated in Transcription
  misc_feature: MA Experiment 108473 PARAMETER Experiment Name: At_Drought_Flowers_cDNA_P Parameter: Timepoint (hr) Value: 7 d
  misc_feature: MA Experiment 108473 PARAMETER Experiment Name: At_Drought_Flowers_cDNA_P Parameter: Tissue Value: Flower
  misc_feature: MA Experiment 108473 PARAMETER Experiment Name: At_Drought_Flowers_cDNA_P Parameter: Treatment Value: Drought vs. No Drought
  misc_feature: MA Experiment ID: 108474 Result: Up-regulated in Transcription
  misc_feature: MA Experiment 108474 PARAMETER Experiment Name: At_Drought_Flowers_cDNA_P Parameter: Timepoint (hr) Value: null
  misc_feature: MA Experiment 108474 PARAMETER Experiment Name: At_Drought_Flowers_cDNA_P Parameter: Treatment Value: Drought vs. No Drought
  misc_feature: MA Experiment ID: 108501 Result: Down-regulated in Transcription
  misc_feature: MA Experiment 108501 PARAMETER Experiment Name: At_ap2_floral_buds_cDNA_P Parameter: Plant Line Value: ap2 (Ler.)
  misc_feature: MA Experiment 108501 PARAMETER Experiment Name: At_ap2_floral_buds_cDNA_P Parameter: Tissue Value: Closed Flower
  misc_feature: MA Experiment ID: 108573 Result: Up-regulated in Transcription
  misc_feature: MA Experiment 108573 PARAMETER Experiment Name: At_Drought_cDNA_P Parameter: Timepoint (hr) Value: 6
  misc_feature: MA Experiment 108573 PARAMETER Experiment Name: At_Drought_cDNA_P Parameter: Tissue Value: Aerial
  misc_feature: MA Experiment 108573 PARAMETER Experiment Name: At_Drought_cDNA_P Parameter: Treatment Value: Drought vs. No Drought
  misc_feature: MA Experiment ID: 108574 Result: Down-regulated in Transcription
  misc_feature: MA Experiment 108574 PARAMETER Experiment Name: At_Wounding__cDNA_P Parameter: Timepoint (hr) Value: 1
  misc_feature: MA Experiment 108574 PARAMETER Experiment Name: At_Wounding__cDNA_P Parameter: Tissue Value: Aerial
  misc_feature: MA Experiment 108574 PARAMETER Experiment Name: At_Wounding__cDNA_P Parameter: Treatment Value: Wounding vs. No Wounding
  misc_feature: MA Experiment ID: 108579 Result: Down-regulated in Transcription
  misc_feature: MA Experiment 108579 PARAMETER Experiment Name: At_4deg_Cold_cDNA_P Parameter: Temperature (deg C) Value: 4 vs. 22
  misc_feature: MA Experiment 108579 PARAMETER Experiment Name: At_4deg_Cold_cDNA_P Parameter: Timepoint (hr) Value: 6
  misc_feature: MA Experiment 108579 PARAMETER Experiment Name: At_4deg_Cold_cDNA_P Parameter: Tissue Value: Aerial
  misc_feature: MA Experiment ID: 108585 Result: Up-regulated in Transcription
  misc_feature: MA Experiment 108585 PARAMETER Experiment Name: At_5mM_NaNP_cDNA_P Parameter: Timepoint (hr) Value: 6
  misc_feature: MA Experiment 108585 PARAMETER Experiment Name: At_5mM_NaNP_cDNA_P Parameter: Tissue Value: Aerial
  misc_feature: MA Experiment 108585 PARAMETER Experiment Name: At_5mM_NaNP_cDNA_P Parameter: Treatment Value: null
  misc_feature: MA Experiment ID: 108594 Result: Up-regulated in Transcription
  misc_feature: MA Experiment 108594 PARAMETER Experiment Name: At_Ler-rhl_Root_cDNA_P Parameter: Plant Line Value: null
  misc_feature: MA Experiment ID: 108595 Result: Down-regulated in Transcription
  misc_feature: MA Experiment 108595 PARAMETER Experiment Name: At_Ler-pi_Ovule_cDNA_P Parameter: Plant Line Value: null
  misc_feature: MA Experiment ID: 20000069 Result: Up-regulated in Transcription
  misc_feature: MA Experiment 20000069 PARAMETER Experiment Name: At_100uM_ABA_Mutants_cDNA_P Parameter: Plant Line Value: CS23
  misc_feature: MA Experiment 20000069 PARAMETER Experiment Name: At_100uM_ABA_Mutants_cDNA_P Parameter: Timepoint (hr) Value: 6
  misc_feature: MA Experiment 20000069 PARAMETER Experiment Name: At_100uM_ABA_Mutants_cDNA_P Parameter: Tissue Value: Aerial
  misc_feature: MA Experiment 20000069 PARAMETER Experiment Name: At_100uM_ABA_Mutants_cDNA_P Parameter: Treatment Value: 100uM ABA vs. No Treatment
  misc_feature: MA Experiment ID: 20000070 Result: Up-regulated in Transcription
  misc_feature: MA Experiment 20000070 PARAMETER Experiment Name: At_100uM_ABA_Mutants_cDNA_P Parameter: Plant Line Value: CS24
  misc_feature: MA Experiment 20000070 PARAMETER Experiment Name: At_100uM_ABA_Mutants_cDNA_P Parameter: Timepoint (hr) Value: 6
  misc_feature: MA Experiment 20000070 PARAMETER Experiment Name: At_100uM_ABA_Mutants_cDNA_P Parameter: Tissue Value: Aerial
  misc_feature: MA Experiment 20000070 PARAMETER Experiment Name: At_100uM_ABA_Mutants_cDNA_P Parameter: Treatment Value: 100uM ABA vs. No Treatment
  misc_feature: MA Experiment ID: 20000071 Result: Up-regulated in Transcription
  misc_feature: MA Experiment 20000071 PARAMETER Experiment Name: At_100uM_ABA_Mutants_cDNA_P Parameter: Plant Line Value: CS8104
  misc_feature: MA Experiment 20000071 PARAMETER Experiment Name: At_100uM_ABA_Mutants_cDNA_P Parameter: Timepoint (hr) Value: 6
  misc_feature: MA Experiment 20000071 PARAMETER Experiment Name: At_100uM_ABA_Mutants_cDNA_P Parameter: Tissue Value: Aerial
  misc_feature: MA Experiment 20000071 PARAMETER Experiment Name: At_100uM_ABA_Mutants_cDNA_P Parameter: Treatment Value: 100uM ABA vs. No Treatment
  misc_feature: MA Experiment ID: 20000086 Result: Up-regulated in Transcription
  misc_feature: MA Experiment 20000086 PARAMETER Experiment Name: At_100uM_ABA_Mutants_cDNA_P Parameter: Plant Line Value: CS22
  misc_feature: MA Experiment 20000086 PARAMETER Experiment Name: At_100uM_ABA_Mutants_cDNA_P Parameter: Timepoint (hr) Value: 6
  misc_feature: MA Experiment 20000086 PARAMETER Experiment Name: At_100uM_ABA_Mutants_cDNA_P Parameter: Tissue Value: Aerial
  misc_feature: MA Experiment 20000086 PARAMETER Experiment Name: At_100uM_ABA_Mutants_cDNA_P Parameter: Treatment Value: 100uM ABA vs. No Treatment
  misc_feature: MA Experiment ID: 20000089 Result: Up-regulated in Transcription
  misc_feature: MA Experiment ID: 20000111 Result: Down-regulated in Transcription
  misc_feature: MA Experiment 20000111 PARAMETER Experiment Name: At_42deg_Heat_cDNA_P Parameter: Temperature (deg C) Value: 42 vs. 22
  misc_feature: MA Experiment 20000111 PARAMETER Experiment Name: At_42deg_Heat_cDNA_P Parameter: Timepoint (hr) Value: 6
  misc_feature: MA Experiment 20000111 PARAMETER Experiment Name: At_42deg_Heat_cDNA_P Parameter: Tissue Value: Aerial
  misc_feature: MA Experiment ID: 20000113 Result: Down-regulated in Transcription
  misc_feature: MA Experiment 20000113 PARAMETER Experiment Name: At_42deg_Heat_cDNA_P Parameter: Temperature (deg C) Value: 42 vs. 22
  misc_feature: MA Experiment 20000113 PARAMETER Experiment Name: At_42deg_Heat_cDNA_P Parameter: Timepoint (hr) Value: 8
  misc_feature: MA Experiment 20000113 PARAMETER Experiment Name: At_42deg_Heat_cDNA_P Parameter: Tissue Value: Aerial
  misc_feature: MA Experiment ID: 20000117 Result: Up-regulated in Transcription
  misc_feature: MA Experiment 20000117 PARAMETER Experiment Name: At_100uM_ABA_Mutants_cDNA_P Parameter: Plant Line Value: Columbia
  misc_feature: MA Experiment 20000117 PARAMETER Experiment Name: At_100uM_ABA_Mutants_cDNA_P Parameter: Timepoint (hr) Value: 6
  misc_feature: MA Experiment 20000117 PARAMETER Experiment Name: At_100uM_ABA_Mutants_cDNA_P Parameter: Tissue Value: Aerial
  misc_feature: MA Experiment 20000117 PARAMETER Experiment Name: At_100uM_ABA_Mutants_cDNA_P Parameter: Treatment Value: 100uM ABA vs. No Treatment
  misc_feature: MA Experiment ID: 20000173 Result: Down-regulated in Transcription
  misc_feature: MA Experiment 20000173 PARAMETER Experiment Name: At_42deg_Heat_P Parameter: Age (day) Value: 14
  misc_feature: MA Experiment 20000173 PARAMETER Experiment Name: At_42deg_Heat_P Parameter: Organism Value: A. thaliana
  misc_feature: MA Experiment 20000173 PARAMETER Experiment Name: At_42deg_Heat_P Parameter: Plant Line Value: WS
  misc_feature: MA Experiment 20000173 PARAMETER Experiment Name: At_42deg_Heat_P Parameter: Temperature (deg C) Value: 42 vs. 22
  misc_feature: MA Experiment 20000173 PARAMETER Experiment Name: At_42deg_Heat_P Parameter: Timepoint (hr) Value: 6
  misc_feature: MA Experiment 20000173 PARAMETER Experiment Name: At_42deg_Heat_P Parameter: Tissue Value: Aerial
  misc_feature: MA Experiment ID: 20000179 Result: Up-regulated in Transcription
  misc_feature: MA Experiment 20000179 PARAMETER Experiment Name: At_Germinating_Seeds_P Parameter: Age (hr) Value: 6 vs. 0
  misc_feature: MA Experiment 20000179 PARAMETER Experiment Name: At_Germinating_Seeds_P Parameter: Tissue Value: Germinating Seeds
  misc_feature: MA Experiment ID: 20000180 Result: Up-regulated in Transcription
  misc_feature: MA Experiment 20000180 PARAMETER Experiment Name: At_Germinating_Seeds_P Parameter: Age (hr) Value: 24 vs. 0
  misc_feature: MA Experiment 20000180 PARAMETER Experiment Name: At_Germinating_Seeds_P Parameter: Tissue Value: Germinating Seeds
  misc_feature: MA Experiment ID: 20000184 Result: Down-regulated in Transcription
  misc_feature: MA Experiment 20000184 PARAMETER Experiment Name: At_Shoots__P Parameter: Age (day) Value: 7
  misc_feature: MA Experiment 20000184 PARAMETER Experiment Name: At_Shoots__P Parameter: Tissue Value: Shoots vs. Whole Plant
  misc_feature: MA Experiment ID: 20000185 Result: Down-regulated in Transcription
  misc_feature: MA Experiment 20000185 PARAMETER Experiment Name: At_Roots__P Parameter: Age (day) Value: 7 vs. 21
  misc_feature: MA Experiment 20000185 PARAMETER Experiment Name: At_Roots__P Parameter: Organism Value: A. thaliana
  misc_feature: MA Experiment 20000185 PARAMETER Experiment Name: At_Roots__P Parameter: Tissue Value: Roots vs. Whole Plant
  misc_feature: MA Experiment ID: 20000224 Result: Down-regulated in Transcription
  misc_feature: MA Experiment ID: 20000227 Result: Down-regulated in Transcription
  misc_feature: MA Experiment 20000227 PARAMETER Experiment Name: At_Root-Tips-vs-Tops_P Parameter: Tissue Value: Root Tips vs. Root Tops
  misc_feature: MA Experiment ID: 20000234 Result: Down-regulated in Transcription
  misc_feature: MA Experiment 20000234 PARAMETER Experiment Name: At_Siliques_P Parameter: Age (day) Value: 21
  misc_feature: MA Experiment 20000234 PARAMETER Experiment Name: At_Siliques_P Parameter: Organism Value: A. thaliana
  misc_feature: MA Experiment 20000234 PARAMETER Experiment Name: At_Siliques_P Parameter: Plant Line Value: WS
  misc_feature: MA Experiment 20000234 PARAMETER Experiment Name: At_Siliques_P Parameter: Tissue Value: Less Than 5mm Siliques vs. Whole Plant
  misc_feature: MA Experiment ID: 20000264 Result: Down-regulated in Transcription
  misc_feature: MA Experiment 20000264 PARAMETER Experiment Name: At_Open_Flower_P Parameter: Age (day) Value: 21
  misc_feature: MA Experiment 20000264 PARAMETER Experiment Name: At_Open_Flower_P Parameter: Plant Line Value: WS
  misc_feature: MA Experiment 20000264 PARAMETER Experiment Name: At_Open_Flower_P Parameter: Tissue Value: Open Flower vs. Whole Plant
  misc_feature: MA Experiment ID: 20000265 Result: Down-regulated in Transcription
  misc_feature: MA Experiment 20000265 PARAMETER Experiment Name: At_Open_Flower_P Parameter: Age (day) Value: 21
  misc_feature: MA Experiment 20000265 PARAMETER Experiment Name: At_Open_Flower_P Parameter: Plant Line Value: WS
  misc_feature: MA Experiment 20000265 PARAMETER Experiment Name: At_Open_Flower_P Parameter: Tissue Value: Closed Flower vs. Whole Plant
  misc_feature: MA Experiment ID: 20000268 Result: Down-regulated in Transcription
  misc_feature: MA Experiment 20000268 PARAMETER Experiment Name: At_100mM_NaCl__P Parameter: Age (day) Value: 14
  misc_feature: MA Experiment 20000268 PARAMETER Experiment Name: At_100mM_NaCl__P Parameter: Organism Value: A. thaliana
  misc_feature: MA Experiment 20000268 PARAMETER Experiment Name: At_100mM_NaCl__P Parameter: Plant Line Value: WS
  misc_feature: MA Experiment 20000268 PARAMETER Experiment Name: At_100mM_NaCl__P Parameter: Timepoint (hr) Value: 6
  misc_feature: MA Experiment 20000268 PARAMETER Experiment Name: At_100mM_NaCl__P Parameter: Tissue Value: Whole Plant
  misc_feature: MA Experiment 20000268 PARAMETER Experiment Name: At_100mM_NaCl__P Parameter: Treatment Value: 100mM NaCl vs. No Treatment
  misc_feature: MA Experiment ID: 20000286 Result: Down-regulated in Transcription
  misc_feature: MA Experiment 20000286 PARAMETER Experiment Name: At_Open_Flower_P Parameter: Age (day) Value: 21
  misc_feature: MA Experiment 20000286 PARAMETER Experiment Name: At_Open_Flower_P Parameter: Plant Line Value: WS
  misc_feature: MA Experiment 20000286 PARAMETER Experiment Name: At_Open_Flower_P Parameter: Tissue Value: Half Open vs. Whole Plant
  misc_feature: MA Experiment ID: 20000308 Result: Down-regulated in Transcription
  misc_feature: MA Experiment 20000308 PARAMETER Experiment Name: At_100mM_NaCl__P Parameter: Age (day) Value: 17
  misc_feature: MA Experiment 20000308 PARAMETER Experiment Name: At_100mM_NaCl__P Parameter: Organism Value: A. thaliana
  misc_feature: MA Experiment 20000308 PARAMETER Experiment Name: At_100mM_NaCl__P Parameter: Plant Line Value: WS
  misc_feature: MA Experiment 20000308 PARAMETER Experiment Name: At_100mM_NaCl__P Parameter: Timepoint (hr) Value: 72
  misc_feature: MA Experiment 20000308 PARAMETER Experiment Name: At_100mM_NaCl__P Parameter: Tissue Value: Whole Plant
  misc_feature: MA Experiment 20000308 PARAMETER Experiment Name: At_100mM_NaCl__P Parameter: Treatment Value: 100mM NaCl vs. No Treatment
  misc_feature: MA Experiment ID: 20000437 Result: Up-regulated in Transcription
  misc_feature: MA Experiment 20000437 PARAMETER Experiment Name: At_Drought_P Parameter: Age (day) Value: 8
  misc_feature: MA Experiment 20000437 PARAMETER Experiment Name: At_Drought_P Parameter: Organism Value: A. thaliana
  misc_feature: MA Experiment 20000437 PARAMETER Experiment Name: At_Drought_P Parameter: Plant Line Value: WS
  misc_feature: MA Experiment 20000437 PARAMETER Experiment Name: At_Drought_P Parameter: Timepoint (hr) Value: 24
  misc_feature: MA Experiment 20000437 PARAMETER Experiment Name: At_Drought_P Parameter: Tissue Value: Whole Plant
  misc_feature: MA Experiment 20000437 PARAMETER Experiment Name: At_Drought_P Parameter: Treatment Value: Drought vs. No Drought
  misc_feature: MA Experiment ID: 20000439 Result: Down-regulated in Transcription
  misc_feature: MA Experiment 20000439 PARAMETER Experiment Name: At_Roots__P Parameter: Age (day) Value: 14 vs. 21
  misc_feature: MA Experiment 20000439 PARAMETER Experiment Name: At_Roots__P Parameter: Organism Value: A. thaliana
  misc_feature: MA Experiment 20000439 PARAMETER Experiment Name: At_Roots__P Parameter: Tissue Value: Roots vs. Whole Plant
  misc_feature: MA Experiment ID: 20000441 Result: Up-regulated in Transcription
  misc_feature: MA Experiment 20000441 PARAMETER Experiment Name: At_1uM_BR-BRZ__P Parameter: Tissue Value: Shoot Apices
  misc_feature: MA Experiment 20000441 PARAMETER Experiment Name: At_1uM_BR-BRZ__P Parameter: Treatment Value: 1uM BR vs. No Treatment
  misc_feature: MA Experiment ID: 20000443 Result: Up-regulated in Transcription
  misc_feature: MA Experiment 20000443 PARAMETER Experiment Name: At_1uM_BR-BRZ__P Parameter: Tissue Value: Shoot Apices
  misc_feature: MA Experiment 20000443 PARAMETER Experiment Name: At_1uM_BR-BRZ__P Parameter: Treatment Value: 1uM BRZ vs. No Treatment
  misc_feature: MA Experiment ID: 20000451 Result: Down-regulated in Transcription
  misc_feature: MA Experiment 20000451 PARAMETER Experiment Name: At_CS6879_Shoots-Roots_P Parameter: Age (day) Value: 14
  misc_feature: MA Experiment 20000451 PARAMETER Experiment Name: At_CS6879_Shoots-Roots_P Parameter: Organism Value: A. thaliana
  misc_feature: MA Experiment 20000451 PARAMETER Experiment Name: At_CS6879_Shoots-Roots_P Parameter: Plant Line Value: CS6879 vs. WS
  misc_feature: MA Experiment 20000451 PARAMETER Experiment Name: At_CS6879_Shoots-Roots_P Parameter: Tissue Value: Roots
  misc_feature: MA Experiment ID: 20000455 Result: Down-regulated in Transcription
  misc_feature: MA Experiment 20000455 PARAMETER Experiment Name: At_100uM_ABA_P Parameter: Age (day) Value: 16
  misc_feature: MA Experiment 20000455 PARAMETER Experiment Name: At_100uM_ABA_P Parameter: Organism Value: A. thaliana
  misc_feature: MA Experiment 20000455 PARAMETER Experiment Name: At_100uM_ABA_P Parameter: Plant Line Value: WS
  misc_feature: MA Experiment 20000455 PARAMETER Experiment Name: At_100uM_ABA_P Parameter: Timepoint (hr) Value: 48
  misc_feature: MA Experiment 20000455 PARAMETER Experiment Name: At_100uM_ABA_P Parameter: Tissue Value: Aerial
  misc_feature: MA Experiment 20000455 PARAMETER Experiment Name: At_100uM_ABA_P Parameter: Treatment Value: 100uM ABA vs. No Treatment
  misc_feature: MA Experiment ID: 20000456 Result: Down-regulated in Transcription
  misc_feature: MA Experiment 20000456 PARAMETER Experiment Name: At_100uM_BA_P Parameter: Age (day) Value: 14
  misc_feature: MA Experiment 20000456 PARAMETER Experiment Name: At_100uM_BA_P Parameter: Organism Value: A. thaliana
  misc_feature: MA Experiment 20000456 PARAMETER Experiment Name: At_100uM_BA_P Parameter: Plant Line Value: WS
  misc_feature: MA Experiment 20000456 PARAMETER Experiment Name: At_100uM_BA_P Parameter: Timepoint (hr) Value: 6
  misc_feature: MA Experiment 20000456 PARAMETER Experiment Name: At_100uM_BA_P Parameter: Tissue Value: Aerial
  misc_feature: MA Experiment 20000456 PARAMETER Experiment Name: At_100uM_BA_P Parameter: Treatment Value: 100uM BA vs. No Treatment
  misc_feature: MA Experiment ID: 20000527 Result: Up-regulated in Transcription
  misc_feature: MA Experiment 20000527 PARAMETER Experiment Name: At_10percent_PEG_P Parameter: Age (day) Value: 20
  misc_feature: MA Experiment 20000527 PARAMETER Experiment Name: At_10percent_PEG_P Parameter: Organism Value: A. thaliana
  misc_feature: MA Experiment 20000527 PARAMETER Experiment Name: At_10percent_PEG_P Parameter: Plant Line Value: WS
  misc_feature: MA Experiment 20000527 PARAMETER Experiment Name: At_10percent_PEG_P Parameter: Timepoint (day) Value: 20
  misc_feature: MA Experiment 20000527 PARAMETER Experiment Name: At_10percent_PEG_P Parameter: Tissue Value: Whole Plant
  misc_feature: MA Experiment 20000527 PARAMETER Experiment Name: At_10percent_PEG_P Parameter: Treatment Value: 10percent PEG vs. No Treatment
  misc_feature: MA Experiment ID: 20000573 Result: Up-regulated in Transcription
  misc_feature: MA Experiment 20000573 PARAMETER Experiment Name: At_100uM_ABA_Mutants__P Parameter: Organism Value: A. thaliana
  misc_feature: MA Experiment 20000573 PARAMETER Experiment Name: At_100uM_ABA_Mutants__P Parameter: Plant Line Value: CS22 vs. Ler wt
  misc_feature: MA Experiment 20000573 PARAMETER Experiment Name: At_100uM_ABA_Mutants__P Parameter: Timepoint (hr) Value: N/A
  misc_feature: MA Experiment 20000573 PARAMETER Experiment Name: At_100uM_ABA_Mutants__P Parameter: Tissue Value: Whole Plant
  misc_feature: MA Experiment 20000573 PARAMETER Experiment Name: At_100uM_ABA_Mutants__P Parameter: Treatment Value: None
  misc_feature: MA Experiment ID: 20000574 Result: Up-regulated in Transcription
  misc_feature: MA Experiment 20000574 PARAMETER Experiment Name: At_100uM_ABA_Mutants__P Parameter: Organism Value: A. thaliana
  misc_feature: MA Experiment 20000574 PARAMETER Experiment Name: At_100uM_ABA_Mutants__P Parameter: Plant Line Value: CS23 vs. Ler wt
  misc_feature: MA Experiment 20000574 PARAMETER Experiment Name: At_100uM_ABA_Mutants__P Parameter: Timepoint (hr) Value: N/A
  misc_feature: MA Experiment 20000574 PARAMETER Experiment Name: At_100uM_ABA_Mutants__P Parameter: Tissue Value: Whole Plant
  misc_feature: MA Experiment 20000574 PARAMETER Experiment Name: At_100uM_ABA_Mutants__P Parameter: Treatment Value: None
  misc_feature: MA Experiment ID: 20000794 Result: Down-regulated in Transcription
  misc_feature: MA Experiment 20000794 PARAMETER Experiment Name: At_Petals_P Parameter: Age (day) Value: 23-25 days
  misc_feature: MA Experiment 20000794 PARAMETER Experiment Name: At_Petals_P Parameter: Plant Line Value: WS
  misc_feature: MA Experiment 20000794 PARAMETER Experiment Name: At_Petals_P Parameter: Tissue Value: Petals vs. Whole plant
  misc_feature: MA Experiment ID: 20001247 Result: Up-regulated in Transcription
  misc_feature: MA Experiment 20001247 PARAMETER Experiment Name: At_Far-red-induction_P Parameter: Age (day) Value: 7
  misc_feature: MA Experiment 20001247 PARAMETER Experiment Name: At_Far-red-induction_P Parameter: Light Value: Far-red vs. White
  misc_feature: MA Experiment 20001247 PARAMETER Experiment Name: At_Far-red-induction_P Parameter: Organism Value: A. thaliana
  misc_feature: MA Experiment 20001247 PARAMETER Experiment Name: At_Far-red-induction_P Parameter: Plant Line Value: Columbia
  misc_feature: MA Experiment 20001247 PARAMETER Experiment Name: At_Far-red-induction_P Parameter: Timepoint (hr) Value: 1
  misc_feature: MA Experiment 20001247 PARAMETER Experiment Name: At_Far-red-induction_P Parameter: Tissue Value: Whole Plant
  misc_feature: MA Experiment ID: 20001248 Result: Up-regulated in Transcription
  misc_feature: MA Experiment 20001248 PARAMETER Experiment Name: At_Far-red-induction_P Parameter: Age (day) Value: 7
  misc_feature: MA Experiment 20001248 PARAMETER Experiment Name: At_Far-red-induction_P Parameter: Light Value: Far-red vs. White
  misc_feature: MA Experiment 20001248 PARAMETER Experiment Name: At_Far-red-induction_P Parameter: Organism Value: A. thaliana
  misc_feature: MA Experiment 20001248 PARAMETER Experiment Name: At_Far-red-induction_P Parameter: Plant Line Value: Columbia
  misc_feature: MA Experiment 20001248 PARAMETER Experiment Name: At_Far-red-induction_P Parameter: Timepoint (hr) Value: 4
  misc_feature: MA Experiment 20001248 PARAMETER Experiment Name: At_Far-red-induction_P Parameter: Tissue Value: Whole Plant
  misc_feature: MA Experiment ID: 20001450 Result: Up-regulated in Transcription
  misc_feature: MA Experiment 20001450 PARAMETER Experiment Name: At_Far-red-induction_P Parameter: Age (day) Value: 7
  misc_feature: MA Experiment 20001450 PARAMETER Experiment Name: At_Far-red-induction_P Parameter: Light Value: Far-red vs. White
  misc_feature: MA Experiment 20001450 PARAMETER Experiment Name: At_Far-red-induction_P Parameter: Organism Value: A. thaliana
  misc_feature: MA Experiment 20001450 PARAMETER Experiment Name: At_Far-red-induction_P Parameter: Plant Line Value: Columbia
  misc_feature: MA Experiment 20001450 PARAMETER Experiment Name: At_Far-red-induction_P Parameter: Timepoint (hr) Value: 8
  misc_feature: MA Experiment 20001450 PARAMETER Experiment Name: At_Far-red-induction_P Parameter: Tissue Value: Whole Plant
  misc_feature: MA Experiment ID: 20001451 Result: Up-regulated in Transcription
  misc_feature: MA Experiment 20001451 PARAMETER Experiment Name: At_Far-red-induction_P Parameter: Age (day) Value: 7
  misc_feature: MA Experiment 20001451 PARAMETER Experiment Name: At_Far-red-induction_P Parameter: Light Value: Far-red vs. White
  misc_feature: MA Experiment 20001451 PARAMETER Experiment Name: At_Far-red-induction_P Parameter: Organism Value: A. thaliana
  misc_feature: MA Experiment 20001451 PARAMETER Experiment Name: At_Far-red-induction_P Parameter: Plant Line Value: Columbia
  misc_feature: MA Experiment 20001451 PARAMETER Experiment Name: At_Far-red-induction_P Parameter: Timepoint (hr) Value: 24
  misc_feature: MA Experiment 20001451 PARAMETER Experiment Name: At_Far-red-induction_P Parameter: Tissue Value: Whole Plant
  misc_feature: MA Experiment ID: 20001554 Result: Down-regulated in Transcription
  misc_feature: MA Experiment 20001554 PARAMETER Experiment Name: At_Drought_Soil_Dry_P Parameter: Age (day) Value: 21
  misc_feature: MA Experiment 20001554 PARAMETER Experiment Name: At_Drought_Soil_Dry_P Parameter: Organism Value: A. thaliana
  misc_feature: MA Experiment 20001554 PARAMETER Experiment Name: At_Drought_Soil_Dry_P Parameter: Plant Line Value: WS
  misc_feature: MA Experiment 20001554 PARAMETER Experiment Name: At_Drought_Soil_Dry_P Parameter: Post Timepoint (hr) Value: None
  misc_feature: MA Experiment 20001554 PARAMETER Experiment Name: At_Drought_Soil_Dry_P Parameter: Post-Treatment Value: None
  misc_feature: MA Experiment 20001554 PARAMETER Experiment Name: At_Drought_Soil_Dry_P Parameter: Timepoint (day) Value: 7
  misc_feature: MA Experiment 20001554 PARAMETER Experiment Name: At_Drought_Soil_Dry_P Parameter: Treatment Value: Drought vs. No Drought
  misc_feature: MA Experiment ID: 20001555 Result: Down-regulated in Transcription
  misc_feature: MA Experiment 20001555 PARAMETER Experiment Name: At_Drought_Soil_Dry_P Parameter: Age (day) Value: 24
  misc_feature: MA Experiment 20001555 PARAMETER Experiment Name: At_Drought_Soil_Dry_P Parameter: Organism Value: A. thaliana
  misc_feature: MA Experiment 20001555 PARAMETER Experiment Name: At_Drought_Soil_Dry_P Parameter: Plant Line Value: WS
  misc_feature: MA Experiment 20001555 PARAMETER Experiment Name: At_Drought_Soil_Dry_P Parameter: Post Timepoint (hr) Value: None
  misc_feature: MA Experiment 20001555 PARAMETER Experiment Name: At_Drought_Soil_Dry_P Parameter: Post-Treatment Value: None
  misc_feature: MA Experiment 20001555 PARAMETER Experiment Name: At_Drought_Soil_Dry_P Parameter: Timepoint (day) Value: 10
  misc_feature: MA Experiment 20001555 PARAMETER Experiment Name: At_Drought_Soil_Dry_P Parameter: Treatment Value: Drought vs. No Drought
  misc_feature: MA Experiment ID: 20001556 Result: Down-regulated in Transcription
  misc_feature: MA Experiment 20001556 PARAMETER Experiment Name: At_Drought_Soil_Dry_P Parameter: Age (day) Value: 26
  misc_feature: MA Experiment 20001556 PARAMETER Experiment Name: At_Drought_Soil_Dry_P Parameter: Organism Value: A. thaliana
  misc_feature: MA Experiment 20001556 PARAMETER Experiment Name: At_Drought_Soil_Dry_P Parameter: Plant Line Value: WS
  misc_feature: MA Experiment 20001556 PARAMETER Experiment Name: At_Drought_Soil_Dry_P Parameter: Post Timepoint (hr) Value: None
  misc_feature: MA Experiment 20001556 PARAMETER Experiment Name: At_Drought_Soil_Dry_P Parameter: Post-Treatment Value: None
  misc_feature: MA Experiment 20001556 PARAMETER Experiment Name: At_Drought_Soil_Dry_P Parameter: Timepoint (day) Value: 12
  misc_feature: MA Experiment 20001556 PARAMETER Experiment Name: At_Drought_Soil_Dry_P Parameter: Treatment Value: Drought vs. No Drought
  misc_feature: MA Experiment ID: 20001557 Result: Down-regulated in Transcription
  misc_feature: MA Experiment 20001557 PARAMETER Experiment Name: At_Drought_Soil_Dry_P Parameter: Age (day) Value: 27
  misc_feature: MA Experiment 20001557 PARAMETER Experiment Name: At_Drought_Soil_Dry_P Parameter: Organism Value: A. thaliana
  misc_feature: MA Experiment 20001557 PARAMETER Experiment Name: At_Drought_Soil_Dry_P Parameter: Plant Line Value: WS
  misc_feature: MA Experiment 20001557 PARAMETER Experiment Name: At_Drought_Soil_Dry_P Parameter: Post Timepoint (hr) Value: 3
  misc_feature: MA Experiment 20001557 PARAMETER Experiment Name: At_Drought_Soil_Dry_P Parameter: Post-Treatment Value: Re-Water vs. No Drought
  misc_feature: MA Experiment 20001557 PARAMETER Experiment Name: At_Drought_Soil_Dry_P Parameter: Timepoint (day) Value: 13
  misc_feature: MA Experiment 20001557 PARAMETER Experiment Name: At_Drought_Soil_Dry_P Parameter: Treatment Value: Drought vs. No Drought
  misc_feature: MA Experiment ID: 20001558 Result: Down-regulated in Transcription
  misc_feature: MA Experiment 20001558 PARAMETER Experiment Name: At_Drought_Soil_Dry_P Parameter: Age (day) Value: 27
  misc_feature: MA Experiment 20001558 PARAMETER Experiment Name: At_Drought_Soil_Dry_P Parameter: Organism Value: A. thaliana
  misc_feature: MA Experiment 20001558 PARAMETER Experiment Name: At_Drought_Soil_Dry_P Parameter: Plant Line Value: WS
  misc_feature: MA Experiment 20001558 PARAMETER Experiment Name: At_Drought_Soil_Dry_P Parameter: Post Timepoint (hr) Value: 6
  misc_feature: MA Experiment 20001558 PARAMETER Experiment Name: At_Drought_Soil_Dry_P Parameter: Post-Treatment Value: Re-Water vs. No Drought
  misc_feature: MA Experiment 20001558 PARAMETER Experiment Name: At_Drought_Soil_Dry_P Parameter: Timepoint (day) Value: 13
  misc_feature: MA Experiment 20001558 PARAMETER Experiment Name: At_Drought_Soil_Dry_P Parameter: Treatment Value: Drought vs. No Drought
  misc_feature: MA Experiment ID: 20001559 Result: Down-regulated in Transcription
  misc_feature: MA Experiment 20001559 PARAMETER Experiment Name: At_Drought_Soil_Dry_P Parameter: Age (day) Value: 28
  misc_feature: MA Experiment 20001559 PARAMETER Experiment Name: At_Drought_Soil_Dry_P Parameter: Organism Value: A. thaliana
  misc_feature: MA Experiment 20001559 PARAMETER Experiment Name: At_Drought_Soil_Dry_P Parameter: Plant Line Value: WS
  misc_feature: MA Experiment 20001559 PARAMETER Experiment Name: At_Drought_Soil_Dry_P Parameter: Post Timepoint (hr) Value: 29
  misc_feature: MA Experiment 20001559 PARAMETER Experiment Name: At_Drought_Soil_Dry_P Parameter: Post-Treatment Value: Re-Water vs. No Drought
  misc_feature: MA Experiment 20001559 PARAMETER Experiment Name: At_Drought_Soil_Dry_P Parameter: Timepoint (day) Value: 14
  misc_feature: MA Experiment 20001559 PARAMETER Experiment Name: At_Drought_Soil_Dry_P Parameter: Treatment Value: Drought vs. No Drought
  misc_feature: MA Experiment ID: 20001560 Result: Down-regulated in Transcription
  misc_feature: MA Experiment 20001560 PARAMETER Experiment Name: At_Drought_Soil_Dry_P Parameter: Age (day) Value: 28
  misc_feature: MA Experiment 20001560 PARAMETER Experiment Name: At_Drought_Soil_Dry_P Parameter: Organism Value: A. thaliana
  misc_feature: MA Experiment 20001560 PARAMETER Experiment Name: At_Drought_Soil_Dry_P Parameter: Plant Line Value: WS
  misc_feature: MA Experiment 20001560 PARAMETER Experiment Name: At_Drought_Soil_Dry_P Parameter: Post Timepoint (hr) Value: None
  misc_feature: MA Experiment 20001560 PARAMETER Experiment Name: At_Drought_Soil_Dry_P Parameter: Post-Treatment Value: None
  misc_feature: MA Experiment 20001560 PARAMETER Experiment Name: At_Drought_Soil_Dry_P Parameter: Timepoint (day) Value: 14
  misc_feature: MA Experiment 20001560 PARAMETER Experiment Name: At_Drought_Soil_Dry_P Parameter: Treatment Value: Drought vs. No Drought
  misc_feature: MA Experiment ID: 20001755 Result: Down-regulated in Transcription
  misc_feature: MA Experiment 20001755 PARAMETER Experiment Name: At_50mM_NH4NO3_L-to-H_P Parameter: Timepoint (hr) Value: 2
  misc_feature: MA Experiment 20001755 PARAMETER Experiment Name: At_50mM_NH4NO3_L-to-H_P Parameter: Tissue Value: Leaf
  misc_feature: MA Experiment 20001755 PARAMETER Experiment Name: At_50mM_NH4NO3_L-to-H_P Parameter: Treatment Value: 50mM NH4NO3 vs 100mM Mannitol
  misc_feature: MA Experiment ID: 20001760 Result: Down-regulated in Transcription
  misc_feature: MA Experiment 20001760 PARAMETER Experiment Name: At_50mM_NH4NO3_L-to-H_P Parameter: Timepoint (hr) Value: 2
  misc_feature: MA Experiment 20001760 PARAMETER Experiment Name: At_50mM_NH4NO3_L-to-H_P Parameter: Tissue Value: Siliques
  misc_feature: MA Experiment 20001760 PARAMETER Experiment Name: At_50mM_NH4NO3_L-to-H_P Parameter: Treatment Value: 50mM NH4NO3 vs 100mM Mannitol
  misc_feature: MA Experiment ID: 20001904 Result: Down-regulated in Transcription
  misc_feature: MA Experiment 20001904 PARAMETER Experiment Name: At_Drought_Reproduction_P Parameter: Age (day) Value: 37
  misc_feature: MA Experiment 20001904 PARAMETER Experiment Name: At_Drought_Reproduction_P Parameter: Organism Value: A. thaliana
  misc_feature: MA Experiment 20001904 PARAMETER Experiment Name: At_Drought_Reproduction_P Parameter: Plant Line Value: WS
  misc_feature: MA Experiment 20001904 PARAMETER Experiment Name: At_Drought_Reproduction_P Parameter: Timepoint (day) Value: 7
  misc_feature: MA Experiment 20001904 PARAMETER Experiment Name: At_Drought_Reproduction_P Parameter: Tissue Value: Rosettes
  misc_feature: MA Experiment 20001904 PARAMETER Experiment Name: At_Drought_Reproduction_P Parameter: Treatment Value: Drought vs. No Drought
  misc_feature: MA Experiment ID: 20001905 Result: Down-regulated in Transcription
  misc_feature: MA Experiment 20001905 PARAMETER Experiment Name: At_Drought_Reproduction_P Parameter: Age (day) Value: 40
  misc_feature: MA Experiment 20001905 PARAMETER Experiment Name: At_Drought_Reproduction_P Parameter: Organism Value: A. thaliana
  misc_feature: MA Experiment 20001905 PARAMETER Experiment Name: At_Drought_Reproduction_P Parameter: Plant Line Value: WS
  misc_feature: MA Experiment 20001905 PARAMETER Experiment Name: At_Drought_Reproduction_P Parameter: Timepoint (day) Value: 10
  misc_feature: MA Experiment 20001905 PARAMETER Experiment Name: At_Drought_Reproduction_P Parameter: Tissue Value: Rosettes
  misc_feature: MA Experiment 20001905 PARAMETER Experiment Name: At_Drought_Reproduction_P Parameter: Treatment Value: Drought vs. No Drought
  misc_feature: MA Experiment ID: 20001907 Result: Down-regulated in Transcription
  misc_feature: MA Experiment 20001907 PARAMETER Experiment Name: At_Drought_Reproduction_P Parameter: Age (day) Value: 37
  misc_feature: MA Experiment 20001907 PARAMETER Experiment Name: At_Drought_Reproduction_P Parameter: Organism Value: A. thaliana
  misc_feature: MA Experiment 20001907 PARAMETER Experiment Name: At_Drought_Reproduction_P Parameter: Plant Line Value: WS
  misc_feature: MA Experiment 20001907 PARAMETER Experiment Name: At_Drought_Reproduction_P Parameter: Timepoint (day) Value: 7
  misc_feature: MA Experiment 20001907 PARAMETER Experiment Name: At_Drought_Reproduction_P Parameter: Tissue Value: Siliques
  misc_feature: MA Experiment 20001907 PARAMETER Experiment Name: At_Drought_Reproduction_P Parameter: Treatment Value: Drought vs. No Drought
  misc_feature: MA Experiment ID: 20001909 Result: Up-regulated in Transcription
  misc_feature: MA Experiment 20001909 PARAMETER Experiment Name: At_Drought_Reproduction_P Parameter: Age (day) Value: 35
  misc_feature: MA Experiment 20001909 PARAMETER Experiment Name: At_Drought_Reproduction_P Parameter: Organism Value: A. thaliana
  misc_feature: MA Experiment 20001909 PARAMETER Experiment Name: At_Drought_Reproduction_P Parameter: Plant Line Value: WS
  misc_feature: MA Experiment 20001909 PARAMETER Experiment Name: At_Drought_Reproduction_P Parameter: Timepoint (day) Value: 5
  misc_feature: MA Experiment 20001909 PARAMETER Experiment Name: At_Drought_Reproduction_P Parameter: Tissue Value: Flowers
  misc_feature: MA Experiment 20001909 PARAMETER Experiment Name: At_Drought_Reproduction_P Parameter: Treatment Value: Drought vs. No Drought
  misc_feature: MA Experiment ID: 20001911 Result: Up-regulated in Transcription
  misc_feature: MA Experiment 20001911 PARAMETER Experiment Name: At_Drought_Reproduction_P Parameter: Age (day) Value: 40
  misc_feature: MA Experiment 20001911 PARAMETER Experiment Name: At_Drought_Reproduction_P Parameter: Organism Value: A. thaliana
  misc_feature: MA Experiment 20001911 PARAMETER Experiment Name: At_Drought_Reproduction_P Parameter: Plant Line Value: WS
  misc_feature: MA Experiment 20001911 PARAMETER Experiment Name: At_Drought_Reproduction_P Parameter: Timepoint (day) Value: 10
  misc_feature: MA Experiment 20001911 PARAMETER Experiment Name: At_Drought_Reproduction_P Parameter: Tissue Value: Flowers
  misc_feature: MA Experiment 20001911 PARAMETER Experiment Name: At_Drought_Reproduction_P Parameter: Treatment Value: Drought vs. No Drought

SEQ ID NO: 32874 - protein, 182 aa, Arabidopsis thaliana; identical to SEQ ID NO: 29284
  peptide (1)..(182): Ceres Seq. ID no. 12331872
  misc_feature (73)..(176): Pfam Name: Rhodanese-like domain Pfam Description: Rhodanese-like domain
  misc_feature (72)..(180): Homolog of NCBI NO: 18425042 NR Description: senescence-associated protein
  misc_feature (64)..(176): Homolog of NCBI NO: 2129628 NR Description: ketoconazole resistance protein - Arabidopsis
  misc_feature (64)..(181): Homolog of NCBI NO: 30698182 NR Description: senescence-associated protein [Arabidopsis
  misc_feature (53)..(181): Homolog of NCBI NO: 7340289 NR Description: OP1 [Cucumis sativus]
  misc_feature (13)..(181): Homolog of NCBI NO: 7594903 NR Description: Ntdin [Nicotiana tabacum]
  misc_feature (1)..(182): Homolog of NCBI NO: 118636 NR Description: Senescence-associated protein DIN1
  misc_feature (1)..(182): Homolog of NCBI NO: 7488606 NR Description: senescence-associated protein din1,
  misc_feature (1)..(182): Homolog of NCBI NO: 1046268 NR Description: senescence-associated protein [Arabidopsis
  misc_feature (1)..(182): Homolog of NCBI NO: 21537402 NR Description: senescence-associated protein sen1 [Arabidopsis
  misc_feature (1)..(182): Homolog of NCBI NO: 15233328 NR Description: senescence-associated protein sen1

SEQ ID NO: 32875 - DNA, 819 bp, Arabidopsis thaliana; identical to SEQ ID NO: 29285
  misc_feature (1)..(819): Ceres Seq. ID no. 12393395
  misc_feature: MA Experiment ID: 108434 Result: Up-regulated in Transcription
  misc_feature: MA Experiment 108434 PARAMETER Experiment Name: At_Root_Tips_cDNA_P Parameter: Tissue Value: Root Tips
  misc_feature: MA Experiment ID: 108462 Result: Down-regulated in Transcription
  misc_feature: MA Experiment 108462 PARAMETER Experiment Name: At_Germinating_Seeds_cDNA_P Parameter: Age (day) Value: 2 vs. 0
  misc_feature: MA Experiment 108462 PARAMETER Experiment Name: At_Germinating_Seeds_cDNA_P Parameter: Tissue Value: Germinating Seeds
  misc_feature: MA Experiment ID: 108463 Result: Down-regulated in Transcription
  misc_feature: MA Experiment 108463 PARAMETER Experiment Name: At_Germinating_Seeds_cDNA_P Parameter: Age (day) Value: 3 vs. 0
  misc_feature: MA Experiment 108463 PARAMETER Experiment Name: At_Germinating_Seeds_cDNA_P Parameter: Tissue Value: Germinating Seeds
  misc_feature: MA Experiment ID: 108464 Result: Down-regulated in Transcription
  misc_feature: MA Experiment 108464 PARAMETER Experiment Name: At_Germinating_Seeds_cDNA_P Parameter: Age (day) Value: 4 vs. 0
  misc_feature: MA Experiment 108464 PARAMETER Experiment Name: At_Germinating_Seeds_cDNA_P Parameter: Tissue Value: Germinating Seeds
  misc_feature: MA Experiment ID: 108569 Result: Down-regulated in Transcription
  misc_feature: MA Experiment 108569 PARAMETER Experiment Name: At_0.001%_MeJA__cDNA_P Parameter: Timepoint (hr) Value: 6
  misc_feature: MA Experiment 108569 PARAMETER Experiment Name: At_0.001%_MeJA__cDNA_P Parameter: Tissue Value: Aerial
  misc_feature: MA Experiment 108569 PARAMETER Experiment Name: At_0.001%_MeJA__cDNA_P Parameter: Treatment Value: 0.001% MeJA vs. No Treatment
  misc_feature: MA Experiment ID: 20000180 Result: Down-regulated in Transcription
  misc_feature: MA Experiment 20000180 PARAMETER Experiment Name: At_Germinating_Seeds_P Parameter: Age (hr) Value: 24 vs. 0
  misc_feature: MA Experiment 20000180 PARAMETER Experiment Name: At_Germinating_Seeds_P Parameter: Tissue Value: Germinating Seeds
  misc_feature: MA Experiment ID: 20000184 Result: Down-regulated in Transcription
  misc_feature: MA Experiment 20000184 PARAMETER Experiment Name: At_Shoots__P Parameter: Age (day) Value: 7
  misc_feature: MA Experiment 20000184 PARAMETER Experiment Name: At_Shoots__P Parameter: Tissue Value: Shoots vs. Whole Plant
  misc_feature: MA Experiment ID: 20000227 Result: Down-regulated in Transcription
  misc_feature: MA Experiment 20000227 PARAMETER Experiment Name: At_Root-Tips-vs-Tops_P Parameter: Tissue Value: Root Tips vs. Root Tops
  misc_feature: MA Experiment ID: 20001557 Result: Up-regulated in Transcription
  misc_feature: MA Experiment 20001557 PARAMETER Experiment Name: At_Drought_Soil_Dry_P Parameter: Age (day) Value: 27
  misc_feature: MA Experiment 20001557 PARAMETER Experiment Name: At_Drought_Soil_Dry_P Parameter: Organism Value: A. thaliana
  misc_feature: MA Experiment 20001557 PARAMETER Experiment Name: At_Drought_Soil_Dry_P Parameter: Plant Line Value: WS
  misc_feature: MA Experiment 20001557 PARAMETER Experiment Name: At_Drought_Soil_Dry_P Parameter: Post Timepoint (hr) Value: 3
  misc_feature: MA Experiment 20001557 PARAMETER Experiment Name: At_Drought_Soil_Dry_P Parameter: Post-Treatment Value: Re-Water vs. No Drought
  misc_feature: MA Experiment 20001557 PARAMETER Experiment Name: At_Drought_Soil_Dry_P Parameter: Timepoint (day) Value: 13
  misc_feature: MA Experiment 20001557 PARAMETER Experiment Name: At_Drought_Soil_Dry_P Parameter: Treatment Value: Drought vs. No Drought
  misc_feature: MA Experiment ID: 20001558 Result: Up-regulated in Transcription
  misc_feature: MA Experiment 20001558 PARAMETER Experiment Name: At_Drought_Soil_Dry_P Parameter: Age (day) Value: 27
  misc_feature: MA Experiment 20001558 PARAMETER Experiment Name: At_Drought_Soil_Dry_P Parameter: Organism Value: A. thaliana
  misc_feature: MA Experiment 20001558 PARAMETER Experiment Name: At_Drought_Soil_Dry_P Parameter: Plant Line Value: WS
  misc_feature: MA Experiment 20001558 PARAMETER Experiment Name: At_Drought_Soil_Dry_P Parameter: Post Timepoint (hr) Value: 6
  misc_feature: MA Experiment 20001558 PARAMETER Experiment Name: At_Drought_Soil_Dry_P Parameter: Post-Treatment Value: Re-Water vs. No Drought
  misc_feature: MA Experiment 20001558 PARAMETER Experiment Name: At_Drought_Soil_Dry_P Parameter: Timepoint (day) Value: 13
  misc_feature: MA Experiment 20001558 PARAMETER Experiment Name: At_Drought_Soil_Dry_P Parameter: Treatment Value: Drought vs. No Drought
  misc_feature: MA Experiment ID: 20001757 Result: Up-regulated in Transcription
  misc_feature: MA Experiment 20001757 PARAMETER Experiment Name: At_50mM_NH4NO3_L-to-H_P Parameter: Timepoint (hr) Value: 6
  misc_feature: MA Experiment 20001757 PARAMETER Experiment Name: At_50mM_NH4NO3_L-to-H_P Parameter: Tissue Value: Leaf
  misc_feature: MA Experiment 20001757 PARAMETER Experiment Name: At_50mM_NH4NO3_L-to-H_P Parameter: Treatment Value: 50mM NH4NO3 vs 100mM Mannitol

SEQ ID NO: 32876 - protein, 243 aa, Arabidopsis thaliana; identical to SEQ ID NO: 29286
  peptide (1)..(243): Ceres Seq. ID no. 12393396
  misc_feature (39)..(128): Pfam Name: RNA polymerase Rpb5, N-terminal domain Pfam Description: RNA polymerase Rpb5, N-terminal domain
  misc_feature (42)..(242): Homolog of NCBI NO: 19922004 NR Description: CG11979-PA [Drosophila melanogaster]
  misc_feature (40)..(243): Homolog of NCBI NO: 39595790 NR Description: Hypothetical protein CBG12745 [Caenorhabditis
  misc_feature (40)..(243): Homolog of NCBI NO: 17507947 NR Description: RNA polymerase Rpb5, N-terminal domain and RNA
  misc_feature (42)..(242): Homolog of NCBI NO: 14589951 NR Description: DNA directed RNA polymerase II polypeptide E
  misc_feature (42)..(242): Homolog of NCBI NO: 2896797 NR Description: RPB5_Human [Homo sapiens]
  misc_feature (42)..(242): Homolog of NCBI NO: 28497750 NR Description: polymerase (RNA) II (DNA directed) polypeptide E
  misc_feature (42)..(242): Homolog of NCBI NO: 2135016 NR Description: DNA-directed RNA polymerase (EC 2.7.7.6) II 23K
  misc_feature (42)..(242): Homolog of NCBI NO: 1173134 NR Description: DNA-directed RNA polymerase II 23 kDa polypeptide
  misc_feature (39)..(243): Homolog of NCBI NO: 38344231 NR Description: OJ991113_30.8 [Oryza sativa (japonica
  misc_feature (39)..(243): Homolog of NCBI NO: 15228724 NR Description: RNA polymerase I, II and III 24.3 kDa subunit

SEQ ID NO: 32877 - protein, 205 aa, Arabidopsis thaliana; identical to SEQ ID NO: 29287
  peptide (1)..(205): Ceres Seq. ID no. 12393397
  misc_feature (1)..(90): Pfam Name: RNA polymerase Rpb5, N-terminal domain Pfam Description: RNA polymerase Rpb5, N-terminal domain
  misc_feature (4)..(204): Homolog of NCBI NO: 19922004 NR Description: CG11979-PA [Drosophila melanogaster]
  misc_feature (2)..(205): Homolog of NCBI NO: 39595790 NR Description: Hypothetical protein CBG12745 [Caenorhabditis
  misc_feature (2)..(205): Homolog of NCBI NO: 17507947 NR Description: RNA polymerase Rpb5, N-terminal domain and RNA
  misc_feature (4)..(204): Homolog of NCBI NO: 14589951 NR Description: DNA directed RNA polymerase II polypeptide E
  misc_feature (4)..(204): Homolog of NCBI NO: 2896797 NR Description: RPB5_Human [Homo sapiens]
  misc_feature (4)..(204): Homolog of NCBI NO: 28497750 NR Description: polymerase (RNA) II (DNA directed) polypeptide E
  misc_feature (4)..(204): Homolog of NCBI NO: 2135016 NR Description: DNA-directed RNA polymerase (EC 2.7.7.6) II 23K
  misc_feature (4)..(204): Homolog of NCBI NO: 1173134 NR Description: DNA-directed RNA polymerase II 23 kDa polypeptide
  misc_feature (1)..(205): Homolog of NCBI NO: 38344231 NR Description: OJ991113_30.8 [Oryza sativa (japonica
  misc_feature (1)..(205): Homolog of NCBI NO: 15228724 NR Description: RNA polymerase I, II and III 24.3 kDa subunit

SEQ ID NO: 32878 - protein, 188 aa, Arabidopsis thaliana; identical to SEQ ID NO: 29288
  peptide (1)..(188): Ceres Seq. ID no. 12393398
  misc_feature (1)..(73): Pfam Name: RNA polymerase Rpb5, N-terminal domain Pfam Description: RNA polymerase Rpb5, N-terminal domain
  misc_feature (1)..(187): Homolog of NCBI NO: 19922004 NR Description: CG11979-PA [Drosophila melanogaster]
  misc_feature (1)..(188): Homolog of NCBI NO: 39595790 NR Description: Hypothetical protein CBG12745 [Caenorhabditis
  misc_feature (1)..(188): Homolog of NCBI NO: 17507947 NR Description: RNA polymerase Rpb5, N-terminal domain and RNA
  misc_feature (1)..(187): Homolog of NCBI NO: 14589951 NR Description: DNA directed RNA polymerase II polypeptide E
  misc_feature (1)..(187): Homolog of NCBI NO: 2896797 NR Description: RPB5_Human [Homo sapiens]
  misc_feature (1)..(187): Homolog of NCBI NO: 28497750 NR Description: polymerase (RNA) II (DNA directed) polypeptide E
  misc_feature (1)..(187): Homolog of NCBI NO: 2135016 NR Description: DNA-directed RNA polymerase (EC 2.7.7.6) II 23K
  misc_feature (1)..(187): Homolog of NCBI NO: 1173134 NR Description: DNA-directed RNA polymerase II 23 kDa polypeptide
  misc_feature (1)..(188): Homolog of NCBI NO: 38344231 NR Description: OJ991113_30.8 [Oryza sativa (japonica
  misc_feature (1)..(188): Homolog of NCBI NO: 15228724 NR Description: RNA polymerase I, II and III 24.3 kDa subunit

SEQ ID NO: 32879 - DNA, 1146 bp, Arabidopsis thaliana; identical to SEQ ID NO: 29289
  misc_feature (1)..(1146): Ceres Seq. ID no. 12337382
  misc_feature: MA Experiment ID: 108434 Result: Up-regulated in Transcription
  misc_feature: MA Experiment 108434 PARAMETER Experiment Name: At_Root_Tips_cDNA_P Parameter: Tissue Value: Root Tips
  misc_feature: MA Experiment ID: 108461 Result: Up-regulated in Transcription
  misc_feature: MA Experiment 108461 PARAMETER Experiment Name: At_Germinating_Seeds_cDNA_P Parameter: Age (day) Value: 1 vs. 0
  misc_feature: MA Experiment 108461 PARAMETER Experiment Name: At_Germinating_Seeds_cDNA_P Parameter: Tissue Value: Germinating Seeds
  misc_feature: MA Experiment ID: 108462 Result: Up-regulated in Transcription
  misc_feature: MA Experiment 108462 PARAMETER Experiment Name: At_Germinating_Seeds_cDNA_P Parameter: Age (day) Value: 2 vs. 0
  misc_feature: MA Experiment 108462 PARAMETER Experiment Name: At_Germinating_Seeds_cDNA_P Parameter: Tissue Value: Germinating Seeds
  misc_feature: MA Experiment ID: 108464 Result: Up-regulated in Transcription
  misc_feature: MA Experiment 108464 PARAMETER Experiment Name: At_Germinating_Seeds_cDNA_P Parameter: Age (day) Value: 4 vs. 0
  misc_feature: MA Experiment 108464 PARAMETER Experiment Name: At_Germinating_Seeds_cDNA_P Parameter: Tissue Value: Germinating Seeds
  misc_feature: MA Experiment ID: 108579 Result: Up-regulated in Transcription
  misc_feature: MA Experiment 108579 PARAMETER Experiment Name: At_4deg_Cold_cDNA_P Parameter: Temperature (deg C) Value: 4 vs. 22
  misc_feature: MA Experiment 108579 PARAMETER Experiment Name: At_4deg_Cold_cDNA_P Parameter: Timepoint (hr) Value: 6
  misc_feature: MA Experiment 108579 PARAMETER Experiment Name: At_4deg_Cold_cDNA_P Parameter: Tissue Value: Aerial
  misc_feature: MA Experiment ID: 108585 Result: Up-regulated in Transcription
  misc_feature: MA Experiment 108585 PARAMETER Experiment Name: At_5mM_NaNP_cDNA_P Parameter: Timepoint (hr) Value: 6
  misc_feature: MA Experiment 108585 PARAMETER Experiment Name: At_5mM_NaNP_cDNA_P Parameter: Tissue Value: Aerial
  misc_feature: MA Experiment 108585 PARAMETER Experiment Name: At_5mM_NaNP_cDNA_P Parameter: Treatment Value: null
  misc_feature: MA Experiment ID: 108595 Result: Down-regulated in Transcription
  misc_feature: MA Experiment 108595 PARAMETER Experiment Name: At_Ler-pi_Ovule_cDNA_P Parameter: Plant Line Value: null
  misc_feature: MA Experiment ID: 20000069 Result: Down-regulated in Transcription
  misc_feature: MA Experiment 20000069 PARAMETER Experiment Name: At_100uM_ABA_Mutants_cDNA_P Parameter: Plant Line Value: CS23
  misc_feature: MA Experiment 20000069 PARAMETER Experiment Name: At_100uM_ABA_Mutants_cDNA_P Parameter: Timepoint (hr) Value: 6
  misc_feature: MA Experiment 20000069 PARAMETER Experiment Name: At_100uM_ABA_Mutants_cDNA_P Parameter: Tissue Value: Aerial
  misc_feature: MA Experiment 20000069 PARAMETER Experiment Name: At_100uM_ABA_Mutants_cDNA_P Parameter: Treatment Value: 100uM ABA vs. No Treatment
  misc_feature: MA Experiment ID: 20000070 Result: Down-regulated in Transcription
  misc_feature: MA Experiment 20000070 PARAMETER Experiment Name: At_100uM_ABA_Mutants_cDNA_P Parameter: Plant Line Value: CS24
  misc_feature: MA Experiment 20000070 PARAMETER Experiment Name: At_100uM_ABA_Mutants_cDNA_P Parameter: Timepoint (hr) Value: 6
  misc_feature: MA Experiment 20000070 PARAMETER Experiment Name: At_100uM_ABA_Mutants_cDNA_P Parameter: Tissue Value: Aerial
  misc_feature: MA Experiment 20000070 PARAMETER Experiment Name: At_100uM_ABA_Mutants_cDNA_P Parameter: Treatment Value: 100uM ABA vs. No Treatment
  misc_feature: MA Experiment ID: 20000071 Result: Down-regulated in Transcription
  misc_feature: MA Experiment 20000071 PARAMETER Experiment Name: At_100uM_ABA_Mutants_cDNA_P Parameter: Plant Line Value: CS8104
  misc_feature: MA Experiment 20000071 PARAMETER Experiment Name: At_100uM_ABA_Mutants_cDNA_P Parameter: Timepoint (hr) Value: 6
  misc_feature: MA Experiment 20000071 PARAMETER Experiment Name: At_100uM_ABA_Mutants_cDNA_P Parameter: Tissue Value: Aerial
  misc_feature: MA Experiment 20000071 PARAMETER Experiment Name: At_100uM_ABA_Mutants_cDNA_P Parameter: Treatment Value: 100uM ABA vs. No Treatment
  misc_feature: MA Experiment ID: 20000086 Result: Down-regulated in Transcription
  misc_feature: MA Experiment 20000086 PARAMETER Experiment Name: At_100uM_ABA_Mutants_cDNA_P Parameter: Plant Line Value: CS22
  misc_feature: MA Experiment 20000086 PARAMETER Experiment Name: At_100uM_ABA_Mutants_cDNA_P Parameter: Timepoint (hr) Value: 6
  misc_feature: MA Experiment 20000086 PARAMETER Experiment Name: At_100uM_ABA_Mutants_cDNA_P Parameter: Tissue Value: Aerial
  misc_feature: MA Experiment 20000086 PARAMETER Experiment Name: At_100uM_ABA_Mutants_cDNA_P Parameter: Treatment Value: 100uM ABA vs. No Treatment
  misc_feature: MA Experiment ID: 20000087 Result: Down-regulated in Transcription
  misc_feature: MA Experiment 20000087 PARAMETER Experiment Name: At_100uM_ABA_Mutants_cDNA_P Parameter: Plant Line Value: WS
  misc_feature: MA Experiment 20000087 PARAMETER Experiment Name: At_100uM_ABA_Mutants_cDNA_P Parameter: Timepoint (hr) Value: 6
  misc_feature: MA Experiment 20000087 PARAMETER Experiment Name: At_100uM_ABA_Mutants_cDNA_P Parameter: Tissue Value: Aerial
  misc_feature: MA Experiment 20000087 PARAMETER Experiment Name: At_100uM_ABA_Mutants_cDNA_P Parameter: Treatment Value: 100uM ABA vs. No Treatment
  misc_feature: MA Experiment ID: 20000088 Result: Down-regulated in Transcription
  misc_feature: MA Experiment 20000088 PARAMETER Experiment Name: At_100uM_ABA_Mutants_cDNA_P Parameter: Plant Line Value: Landsberg
  misc_feature: MA Experiment 20000088 PARAMETER Experiment Name: At_100uM_ABA_Mutants_cDNA_P Parameter: Timepoint (hr) Value: 6
  misc_feature: MA Experiment 20000088 PARAMETER Experiment Name: At_100uM_ABA_Mutants_cDNA_P Parameter: Tissue Value: Aerial
  misc_feature: MA Experiment 20000088 PARAMETER Experiment Name: At_100uM_ABA_Mutants_cDNA_P Parameter: Treatment Value: 100uM ABA vs. No Treatment
  misc_feature: MA Experiment ID: 20000089 Result: Down-regulated in Transcription
  misc_feature: MA Experiment ID: 20000090 Result: Down-regulated in Transcription
  misc_feature: MA Experiment ID: 20000117 Result: Down-regulated in Transcription
  misc_feature: MA Experiment 20000117 PARAMETER Experiment Name: At_100uM_ABA_Mutants_cDNA_P Parameter: Plant Line Value: Columbia
  misc_feature: MA Experiment 20000117 PARAMETER Experiment Name: At_100uM_ABA_Mutants_cDNA_P Parameter: Timepoint (hr) Value: 6
  misc_feature: MA Experiment 20000117 PARAMETER Experiment Name: At_100uM_ABA_Mutants_cDNA_P Parameter: Tissue Value: Aerial
  misc_feature: MA Experiment 20000117 PARAMETER Experiment Name: At_100uM_ABA_Mutants_cDNA_P Parameter: Treatment Value: 100uM ABA vs. No Treatment
  misc_feature: MA Experiment ID: 20000179 Result: Up-regulated in Transcription
  misc_feature: MA Experiment 20000179 PARAMETER Experiment Name: At_Germinating_Seeds_P Parameter: Age (hr) Value: 6 vs. 0
  misc_feature: MA Experiment 20000179 PARAMETER Experiment Name: At_Germinating_Seeds_P Parameter: Tissue Value: Germinating Seeds
  misc_feature: MA Experiment ID: 20000180 Result: Up-regulated in Transcription
  misc_feature: MA Experiment 20000180 PARAMETER Experiment Name: At_Germinating_Seeds_P Parameter: Age (hr) Value: 24 vs. 0
  misc_feature: MA Experiment 20000180 PARAMETER Experiment Name: At_Germinating_Seeds_P Parameter: Tissue Value: Germinating Seeds
  misc_feature: MA Experiment ID: 20000184 Result: Up-regulated in Transcription
  misc_feature: MA Experiment 20000184 PARAMETER Experiment Name: At_Shoots__P Parameter: Age (day) Value: 7
  misc_feature: MA Experiment 20000184 PARAMETER Experiment Name: At_Shoots__P Parameter: Tissue Value: Shoots vs. Whole Plant
  misc_feature: MA Experiment ID: 20000264 Result: Down-regulated in Transcription
  misc_feature: MA Experiment 20000264 PARAMETER Experiment Name: At_Open_Flower_P Parameter: Age (day) Value: 21
  misc_feature: MA Experiment 20000264 PARAMETER Experiment Name: At_Open_Flower_P Parameter: Plant Line Value: WS
  misc_feature: MA Experiment 20000264 PARAMETER Experiment Name: At_Open_Flower_P Parameter: Tissue Value: Open Flower vs. Whole Plant
  misc_feature: MA Experiment ID: 20000265 Result: Down-regulated in Transcription
  misc_feature: MA Experiment 20000265 PARAMETER Experiment Name: At_Open_Flower_P Parameter: Age (day) Value: 21
  misc_feature: MA Experiment 20000265 PARAMETER Experiment Name: At_Open_Flower_P Parameter: Plant Line Value: WS
  misc_feature: MA Experiment 20000265 PARAMETER Experiment Name: At_Open_Flower_P Parameter: Tissue Value: Closed Flower vs. Whole Plant
  misc_feature: MA Experiment ID: 20000286 Result: Down-regulated in Transcription
  misc_feature: MA Experiment 20000286 PARAMETER Experiment Name: At_Open_Flower_P Parameter: Age (day) Value: 21
  misc_feature: MA Experiment 20000286 PARAMETER Experiment Name: At_Open_Flower_P Parameter: Plant Line Value: WS
  misc_feature: MA Experiment 20000286 PARAMETER Experiment Name: At_Open_Flower_P Parameter: Tissue Value: Half Open vs. Whole Plant
  misc_feature: MA Experiment ID: 20000437 Result: Down-regulated in Transcription
  misc_feature: MA Experiment 20000437 PARAMETER Experiment Name: At_Drought_P Parameter: Age (day) Value: 8
  misc_feature: MA Experiment 20000437 PARAMETER Experiment Name: At_Drought_P Parameter: Organism Value: A. thaliana
  misc_feature: MA Experiment 20000437 PARAMETER Experiment Name: At_Drought_P Parameter: Plant Line Value: WS
  misc_feature: MA Experiment 20000437 PARAMETER Experiment Name: At_Drought_P Parameter: Timepoint (hr) Value: 24
  misc_feature: MA Experiment 20000437 PARAMETER Experiment Name: At_Drought_P Parameter: Tissue Value: Whole Plant
  misc_feature: MA Experiment 20000437 PARAMETER Experiment Name: At_Drought_P Parameter: Treatment Value: Drought vs. No Drought
  misc_feature: MA Experiment ID: 20000794 Result: Down-regulated in Transcription
  misc_feature: MA Experiment 20000794 PARAMETER Experiment Name: At_Petals_P Parameter: Age (day) Value: 23-25 days
  misc_feature: MA Experiment 20000794 PARAMETER Experiment Name: At_Petals_P Parameter: Plant Line Value: WS
  misc_feature: MA Experiment 20000794 PARAMETER Experiment Name: At_Petals_P Parameter: Tissue Value: Petals vs. Whole plant
  misc_feature: MA Experiment ID: 20001555 Result: Down-regulated in Transcription
  misc_feature: MA Experiment 20001555 PARAMETER Experiment Name: At_Drought_Soil_Dry_P Parameter: Age (day) Value: 24
  misc_feature: MA Experiment 20001555 PARAMETER Experiment Name: At_Drought_Soil_Dry_P Parameter: Organism Value: A. thaliana
  misc_feature: MA Experiment 20001555 PARAMETER Experiment Name: At_Drought_Soil_Dry_P Parameter: Plant Line Value: WS
  misc_feature: MA Experiment 20001555 PARAMETER Experiment Name: At_Drought_Soil_Dry_P Parameter: Post Timepoint (hr) Value: None
  misc_feature: MA Experiment 20001555 PARAMETER Experiment Name: At_Drought_Soil_Dry_P Parameter: Post-Treatment Value: None
  misc_feature: MA Experiment 20001555 PARAMETER Experiment Name: At_Drought_Soil_Dry_P Parameter: Timepoint (day) Value: 10
  misc_feature: MA Experiment 20001555 PARAMETER Experiment Name: At_Drought_Soil_Dry_P Parameter: Treatment Value: Drought vs. No Drought
  misc_feature: MA Experiment ID: 20001556 Result: Down-regulated in Transcription
  misc_feature: MA Experiment 20001556 PARAMETER Experiment Name: At_Drought_Soil_Dry_P Parameter: Age (day) Value: 26
  misc_feature: MA Experiment 20001556 PARAMETER Experiment Name: At_Drought_Soil_Dry_P Parameter: Organism Value: A. thaliana
  misc_feature: MA Experiment 20001556 PARAMETER Experiment Name: At_Drought_Soil_Dry_P Parameter: Plant Line Value: WS
  misc_feature: MA Experiment 20001556 PARAMETER Experiment Name: At_Drought_Soil_Dry_P Parameter: Post Timepoint (hr) Value: None
  misc_feature: MA Experiment 20001556 PARAMETER Experiment Name: At_Drought_Soil_Dry_P Parameter: Post-Treatment Value: None
  misc_feature: MA Experiment 20001556 PARAMETER Experiment Name: At_Drought_Soil_Dry_P Parameter: Timepoint (day) Value: 12
  misc_feature: MA Experiment 20001556 PARAMETER Experiment Name: At_Drought_Soil_Dry_P Parameter: Treatment Value: Drought vs. No Drought
  misc_feature: MA Experiment ID: 20001559 Result: Down-regulated in Transcription
  misc_feature: MA Experiment 20001559 PARAMETER Experiment Name: At_Drought_Soil_Dry_P Parameter: Age (day) Value: 28
  misc_feature: MA Experiment 20001559 PARAMETER Experiment Name: At_Drought_Soil_Dry_P Parameter: Organism Value: A. thaliana
  misc_feature: MA Experiment 20001559 PARAMETER Experiment Name: At_Drought_Soil_Dry_P Parameter: Plant Line Value: WS
  misc_feature: MA Experiment 20001559 PARAMETER Experiment Name: At_Drought_Soil_Dry_P Parameter: Post Timepoint (hr) Value: 29
  misc_feature: MA Experiment 20001559 PARAMETER Experiment Name: At_Drought_Soil_Dry_P Parameter: Post-Treatment Value: Re-Water vs. No Drought
  misc_feature: MA Experiment 20001559 PARAMETER Experiment Name: At_Drought_Soil_Dry_P Parameter: Timepoint (day) Value: 14
  misc_feature: MA Experiment 20001559 PARAMETER Experiment Name: At_Drought_Soil_Dry_P Parameter: Treatment Value: Drought vs. No Drought
  misc_feature: MA Experiment ID: 20001904 Result: Down-regulated in Transcription
  misc_feature: MA Experiment 20001904 PARAMETER Experiment Name: At_Drought_Reproduction_P Parameter: Age (day) Value: 37
  misc_feature: MA Experiment 20001904 PARAMETER Experiment Name: At_Drought_Reproduction_P Parameter: Organism Value: A. thaliana
  misc_feature: MA Experiment 20001904 PARAMETER Experiment Name: At_Drought_Reproduction_P Parameter: Plant Line Value: WS
  misc_feature: MA Experiment 20001904 PARAMETER Experiment Name: At_Drought_Reproduction_P Parameter: Timepoint (day) Value: 7
  misc_feature: MA Experiment 20001904 PARAMETER Experiment Name: At_Drought_Reproduction_P Parameter: Tissue Value: Rosettes
  misc_feature: MA Experiment 20001904 PARAMETER Experiment Name: At_Drought_Reproduction_P Parameter: Treatment Value: Drought vs. No Drought
  misc_feature: MA Experiment ID: 20001905 Result: Down-regulated in Transcription
  misc_feature: MA Experiment 20001905 PARAMETER Experiment Name: At_Drought_Reproduction_P Parameter: Age (day) Value: 40
  misc_feature: MA Experiment 20001905 PARAMETER Experiment Name: At_Drought_Reproduction_P Parameter: Organism Value: A. thaliana
  misc_feature: MA Experiment 20001905 PARAMETER Experiment Name: At_Drought_Reproduction_P Parameter: Plant Line Value: WS
  misc_feature: MA Experiment 20001905 PARAMETER Experiment Name: At_Drought_Reproduction_P Parameter: Timepoint (day) Value: 10
  misc_feature: MA Experiment 20001905 PARAMETER Experiment Name: At_Drought_Reproduction_P Parameter: Tissue Value: Rosettes
  misc_feature: MA Experiment 20001905 PARAMETER Experiment Name: At_Drought_Reproduction_P Parameter: Treatment Value: Drought vs. No Drought
  misc_feature: MA Experiment ID: 20001911 Result: Down-regulated in Transcription
  misc_feature: MA Experiment 20001911 PARAMETER Experiment Name: At_Drought_Reproduction_P Parameter: Age (day) Value: 40
  misc_feature: MA Experiment 20001911 PARAMETER Experiment Name: At_Drought_Reproduction_P Parameter: Organism Value: A. thaliana
  misc_feature: MA Experiment 20001911 PARAMETER Experiment Name: At_Drought_Reproduction_P Parameter: Plant Line Value: WS
  misc_feature: MA Experiment 20001911 PARAMETER Experiment Name: At_Drought_Reproduction_P Parameter: Timepoint (day) Value: 10
  misc_feature: MA Experiment 20001911 PARAMETER Experiment Name: At_Drought_Reproduction_P Parameter: Tissue Value: Flowers
  misc_feature: MA Experiment 20001911 PARAMETER Experiment Name: At_Drought_Reproduction_P Parameter: Treatment Value: Drought vs. No Drought

SEQ ID NO: 32880 - protein, 144 aa, Arabidopsis thaliana; identical to SEQ ID NO: 29290
  peptide (1)..(144): Ceres Seq. ID no. 12337383
  misc_feature (1)..(143): Homolog of NCBI NO: 38566282 NR Description: Carnitine/acylcarnitine translocase [Silurana
  misc_feature (1)..(143): Homolog of NCBI NO: 27694786 NR Description: Similar to solute carrier family 25
  misc_feature (1)..(138): Homolog of NCBI NO: 31216089 NR Description: ENSANGP00000020391 [Anopheles gambiae]
  misc_feature (1)..(143): Homolog of NCBI NO: 38541954 NR Description: Unknown (protein for MGC:77760) [Danio rerio]
  misc_feature (1)..(139): Homolog of NCBI NO: 39593620 NR Description: Hypothetical protein CBG05908 [Caenorhabditis
  misc_feature (1)..(139): Homolog of NCBI NO: 17539560 NR Description: Embryonic tissue differentiation factor DIF-1,
  misc_feature (1)..(144): Homolog of NCBI NO: 37537072 NR Description: putative carnitine/acylcarnitine translocase
  misc_feature (1)..(144): Homolog of NCBI NO: 37537070 NR Description: putative carnitine/acylcarnitine translocase
  misc_feature (1)..(144): Homolog of NCBI NO: 9758516 NR Description: carnitine/acylcarnitine translocase-like protein
  misc_feature (1)..(144): Homolog of NCBI NO: 18422718 NR Description: mitochondrial carrier protein family

SEQ ID NO: 32881 - protein, 126 aa, Arabidopsis thaliana; identical to SEQ ID NO: 29291
  peptide (1)..(126): Ceres Seq. ID no. 12337384
  misc_feature (6)..(115): Homolog of NCBI NO: 38566282 NR Description: Carnitine/acylcarnitine translocase [Silurana
  misc_feature (6)..(115): Homolog of NCBI NO: 27694786 NR Description: Similar to solute carrier family 25
  misc_feature (6)..(115): Homolog of NCBI NO: 31216089 NR Description: ENSANGP00000020391 [Anopheles gambiae]
  misc_feature (6)..(115): Homolog of NCBI NO: 38541954 NR Description: Unknown (protein for MGC:77760) [Danio rerio]
  misc_feature (1)..(124): Homolog of NCBI NO: 39593620 NR Description: Hypothetical protein CBG05908 [Caenorhabditis
  misc_feature (1)..(124): Homolog of NCBI NO: 17539560 NR Description: Embryonic tissue differentiation factor DIF-1,
  misc_feature (1)..(115): Homolog of NCBI NO: 37537072 NR Description: putative carnitine/acylcarnitine translocase
  misc_feature (1)..(115): Homolog of NCBI NO: 37537070 NR Description: putative carnitine/acylcarnitine translocase
  misc_feature (1)..(115): Homolog of NCBI NO: 9758516 NR Description: carnitine/acylcarnitine translocase-like protein
  misc_feature (1)..(115): Homolog of NCBI NO: 18422718 NR Description: mitochondrial carrier protein family

SEQ ID NO: 32882 - protein, 110 aa, Arabidopsis thaliana; identical to SEQ ID NO: 29292
  peptide (1)..(110): Ceres Seq. ID no. 12337385
  misc_feature (1)..(109): Homolog of NCBI NO: 38566282 NR Description: Carnitine/acylcarnitine translocase [Silurana
  misc_feature (1)..(109): Homolog of NCBI NO: 27694786 NR Description: Similar to solute carrier family 25
  misc_feature (1)..(104): Homolog of NCBI NO: 31216089 NR Description: ENSANGP00000020391 [Anopheles gambiae]
  misc_feature (1)..(109): Homolog of NCBI NO: 38541954 NR Description: Unknown (protein for MGC:77760) [Danio rerio]
  misc_feature (1)..(105): Homolog of NCBI NO: 39593620 NR Description: Hypothetical protein CBG05908 [Caenorhabditis
  misc_feature (1)..(105): Homolog of NCBI NO: 17539560 NR Description: Embryonic tissue differentiation factor DIF-1,
  misc_feature (1)..(110): Homolog of NCBI NO: 37537072 NR Description: putative carnitine/acylcarnitine translocase
  misc_feature (1)..(110): Homolog of NCBI NO: 37537070 NR Description: putative carnitine/acylcarnitine translocase
  misc_feature (1)..(110): Homolog of NCBI NO: 9758516 NR Description: carnitine/acylcarnitine translocase-like protein
  misc_feature (1)..(110): Homolog of NCBI NO: 18422718 NR Description: mitochondrial carrier protein family

SEQ ID NO: 32883 - DNA, 1263 bp, Arabidopsis thaliana; identical to SEQ ID NO: 29293
  misc_feature (1)..(1263): Ceres Seq. ID no. 12324797
  misc_feature: MA Experiment ID: 108461 Result: Down-regulated in Transcription
  misc_feature: MA Experiment 108461 PARAMETER Experiment Name: At_Germinating_Seeds_cDNA_P Parameter: Age (day) Value: 1 vs. 0
  misc_feature: MA Experiment 108461 PARAMETER Experiment Name: At_Germinating_Seeds_cDNA_P Parameter: Tissue Value: Germinating Seeds
  misc_feature: MA Experiment ID: 108462 Result: Down-regulated in Transcription
  misc_feature: MA Experiment 108462 PARAMETER Experiment Name: At_Germinating_Seeds_cDNA_P Parameter: Age (day) Value: 2 vs. 0
  misc_feature: MA Experiment 108462 PARAMETER Experiment Name: At_Germinating_Seeds_cDNA_P Parameter: Tissue Value: Germinating Seeds
  misc_feature: MA Experiment ID: 108594 Result: Down-regulated in Transcription
  misc_feature: MA Experiment 108594 PARAMETER Experiment Name: At_Ler-rhl_Root_cDNA_P Parameter: Plant Line Value: null
  misc_feature: MA Experiment ID: 20000117 Result: Down-regulated in Transcription
  misc_feature: MA Experiment 20000117 PARAMETER Experiment Name: At_100uM_ABA_Mutants_cDNA_P Parameter: Plant Line Value: Columbia
  misc_feature: MA Experiment 20000117 PARAMETER Experiment Name: At_100uM_ABA_Mutants_cDNA_P Parameter: Timepoint (hr) Value: 6
  misc_feature: MA Experiment 20000117 PARAMETER Experiment Name: At_100uM_ABA_Mutants_cDNA_P Parameter: Tissue Value: Aerial
  misc_feature: MA Experiment 20000117 PARAMETER Experiment Name: At_100uM_ABA_Mutants_cDNA_P Parameter: Treatment Value: 100uM ABA vs. No Treatment
  misc_feature: MA Experiment ID: 20000179 Result: Down-regulated in Transcription
  misc_feature: MA Experiment 20000179 PARAMETER Experiment Name: At_Germinating_Seeds_P Parameter: Age (hr) Value: 6 vs. 0
  misc_feature: MA Experiment 20000179 PARAMETER Experiment Name: At_Germinating_Seeds_P Parameter: Tissue Value: Germinating Seeds
  misc_feature: MA Experiment ID: 20000180 Result: Down-regulated in Transcription
  misc_feature: MA Experiment 20000180 PARAMETER Experiment Name: At_Germinating_Seeds_P Parameter: Age (hr) Value: 24 vs. 0
  misc_feature: MA Experiment 20000180 PARAMETER Experiment Name: At_Germinating_Seeds_P Parameter: Tissue Value: Germinating Seeds
  misc_feature: MA Experiment ID: 20000227 Result: Down-regulated in Transcription
  misc_feature: MA Experiment 20000227 PARAMETER Experiment Name: At_Root-Tips-vs-Tops_P Parameter: Tissue Value: Root Tips vs. Root Tops
  misc_feature: MA Experiment ID: 20000234 Result: Down-regulated in Transcription
  misc_feature: MA Experiment 20000234 PARAMETER Experiment Name: At_Siliques_P Parameter: Age (day) Value: 21
  misc_feature: MA Experiment 20000234 PARAMETER Experiment Name: At_Siliques_P Parameter: Organism Value: A. thaliana
  misc_feature: MA Experiment 20000234 PARAMETER Experiment Name: At_Siliques_P Parameter: Plant Line Value: WS
  misc_feature: MA Experiment 20000234 PARAMETER Experiment Name: At_Siliques_P Parameter: Tissue Value: Less Than 5mm Siliques vs. Whole Plant
  misc_feature: MA Experiment ID: 20000264 Result: Down-regulated in Transcription
  misc_feature: MA Experiment 20000264 PARAMETER Experiment Name: At_Open_Flower_P Parameter: Age (day) Value: 21
  misc_feature: MA Experiment 20000264 PARAMETER Experiment Name: At_Open_Flower_P Parameter: Plant Line Value: WS
  misc_feature: MA Experiment 20000264 PARAMETER Experiment Name: At_Open_Flower_P Parameter: Tissue Value: Open Flower vs. Whole Plant
  misc_feature: MA Experiment ID: 20000265 Result: Down-regulated in Transcription
  misc_feature: MA Experiment 20000265 PARAMETER Experiment Name: At_Open_Flower_P Parameter: Age (day) Value: 21
  misc_feature: MA Experiment 20000265 PARAMETER Experiment Name: At_Open_Flower_P Parameter: Plant Line Value: WS
  misc_feature: MA Experiment 20000265 PARAMETER Experiment Name: At_Open_Flower_P Parameter: Tissue Value: Closed Flower vs. Whole Plant
  misc_feature: MA Experiment ID: 20000286 Result: Down-regulated in Transcription
  misc_feature: MA Experiment 20000286 PARAMETER Experiment Name: At_Open_Flower_P Parameter: Age (day) Value: 21
  misc_feature: MA Experiment 20000286 PARAMETER Experiment Name: At_Open_Flower_P Parameter: Plant Line Value: WS
  misc_feature: MA Experiment 20000286 PARAMETER Experiment Name: At_Open_Flower_P Parameter: Tissue Value: Half Open vs. Whole Plant
  misc_feature: MA Experiment ID: 20000438 Result: Down-regulated in Transcription
  misc_feature: MA Experiment 20000438 PARAMETER Experiment Name: At_Shoots__P Parameter: Age (day) Value: 14
  misc_feature: MA Experiment 20000438 PARAMETER Experiment Name: At_Shoots__P Parameter: Tissue Value: Shoots vs. Whole Plant
  misc_feature: MA Experiment ID: 20000794 Result: Down-regulated in Transcription
  misc_feature: MA Experiment 20000794 PARAMETER Experiment Name: At_Petals_P Parameter: Age (day) Value: 23-25 days
  misc_feature: MA Experiment 20000794 PARAMETER Experiment Name: At_Petals_P Parameter: Plant Line Value: WS
  misc_feature: MA Experiment 20000794 PARAMETER Experiment Name: At_Petals_P Parameter: Tissue Value: Petals vs. Whole plant

SEQ ID NO: 32884 - protein, 246 aa, Arabidopsis thaliana; identical to SEQ ID NO: 29294
  peptide (1)..(246): Ceres Seq. ID no. 12324798
  misc_feature (15)..(234): Pfam Name: AUX/IAA family Pfam Description: AUX/IAA family
  misc_feature (15)..(234): Pfam Name: AUX/IAA family Pfam Description: AUX/IAA family
  misc_feature (56)..(243): Homolog of NCBI NO: 21594025 NR Description: auxin regulated protein IAA18, putative
  misc_feature (11)..(230): Homolog of NCBI NO: 15219646 NR Description: putative IAA1 protein
  misc_feature (12)..(231): Homolog of NCBI NO: 20466408 NR Description: early auxin-inducible protein 11 [Arabidopsis
  misc_feature (12)..(231): Homolog of NCBI NO: 15235385 NR Description: early auxin-inducible protein 11 (IAA11)
  misc_feature (53)..(230): Homolog of NCBI NO: 20269057 NR Description: aux/IAA protein [Populus tremula x Populus
  misc_feature (56)..(243): Homolog of NCBI NO: 21594025 NR Description: auxin regulated protein IAA18, putative
  misc_feature (12)..(231): Homolog of NCBI NO: 20466408 NR Description: early auxin-inducible protein 11 [Arabidopsis
  misc_feature (53)..(230): Homolog of NCBI NO: 20269057 NR Description: aux/IAA protein [Populus tremula x Populus
  misc_feature (1)..(246): Homolog of NCBI NO: 15225833 NR Description: auxin regulated protein (IAA13)
  misc_feature (1)..(246): Homolog of NCBI NO: 30685642 NR Description: auxin-responsive protein IAA13 (Indoleacetic
  misc_feature (2)..(246): Homolog of NCBI NO: 21593621 NR Description: putative auxin-induced protein, IAA12
  misc_feature (2)..(246): Homolog of NCBI NO: 15219761 NR Description: putative auxin-induced protein, IAA12
  misc_feature (2)..(164): Homolog of NCBI NO: 30678907 NR Description: auxin-responsive protein IAA12 (Indoleacetic
  misc_feature (12)..(231): Homolog of NCBI NO: 15235385 NR Description: early auxin-inducible protein 11 (IAA11)
  misc_feature (11)..(230): Homolog of NCBI NO: 15219646 NR Description: putative IAA1 protein
  misc_feature (2)..(164): Homolog of NCBI NO: 30678907 NR Description: auxin-responsive protein IAA12 (Indoleacetic
  misc_feature (2)..(246): Homolog of NCBI NO: 15219761 NR Description: putative auxin-induced protein, IAA12
  misc_feature (2)..(246): Homolog of NCBI NO: 21593621 NR Description: putative auxin-induced protein, IAA12
  misc_feature (1)..(246): Homolog of NCBI NO: 30685642 NR Description: auxin-responsive protein IAA13 (Indoleacetic
  misc_feature (1)..(246): Homolog of NCBI NO: 15225833 NR Description: auxin regulated protein (IAA13)

SEQ ID NO: 32885 - protein, 240 aa, Arabidopsis thaliana; identical to SEQ ID NO: 29295
  peptide (1)..(240): Ceres Seq. ID no. 12324799
  misc_feature (9)..(228): Pfam Name: AUX/IAA family Pfam Description: AUX/IAA family
  misc_feature (9)..(228): Pfam Name: AUX/IAA family Pfam Description: AUX/IAA family
  misc_feature (50)..(237): Homolog of NCBI NO: 21594025 NR Description: auxin regulated protein IAA18, putative
  misc_feature (5)..(224): Homolog of NCBI NO: 15219646 NR Description: putative IAA1 protein
  misc_feature (6)..(225): Homolog of NCBI NO: 20466408 NR Description: early auxin-inducible protein 11 [Arabidopsis
  misc_feature (6)..(225): Homolog of NCBI NO: 15235385 NR Description: early auxin-inducible protein 11 (IAA11)
  misc_feature (47)..(224): Homolog of NCBI NO: 20269057 NR Description: aux/IAA protein [Populus tremula x Populus
  misc_feature (50)..(237): Homolog of NCBI NO: 21594025 NR Description: auxin regulated protein IAA18, putative
  misc_feature (6)..(225): Homolog of NCBI NO: 20466408 NR Description: early auxin-inducible protein 11 [Arabidopsis
  misc_feature (47)..(224): Homolog of NCBI NO: 20269057 NR Description: aux/IAA protein [Populus tremula x Populus
  misc_feature (1)..(240): Homolog of NCBI NO: 15225833 NR Description: auxin regulated protein (IAA13)
  misc_feature (1)..(240): Homolog of NCBI NO: 30685642 NR Description: auxin-responsive protein IAA13 (Indoleacetic
  misc_feature (1)..(240): Homolog of NCBI NO: 21593621 NR Description: putative auxin-induced protein, IAA12
  misc_feature (1)..(240): Homolog of NCBI NO: 15219761 NR Description: putative auxin-induced protein, IAA12
  misc_feature (1)..(158): Homolog of NCBI NO: 30678907 NR Description: auxin-responsive protein IAA12 (Indoleacetic
  misc_feature (6)..(225): Homolog of NCBI NO: 15235385 NR Description: early auxin-inducible protein 11 (IAA11)
  misc_feature (5)..(224): Homolog of NCBI NO: 15219646 NR Description: putative IAA1 protein
  misc_feature (1)..(158): Homolog of NCBI NO: 30678907 NR Description: auxin-responsive protein IAA12 (Indoleacetic
  misc_feature (1)..(240): Homolog of NCBI NO: 15219761 NR Description: putative auxin-induced protein, IAA12
  misc_feature (1)..(240): Homolog of NCBI NO: 21593621 NR Description: putative auxin-induced protein, IAA12
  misc_feature (1)..(240): Homolog of NCBI NO: 30685642 NR Description: auxin-responsive protein IAA13 (Indoleacetic
  misc_feature (1)..(240): Homolog of NCBI NO: 15225833 NR Description: auxin regulated protein (IAA13)

SEQ ID NO: 32886 - protein, 160 aa, Arabidopsis thaliana; identical to SEQ ID NO: 29296
  peptide (1)..(160): Ceres Seq. ID no. 12324800
  misc_feature (1)..(148): Pfam Name: AUX/IAA family Pfam Description: AUX/IAA family
  misc_feature (1)..(148): Pfam Name: AUX/IAA family Pfam Description: AUX/IAA family
  misc_feature (1)..(157): Homolog of NCBI NO: 21594025 NR Description: auxin regulated protein IAA18, putative
  misc_feature (1)..(144): Homolog of NCBI NO: 15219646 NR Description: putative IAA1 protein
  misc_feature (1)..(145): Homolog of NCBI NO: 20466408 NR Description: early auxin-inducible protein 11 [Arabidopsis
  misc_feature (1)..(145): Homolog of NCBI NO: 15235385 NR Description: early auxin-inducible protein 11 (IAA11)
  misc_feature (1)..(144): Homolog of NCBI NO: 20269057 NR Description: aux/IAA protein [Populus tremula x Populus
  misc_feature (1)..(157): Homolog of NCBI NO: 21594025 NR Description: auxin regulated protein IAA18, putative
  misc_feature (1)..(145): Homolog of NCBI NO: 20466408 NR Description: early auxin-inducible protein 11 [Arabidopsis
  misc_feature (1)..(144): Homolog of NCBI NO: 20269057 NR Description: aux/IAA protein [Populus tremula x Populus
  misc_feature (1)..(160): Homolog of NCBI NO: 15225833 NR Description: auxin regulated protein (IAA13)
  misc_feature (1)..(160): Homolog of NCBI NO: 30685642 NR Description: auxin-responsive protein IAA13 (Indoleacetic
  misc_feature (1)..(160): Homolog of NCBI NO: 21593621 NR Description: putative auxin-induced protein, IAA12
  misc_feature (1)..(160): Homolog of NCBI NO: 15219761 NR Description: putative auxin-induced protein, IAA12
  misc_feature (1)..(78): Homolog of NCBI NO: 30678907 NR Description: auxin-responsive protein IAA12 (Indoleacetic
  misc_feature (1)..(145): Homolog of NCBI NO: 15235385 NR Description: early auxin-inducible protein 11 (IAA11)
  misc_feature (1)..(144): Homolog of NCBI NO: 15219646 NR Description: putative IAA1 protein
  misc_feature (1)..(78): Homolog of NCBI NO: 30678907 NR Description: auxin-responsive protein IAA12 (Indoleacetic
  misc_feature (1)..(160): Homolog of NCBI NO: 15219761 NR Description: putative auxin-induced protein, IAA12
  misc_feature (1)..(160): Homolog of NCBI NO: 21593621 NR Description: putative auxin-induced protein, IAA12
  misc_feature (1)..(160): Homolog of NCBI NO: 30685642 NR Description: auxin-responsive protein IAA13 (Indoleacetic
  misc_feature (1)..(160): Homolog of NCBI NO: 15225833 NR Description: auxin regulated protein (IAA13)

SEQ ID NO: 32887 - DNA, 1687 bp, Arabidopsis thaliana; identical to SEQ ID NO: 29297
  misc_feature (1)..(1687): Ceres Seq. ID no. 12321246
  misc_feature: MA Experiment ID: 108434 Result: Down-regulated in Transcription
  misc_feature: MA Experiment 108434 PARAMETER Experiment Name: At_Root_Tips_cDNA_P Parameter: Tissue Value: Root Tips
  misc_feature: MA Experiment ID: 108435 Result: Up-regulated in Transcription
  misc_feature: MA Experiment 108435 PARAMETER Experiment Name: At_stm_Mutants_cDNA_P Parameter: Plant Line Value: wt Landsburg vs stm
  misc_feature: MA Experiment 108435 PARAMETER Experiment Name: At_stm_Mutants_cDNA_P Parameter: Tissue Value: Shoot Apical Meristem Region
  misc_feature: MA Experiment ID: 108501 Result: Down-regulated in Transcription
  misc_feature: MA Experiment 108501 PARAMETER Experiment Name: At_ap2_floral_buds_cDNA_P Parameter: Plant Line Value: ap2 (Ler.)
  misc_feature: MA Experiment 108501 PARAMETER Experiment Name: At_ap2_floral_buds_cDNA_P Parameter: Tissue Value: Closed Flower
  misc_feature: MA Experiment ID: 108569 Result: Up-regulated in Transcription
  misc_feature: MA Experiment 108569 PARAMETER Experiment Name: At_0.001%_MeJA__cDNA_P Parameter: Timepoint (hr) Value: 6
  misc_feature: MA Experiment 108569 PARAMETER Experiment Name: At_0.001%_MeJA__cDNA_P Parameter: Tissue Value: Aerial
  misc_feature: MA Experiment 108569 PARAMETER Experiment Name: At_0.001%_MeJA__cDNA_P Parameter: Treatment Value: 0.001% MeJA vs. No Treatment
  misc_feature: MA Experiment ID: 108573 Result: Down-regulated in Transcription
  misc_feature: MA Experiment 108573 PARAMETER Experiment Name: At_Drought_cDNA_P Parameter: Timepoint (hr) Value: 6
  misc_feature: MA Experiment 108573 PARAMETER Experiment Name: At_Drought_cDNA_P Parameter: Tissue Value: Aerial
  misc_feature: MA Experiment 108573 PARAMETER Experiment Name: At_Drought_cDNA_P Parameter: Treatment Value: Drought vs. No Drought
  misc_feature: MA Experiment ID: 108574 Result: Up-regulated in Transcription
  misc_feature: MA Experiment 108574 PARAMETER Experiment Name: At_Wounding__cDNA_P Parameter: Timepoint (hr) Value: 1
  misc_feature: MA Experiment 108574 PARAMETER Experiment Name: At_Wounding__cDNA_P Parameter: Tissue Value: Aerial
  misc_feature: MA Experiment 108574 PARAMETER Experiment Name: At_Wounding__cDNA_P Parameter: Treatment Value: Wounding vs. No Wounding
  misc_feature: MA Experiment ID: 108576 Result: Down-regulated in Transcription
  misc_feature: MA Experiment 108576 PARAMETER Experiment Name: At_42deg_Heat_cDNA_P Parameter: Temperature (deg C) Value: 42 vs. 22
  misc_feature: MA Experiment 108576 PARAMETER Experiment Name: At_42deg_Heat_cDNA_P Parameter: Timepoint (hr) Value: 1
  misc_feature: MA Experiment 108576 PARAMETER Experiment Name: At_42deg_Heat_cDNA_P Parameter: Tissue Value: Aerial
  misc_feature: MA Experiment ID: 108577 Result: Down-regulated in Transcription
  misc_feature: MA Experiment 108577 PARAMETER Experiment Name: At_42deg_Heat_cDNA_P Parameter: Temperature (deg C) Value: 42 vs. 22
  misc_feature: MA Experiment 108577 PARAMETER Experiment Name: At_42deg_Heat_cDNA_P Parameter: Timepoint (hr) Value: 6
  misc_feature: MA Experiment 108577 PARAMETER Experiment Name: At_42deg_Heat_cDNA_P Parameter: Tissue Value: Aerial
  misc_feature: MA Experiment ID: 108595 Result: Down-regulated in Transcription
  misc_feature: MA Experiment 108595 PARAMETER Experiment Name: At_Ler-pi_Ovule_cDNA_P Parameter: Plant Line Value: null
  misc_feature: MA Experiment ID: 20000093 Result: Down-regulated in Transcription
  misc_feature: MA Experiment 20000093 PARAMETER Experiment Name: At_42deg_Heat_cDNA_P Parameter: Temperature (deg C) Value: 42 vs. 22
  misc_feature: MA Experiment 20000093 PARAMETER Experiment Name: At_42deg_Heat_cDNA_P Parameter: Timepoint (hr) Value: 0.5
  misc_feature: MA Experiment 20000093 PARAMETER Experiment Name: At_42deg_Heat_cDNA_P Parameter: Tissue Value: Aerial
  misc_feature: MA Experiment ID: 20000112 Result: Down-regulated in Transcription
  misc_feature: MA Experiment 20000112 PARAMETER Experiment Name: At_42deg_Heat_cDNA_P Parameter: Temperature (deg C) Value: 42 vs. 22
  misc_feature: MA Experiment 20000112 PARAMETER Experiment Name: At_42deg_Heat_cDNA_P Parameter: Timepoint (hr) Value: 2
  misc_feature: MA Experiment 20000112 PARAMETER Experiment Name: At_42deg_Heat_cDNA_P Parameter: Tissue Value: Aerial
  misc_feature: MA Experiment ID: 20000113 Result: Down-regulated in Transcription
  misc_feature: MA Experiment 20000113 PARAMETER Experiment Name: At_42deg_Heat_cDNA_P Parameter: Temperature (deg C) Value: 42 vs. 22
  misc_feature: MA Experiment 20000113 PARAMETER Experiment Name: At_42deg_Heat_cDNA_P Parameter: Timepoint (hr) Value: 8
  misc_feature: MA Experiment 20000113 PARAMETER Experiment Name: At_42deg_Heat_cDNA_P Parameter: Tissue Value: Aerial
  misc_feature: MA Experiment ID: 20000144 Result: Down-regulated in Transcription
  misc_feature: MA Experiment 20000144 PARAMETER Experiment Name: At_42deg_Heat_cDNA_P Parameter: Temperature (deg C) Value: 42 vs. 22
  misc_feature: MA Experiment 20000144 PARAMETER Experiment Name: At_42deg_Heat_cDNA_P Parameter: Timepoint (hr) Value: 1
  misc_feature: MA Experiment 20000144 PARAMETER Experiment Name: At_42deg_Heat_cDNA_P Parameter: Tissue Value: Aerial
  misc_feature: MA Experiment ID: 20000171 Result: Down-regulated in Transcription
  misc_feature: MA Experiment 20000171 PARAMETER Experiment Name: At_42deg_Heat_P Parameter: Age (day) Value: 14
  misc_feature: MA Experiment 20000171 PARAMETER Experiment Name: At_42deg_Heat_P Parameter: Organism Value: A. thaliana
  misc_feature: MA Experiment 20000171 PARAMETER Experiment Name: At_42deg_Heat_P Parameter: Plant Line Value: WS
  misc_feature: MA Experiment 20000171 PARAMETER Experiment Name: At_42deg_Heat_P Parameter: Temperature (deg C) Value: 42 vs. 22
  misc_feature: MA Experiment 20000171 PARAMETER Experiment Name: At_42deg_Heat_P Parameter: Timepoint (hr) Value: 1
  misc_feature: MA Experiment 20000171 PARAMETER Experiment Name: At_42deg_Heat_P Parameter: Tissue Value: Aerial
  misc_feature: MA Experiment ID: 20000173 Result: Down-regulated in Transcription
  misc_feature: MA Experiment 20000173 PARAMETER Experiment Name: At_42deg_Heat_P Parameter: Age (day) Value: 14
  misc_feature: MA Experiment 20000173 PARAMETER Experiment Name: At_42deg_Heat_P Parameter: Organism Value: A. thaliana
  misc_feature: MA Experiment 20000173 PARAMETER Experiment Name: At_42deg_Heat_P Parameter: Plant Line Value: WS
  misc_feature: MA Experiment 20000173 PARAMETER Experiment Name: At_42deg_Heat_P Parameter: Temperature (deg C) Value: 42 vs. 22
  misc_feature: MA Experiment 20000173 PARAMETER Experiment Name: At_42deg_Heat_P Parameter: Timepoint (hr) Value: 6
  misc_feature: MA Experiment 20000173 PARAMETER Experiment Name: At_42deg_Heat_P Parameter: Tissue Value: Aerial
  misc_feature: MA Experiment ID: 20000180 Result: Up-regulated in Transcription
  misc_feature: MA Experiment 20000180 PARAMETER Experiment Name: At_Germinating_Seeds_P Parameter: Age (hr) Value: 24 vs. 0
  misc_feature: MA Experiment 20000180 PARAMETER Experiment Name: At_Germinating_Seeds_P Parameter: Tissue Value: Germinating Seeds
  misc_feature: MA Experiment ID: 20000184 Result: Down-regulated in Transcription
  misc_feature: MA Experiment 20000184 PARAMETER Experiment Name: At_Shoots__P Parameter: Age (day) Value: 7
  misc_feature: MA Experiment 20000184 PARAMETER Experiment Name: At_Shoots__P Parameter: Tissue Value: Shoots vs. Whole Plant
  misc_feature: MA Experiment ID: 20000227 Result: Down-regulated in Transcription
  misc_feature: MA Experiment 20000227 PARAMETER Experiment Name: At_Root-Tips-vs-Tops_P Parameter: Tissue Value: Root Tips vs. Root Tops
  misc_feature: MA Experiment ID: 20000234 Result: Down-regulated in Transcription
  misc_feature: MA Experiment 20000234 PARAMETER Experiment Name: At_Siliques_P Parameter: Age (day) Value: 21
  misc_feature: MA Experiment 20000234 PARAMETER Experiment Name: At_Siliques_P Parameter: Organism Value: A. thaliana
  misc_feature: MA Experiment 20000234 PARAMETER Experiment Name: At_Siliques_P Parameter: Plant Line Value: WS
  misc_feature: MA Experiment 20000234 PARAMETER Experiment Name: At_Siliques_P Parameter: Tissue Value: Less Than 5mm Siliques vs. Whole Plant
  misc_feature: MA Experiment ID: 20000264 Result: Down-regulated in Transcription
  misc_feature: MA Experiment 20000264 PARAMETER Experiment Name: At_Open_Flower_P Parameter: Age (day) Value: 21
  misc_feature: MA Experiment 20000264 PARAMETER Experiment Name: At_Open_Flower_P Parameter: Plant Line Value: WS
  misc_feature: MA Experiment 20000264 PARAMETER Experiment Name: At_Open_Flower_P Parameter: Tissue Value: Open Flower vs. Whole Plant
  misc_feature: MA Experiment ID: 20000265 Result: Down-regulated in Transcription
  misc_feature: MA Experiment 20000265 PARAMETER Experiment Name: At_Open_Flower_P Parameter: Age (day) Value: 21
  misc_feature: MA Experiment 20000265 PARAMETER Experiment Name: At_Open_Flower_P Parameter: Plant Line Value: WS
  misc_feature: MA Experiment 20000265 PARAMETER Experiment Name: At_Open_Flower_P Parameter: Tissue Value: Closed Flower vs. Whole Plant
  misc_feature: MA Experiment ID: 20000286 Result: Down-regulated in Transcription
  misc_feature: MA Experiment 20000286 PARAMETER Experiment Name: At_Open_Flower_P Parameter: Age (day) Value: 21
  misc_feature: MA Experiment 20000286 PARAMETER Experiment Name: At_Open_Flower_P Parameter: Plant Line Value: WS
  misc_feature: MA Experiment 20000286 PARAMETER Experiment Name: At_Open_Flower_P Parameter: Tissue Value: Half Open vs. Whole Plant
  misc_feature: MA Experiment ID: 20000437 Result: Down-regulated in Transcription
  misc_feature: MA Experiment 20000437 PARAMETER Experiment Name: At_Drought_P Parameter: Age (day) Value: 8
  misc_feature: MA Experiment 20000437 PARAMETER Experiment Name: At_Drought_P Parameter: Organism Value: A. thaliana
  misc_feature: MA Experiment 20000437 PARAMETER Experiment Name: At_Drought_P Parameter: Plant Line Value: WS
  misc_feature: MA Experiment 20000437 PARAMETER Experiment Name: At_Drought_P Parameter: Timepoint (hr) Value: 24
  misc_feature: MA Experiment 20000437 PARAMETER Experiment Name: At_Drought_P Parameter: Tissue Value: Whole Plant
  misc_feature: MA Experiment 20000437 PARAMETER Experiment Name: At_Drought_P Parameter: Treatment Value: Drought vs. No Drought
  misc_feature: MA Experiment ID: 20000438 Result: Down-regulated in Transcription
  misc_feature: MA Experiment 20000438 PARAMETER Experiment Name: At_Shoots__P Parameter: Age (day) Value: 14
  misc_feature: MA Experiment 20000438 PARAMETER Experiment Name: At_Shoots__P Parameter: Tissue Value: Shoots vs. Whole Plant
  misc_feature: MA Experiment ID: 20000441 Result: Up-regulated in Transcription
  misc_feature: MA Experiment 20000441 PARAMETER Experiment Name: At_1uM_BR-BRZ__P Parameter: Tissue Value: Shoot Apices
  misc_feature: MA Experiment 20000441 PARAMETER Experiment Name: At_1uM_BR-BRZ__P Parameter: Treatment Value: 1uM BR vs. No Treatment
  misc_feature: MA Experiment ID: 20000443 Result: Up-regulated in Transcription
  misc_feature: MA Experiment 20000443 PARAMETER Experiment Name: At_1uM_BR-BRZ__P Parameter: Tissue Value: Shoot Apices
  misc_feature: MA Experiment 20000443 PARAMETER Experiment Name: At_1uM_BR-BRZ__P Parameter: Treatment Value: 1uM BRZ vs. No Treatment
  misc_feature: MA Experiment ID: 20000527 Result: Down-regulated in Transcription
  misc_feature: MA Experiment 20000527 PARAMETER Experiment Name: At_10percent_PEG_P Parameter: Age (day) Value: 20
  misc_feature: MA Experiment 20000527 PARAMETER Experiment Name: At_10percent_PEG_P Parameter: Organism Value: A. thaliana
  misc_feature: MA Experiment 20000527 PARAMETER Experiment Name: At_10percent_PEG_P Parameter: Plant Line Value: WS
  misc_feature: MA Experiment 20000527 PARAMETER Experiment Name: At_10percent_PEG_P Parameter: Timepoint (day) Value: 20
  misc_feature: MA Experiment 20000527 PARAMETER Experiment Name: At_10percent_PEG_P Parameter: Tissue Value: Whole Plant
  misc_feature: MA Experiment 20000527 PARAMETER Experiment Name: At_10percent_PEG_P Parameter: Treatment Value: 10percent PEG vs. No Treatment
  misc_feature: MA Experiment ID: 20000575 Result: Down-regulated in Transcription
  misc_feature: MA Experiment 20000575 PARAMETER Experiment Name: At_100uM_ABA_Mutants__P Parameter: Organism Value: A. thaliana
  misc_feature: MA Experiment 20000575 PARAMETER Experiment Name: At_100uM_ABA_Mutants__P Parameter: Plant Line Value: CS22
  misc_feature: MA Experiment 20000575 PARAMETER Experiment Name: At_100uM_ABA_Mutants__P Parameter: Timepoint (hr) Value: 6
  misc_feature: MA Experiment 20000575 PARAMETER Experiment Name: At_100uM_ABA_Mutants__P Parameter: Tissue Value: Whole Plant
  misc_feature: MA Experiment 20000575 PARAMETER Experiment Name: At_100uM_ABA_Mutants__P Parameter: Treatment Value: 1uM ABA vs. No Treatment
  misc_feature: MA Experiment ID: 20000709 Result: Down-regulated in Transcription
  misc_feature: MA Experiment 20000709 PARAMETER Experiment Name: At_15mM_NH4NO3_L-to-H_P Parameter: Age (hr) Value: 14
  misc_feature: MA Experiment 20000709 PARAMETER Experiment Name: At_15mM_NH4NO3_L-to-H_P Parameter: Organism Value: A. thaliana
  misc_feature: MA Experiment 20000709 PARAMETER Experiment Name: At_15mM_NH4NO3_L-to-H_P Parameter: Plant Line Value: WS
  misc_feature: MA Experiment 20000709 PARAMETER Experiment Name: At_15mM_NH4NO3_L-to-H_P Parameter: Timepoint (hr) Value: 4
  misc_feature: MA Experiment 20000709 PARAMETER Experiment Name: At_15mM_NH4NO3_L-to-H_P Parameter: Tissue Value: Aerial
  misc_feature: MA Experiment 20000709 PARAMETER Experiment Name: At_15mM_NH4NO3_L-to-H_P Parameter: Treatment Value: 15mM NH4NO3 vs. 30mM Mannitol
  misc_feature: MA Experiment ID: 20000794 Result: Down-regulated in Transcription
  misc_feature: MA Experiment 20000794 PARAMETER Experiment Name: At_Petals_P Parameter: Age (day) Value: 23-25 days
  misc_feature: MA Experiment 20000794 PARAMETER Experiment Name: At_Petals_P Parameter: Plant Line Value: WS
  misc_feature: MA Experiment 20000794 PARAMETER Experiment Name: At_Petals_P Parameter: Tissue Value: Petals vs. Whole plant
  misc_feature: MA Experiment ID: 20001248 Result: Down-regulated in Transcription
  misc_feature: MA Experiment 20001248 PARAMETER Experiment Name: At_Far-red-induction_P Parameter: Age (day) Value: 7
  misc_feature: MA Experiment 20001248 PARAMETER Experiment Name: At_Far-red-induction_P Parameter: Light Value: Far-red vs. White
  misc_feature: MA Experiment 20001248 PARAMETER Experiment Name: At_Far-red-induction_P Parameter: Organism Value: A. thaliana
  misc_feature: MA Experiment 20001248 PARAMETER Experiment Name: At_Far-red-induction_P Parameter: Plant Line Value: Columbia
  misc_feature: MA Experiment 20001248 PARAMETER Experiment Name: At_Far-red-induction_P Parameter: Timepoint (hr) Value: 4
  misc_feature: MA Experiment 20001248 PARAMETER Experiment Name: At_Far-red-induction_P Parameter: Tissue Value: Whole Plant
  misc_feature: MA Experiment ID: 20001450 Result: Down-regulated in Transcription
  misc_feature: MA Experiment 20001450 PARAMETER Experiment Name: At_Far-red-induction_P Parameter: Age (day) Value: 7
  misc_feature: MA Experiment 20001450 PARAMETER Experiment Name: At_Far-red-induction_P Parameter: Light Value: Far-red vs. White
  misc_feature: MA Experiment 20001450 PARAMETER Experiment Name: At_Far-red-induction_P Parameter: Organism Value: A. thaliana
  misc_feature: MA Experiment 20001450 PARAMETER Experiment Name: At_Far-red-induction_P Parameter: Plant Line Value: Columbia
  misc_feature: MA Experiment 20001450 PARAMETER Experiment Name: At_Far-red-induction_P Parameter: Timepoint (hr) Value: 8
  misc_feature: MA Experiment 20001450 PARAMETER Experiment Name: At_Far-red-induction_P Parameter: Tissue Value: Whole Plant
  misc_feature: MA Experiment ID: 20001451 Result: Down-regulated in Transcription
  misc_feature: MA Experiment 20001451 PARAMETER Experiment Name: At_Far-red-induction_P Parameter: Age (day) Value: 7
  misc_feature: MA Experiment 20001451 PARAMETER Experiment Name: At_Far-red-induction_P Parameter: Light Value: Far-red vs. White
  misc_feature: MA Experiment 20001451 PARAMETER Experiment Name: At_Far-red-induction_P Parameter: Organism Value: A. thaliana
  misc_feature: MA Experiment 20001451 PARAMETER Experiment Name: At_Far-red-induction_P Parameter: Plant Line Value: Columbia
  misc_feature: MA Experiment 20001451 PARAMETER Experiment Name: At_Far-red-induction_P Parameter: Timepoint (hr) Value: 24
  misc_feature: MA Experiment 20001451 PARAMETER Experiment Name: At_Far-red-induction_P Parameter: Tissue Value: Whole Plant
  misc_feature: MA Experiment ID: 20001554 Result: Down-regulated in Transcription
  misc_feature: MA Experiment 20001554 PARAMETER Experiment Name: At_Drought_Soil_Dry_P Parameter: Age (day) Value: 21
  misc_feature: MA Experiment 20001554 PARAMETER Experiment Name: At_Drought_Soil_Dry_P Parameter: Organism Value: A. thaliana
  misc_feature: MA Experiment 20001554 PARAMETER Experiment Name: At_Drought_Soil_Dry_P Parameter: Plant Line Value: WS
  misc_feature: MA Experiment 20001554 PARAMETER Experiment Name: At_Drought_Soil_Dry_P Parameter: Post Timepoint (hr) Value: None
  misc_feature: MA Experiment 20001554 PARAMETER Experiment Name: At_Drought_Soil_Dry_P Parameter: Post-Treatment Value: None
  misc_feature: MA Experiment 20001554 PARAMETER Experiment Name: At_Drought_Soil_Dry_P Parameter: Timepoint (day) Value: 7
  misc_feature: MA Experiment 20001554 PARAMETER Experiment Name: At_Drought_Soil_Dry_P Parameter: Treatment Value: Drought vs. No Drought
  misc_feature: MA Experiment ID: 20001555 Result: Down-regulated in Transcription
  misc_feature: MA Experiment 20001555 PARAMETER Experiment Name: At_Drought_Soil_Dry_P Parameter: Age (day) Value: 24
  misc_feature: MA Experiment 20001555 PARAMETER Experiment Name: At_Drought_Soil_Dry_P Parameter: Organism Value: A. thaliana
  misc_feature: MA Experiment 20001555 PARAMETER Experiment Name: At_Drought_Soil_Dry_P Parameter: Plant Line Value: WS
  misc_feature: MA Experiment 20001555 PARAMETER Experiment Name: At_Drought_Soil_Dry_P Parameter: Post Timepoint (hr) Value: None
  misc_feature: MA Experiment 20001555 PARAMETER Experiment Name: At_Drought_Soil_Dry_P Parameter: Post-Treatment Value: None
  misc_feature: MA Experiment 20001555 PARAMETER Experiment Name: At_Drought_Soil_Dry_P Parameter: Timepoint (day) Value: 10
  misc_feature: MA Experiment 20001555 PARAMETER Experiment Name: At_Drought_Soil_Dry_P Parameter: Treatment Value: Drought vs. No Drought
  misc_feature: MA Experiment ID: 20001556 Result: Down-regulated in Transcription
  misc_feature: MA Experiment 20001556 PARAMETER Experiment Name: At_Drought_Soil_Dry_P Parameter: Age (day) Value: 26
  misc_feature: MA Experiment 20001556 PARAMETER Experiment Name: At_Drought_Soil_Dry_P Parameter: Organism Value: A. thaliana
  misc_feature: MA Experiment 20001556 PARAMETER Experiment Name: At_Drought_Soil_Dry_P Parameter: Plant Line Value: WS
  misc_feature: MA Experiment 20001556 PARAMETER Experiment Name: At_Drought_Soil_Dry_P Parameter: Post Timepoint (hr) Value: None
  misc_feature: MA Experiment 20001556 PARAMETER Experiment Name: At_Drought_Soil_Dry_P Parameter: Post-Treatment Value: None
  misc_feature: MA Experiment 20001556 PARAMETER Experiment Name: At_Drought_Soil_Dry_P Parameter: Timepoint (day) Value: 12
  misc_feature: MA Experiment 20001556 PARAMETER Experiment Name: At_Drought_Soil_Dry_P Parameter: Treatment Value: Drought vs. No Drought
  misc_feature: MA Experiment ID: 20001558 Result: Down-regulated in Transcription
  misc_feature: MA Experiment 20001558 PARAMETER Experiment Name: At_Drought_Soil_Dry_P Parameter: Age (day) Value: 27
  misc_feature: MA Experiment 20001558 PARAMETER Experiment Name: At_Drought_Soil_Dry_P Parameter: Organism Value: A. thaliana
  misc_feature: MA Experiment 20001558 PARAMETER Experiment Name: At_Drought_Soil_Dry_P Parameter: Plant Line Value: WS
  misc_feature: MA Experiment 20001558 PARAMETER Experiment Name: At_Drought_Soil_Dry_P Parameter: Post Timepoint (hr) Value: 6
  misc_feature: MA Experiment 20001558 PARAMETER Experiment Name: At_Drought_Soil_Dry_P Parameter: Post-Treatment Value: Re-Water vs. No Drought
  misc_feature: MA Experiment 20001558 PARAMETER Experiment Name: At_Drought_Soil_Dry_P Parameter: Timepoint (day) Value: 13
  misc_feature: MA Experiment 20001558 PARAMETER Experiment Name: At_Drought_Soil_Dry_P Parameter: Treatment Value: Drought vs. No Drought
  misc_feature: MA Experiment ID: 20001560 Result: Down-regulated in Transcription
  misc_feature: MA Experiment 20001560 PARAMETER Experiment Name: At_Drought_Soil_Dry_P Parameter: Age (day) Value: 28
  misc_feature: MA Experiment 20001560 PARAMETER Experiment Name: At_Drought_Soil_Dry_P Parameter: Organism Value: A. thaliana
  misc_feature: MA Experiment 20001560 PARAMETER Experiment Name: At_Drought_Soil_Dry_P Parameter: Plant Line Value: WS
  misc_feature: MA Experiment 20001560 PARAMETER Experiment Name: At_Drought_Soil_Dry_P Parameter: Post Timepoint (hr) Value: None
  misc_feature: MA Experiment 20001560 PARAMETER Experiment Name: At_Drought_Soil_Dry_P Parameter: Post-Treatment Value: None
  misc_feature: MA Experiment 20001560 PARAMETER Experiment Name: At_Drought_Soil_Dry_P Parameter: Timepoint (day) Value: 14
  misc_feature: MA Experiment 20001560 PARAMETER Experiment Name: At_Drought_Soil_Dry_P Parameter: Treatment Value: Drought vs. No Drought
  misc_feature: MA Experiment ID: 20001904 Result: Down-regulated in Transcription
  misc_feature: MA Experiment 20001904 PARAMETER Experiment Name: At_Drought_Reproduction_P Parameter: Age (day) Value: 37
  misc_feature: MA Experiment 20001904 PARAMETER Experiment Name: At_Drought_Reproduction_P Parameter: Organism Value: A. thaliana
  misc_feature: MA Experiment 20001904 PARAMETER Experiment Name: At_Drought_Reproduction_P Parameter: Plant Line Value: WS
  misc_feature: MA Experiment 20001904 PARAMETER Experiment Name: At_Drought_Reproduction_P Parameter: Timepoint (day) Value: 7
  misc_feature: MA Experiment 20001904 PARAMETER Experiment Name: At_Drought_Reproduction_P Parameter: Tissue Value: Rosettes
  misc_feature: MA Experiment 20001904 PARAMETER Experiment Name: At_Drought_Reproduction_P Parameter: Treatment Value: Drought vs. No Drought
  misc_feature: MA Experiment ID: 20001906 Result: Down-regulated in Transcription
  misc_feature: MA Experiment 20001906 PARAMETER Experiment Name: At_Drought_Reproduction_P Parameter: Age (day) Value: 35
  misc_feature: MA Experiment 20001906 PARAMETER Experiment Name: At_Drought_Reproduction_P Parameter: Organism Value: A. thaliana
  misc_feature: MA Experiment 20001906 PARAMETER Experiment Name: At_Drought_Reproduction_P Parameter: Plant Line Value: WS
  misc_feature: MA Experiment 20001906 PARAMETER Experiment Name: At_Drought_Reproduction_P Parameter: Timepoint (day) Value: 5
  misc_feature: MA Experiment 20001906 PARAMETER Experiment Name: At_Drought_Reproduction_P Parameter: Tissue Value: Siliques
  misc_feature: MA Experiment 20001906 PARAMETER Experiment Name: At_Drought_Reproduction_P Parameter: Treatment Value: Drought vs. No Drought
  misc_feature: MA Experiment ID: 20001911 Result: Down-regulated in Transcription
  misc_feature: MA Experiment 20001911 PARAMETER Experiment Name: At_Drought_Reproduction_P Parameter: Age (day) Value: 40
  misc_feature: MA Experiment 20001911 PARAMETER Experiment Name: At_Drought_Reproduction_P Parameter: Organism Value: A. thaliana
  misc_feature: MA Experiment 20001911 PARAMETER Experiment Name: At_Drought_Reproduction_P Parameter: Plant Line Value: WS
  misc_feature: MA Experiment 20001911 PARAMETER Experiment Name: At_Drought_Reproduction_P Parameter: Timepoint (day) Value: 10
  misc_feature: MA Experiment 20001911 PARAMETER Experiment Name: At_Drought_Reproduction_P Parameter: Tissue Value: Flowers
  misc_feature: MA Experiment 20001911 PARAMETER Experiment Name: At_Drought_Reproduction_P Parameter: Treatment Value: Drought vs. No Drought

SEQ ID NO: 32888 - protein, 499 aa, Arabidopsis thaliana; identical to SEQ ID NO: 29298
  peptide (1)..(499): Ceres Seq. ID no. 12321247
  misc_feature (30)..(494): Pfam Name: Cytochrome P450 Pfam Description: Cytochrome P450
  misc_feature (1)..(499): Homolog of NCBI NO: 15231538 NR Description: cytochrome p450 family; protein id: At3g26300.1
  misc_feature (1)..(499): Homolog of NCBI NO: 28393289 NR Description: putative cytochrome p450 [Arabidopsis thaliana]
  misc_feature (1)..(499): Homolog of NCBI NO: 30696845 NR Description: cytochrome P450 71B10 [Arabidopsis thaliana]
  misc_feature (1)..(499): Homolog of NCBI NO: 13878390 NR Description: Cytochrome P450 71B10
  misc_feature (19)..(499): Homolog of NCBI NO: 16507125 NR Description: cytochrome P450 [Citrus sinensis]
  misc_feature (1)..(499): Homolog of NCBI NO: 25282608 NR Description: cytochrome P-450LXXIA1 [similarity] - avocado
  misc_feature (245)..(499): Homolog of NCBI NO: 21450868 NR Description: putative cytochrome P450 monooxygenase
  misc_feature (6)..(497): Homolog of NCBI NO: 619745 NR Description: cytochrome p450 dependent monooxygenase
  misc_feature (6)..(497): Homolog of NCBI NO: 15236349 NR Description: cytochrome p450 family
  misc_feature (1)..(499): Homolog of NCBI NO: 15235968 NR Description: cytochrome p450 family

SEQ ID NO: 32889 - protein, 455 aa, Arabidopsis thaliana; identical to SEQ ID NO: 29299
  peptide (1)..(455): Ceres Seq. ID no. 12321248
  misc_feature (1)..(450): Pfam Name: Cytochrome P450 Pfam Description: Cytochrome P450
  misc_feature (1)..(455): Homolog of NCBI NO: 15231538 NR Description: cytochrome p450 family; protein id: At3g26300.1
  misc_feature (1)..(455): Homolog of NCBI NO: 28393289 NR Description: putative cytochrome p450 [Arabidopsis thaliana]
  misc_feature (1)..(455): Homolog of NCBI NO: 30696845 NR Description: cytochrome P450 71B10 [Arabidopsis thaliana]
  misc_feature (1)..(455): Homolog of NCBI NO: 13878390 NR Description: Cytochrome P450 71B10
  misc_feature (1)..(455): Homolog of NCBI NO: 16507125 NR Description: cytochrome P450 [Citrus sinensis]
  misc_feature (1)..(455): Homolog of NCBI NO: 25282608 NR Description: cytochrome P-450LXXIA1 [similarity] - avocado
  misc_feature (201)..(455): Homolog of NCBI NO: 21450868 NR Description: putative cytochrome P450 monooxygenase
  misc_feature (1)..(453): Homolog of NCBI NO: 619745 NR Description: cytochrome p450 dependent monooxygenase
  misc_feature (1)..(453): Homolog of NCBI NO: 15236349 NR Description: cytochrome p450 family
  misc_feature (1)..(455): Homolog of NCBI NO: 15235968 NR Description: cytochrome p450 family

SEQ ID NO: 32890 - protein, 433 aa, Arabidopsis thaliana; identical to SEQ ID NO: 29300
  peptide (1)..(433): Ceres Seq. ID no. 12321249
  misc_feature (1)..(428): Pfam Name: Cytochrome P450 Pfam Description: Cytochrome P450
  misc_feature (1)..(433): Homolog of NCBI NO: 15231538 NR Description: cytochrome p450 family; protein id: At3g26300.1
  misc_feature (1)..(433): Homolog of NCBI NO: 28393289 NR Description: putative cytochrome p450 [Arabidopsis thaliana]
  misc_feature (1)..(433): Homolog of NCBI NO: 30696845 NR Description: cytochrome P450 71B10 [Arabidopsis thaliana]
  misc_feature (1)..(433): Homolog of NCBI NO: 13878390 NR Description: Cytochrome P450 71B10
  misc_feature (1)..(433): Homolog of NCBI NO: 16507125 NR Description: cytochrome P450 [Citrus sinensis]
  misc_feature (1)..(433): Homolog of NCBI NO: 25282608 NR Description: cytochrome P-450LXXIA1 [similarity] - avocado
  misc_feature (179)..(433): Homolog of NCBI NO: 21450868 NR Description: putative cytochrome P450 monooxygenase
  misc_feature (1)..(431): Homolog of NCBI NO: 619745 NR Description: cytochrome p450 dependent monooxygenase
  misc_feature (1)..(431): Homolog of NCBI NO: 15236349 NR Description: cytochrome p450 family
  misc_feature (1)..(433): Homolog of NCBI NO: 15235968 NR Description: cytochrome p450 family

SEQ ID NO: 32891 - DNA, 1422 bp, Arabidopsis thaliana; identical to SEQ ID NO: 29301
  misc_feature (1)..(1422): Ceres Seq. ID no. 12395190
  misc_feature: MA Experiment ID: 108573 Result: Up-regulated in Transcription
  misc_feature: MA Experiment 108573 PARAMETER Experiment Name: At_Drought_cDNA_P Parameter: Timepoint (hr) Value: 6
  misc_feature: MA Experiment 108573 PARAMETER Experiment Name: At_Drought_cDNA_P Parameter: Tissue Value: Aerial
  misc_feature: MA Experiment 108573 PARAMETER Experiment Name: At_Drought_cDNA_P Parameter: Treatment Value: Drought vs. No Drought
  misc_feature: MA Experiment ID: 108579 Result: Down-regulated in Transcription
  misc_feature: MA Experiment 108579 PARAMETER Experiment Name: At_4deg_Cold_cDNA_P Parameter: Temperature (deg C) Value: 4 vs. 22
  misc_feature: MA Experiment 108579 PARAMETER Experiment Name: At_4deg_Cold_cDNA_P Parameter: Timepoint (hr) Value: 6
  misc_feature: MA Experiment 108579 PARAMETER Experiment Name: At_4deg_Cold_cDNA_P Parameter: Tissue Value: Aerial
  misc_feature: MA Experiment ID: 108595 Result: Down-regulated in Transcription
  misc_feature: MA Experiment 108595 PARAMETER Experiment Name: At_Ler-pi_Ovule_cDNA_P Parameter: Plant Line Value: null
  misc_feature: MA Experiment ID: 20000445 Result: Up-regulated in Transcription
  misc_feature: MA Experiment 20000445 PARAMETER Experiment Name: At_100uM_NAA__P Parameter: Age (day) Value: 14
  misc_feature: MA Experiment 20000445 PARAMETER Experiment Name: At_100uM_NAA__P Parameter: Organism Value: A. thaliana
  misc_feature: MA Experiment 20000445 PARAMETER Experiment Name: At_100uM_NAA__P Parameter: Plant Line Value: WS
  misc_feature: MA Experiment 20000445 PARAMETER Experiment Name: At_100uM_NAA__P Parameter: Timepoint (hr) Value: 6
  misc_feature: MA Experiment 20000445 PARAMETER Experiment Name: At_100uM_NAA__P Parameter: Tissue Value: Aerial
  misc_feature: MA Experiment 20000445 PARAMETER Experiment Name: At_100uM_NAA__P Parameter: Treatment Value: 100uM NAA vs. No Treatment
  misc_feature: MA Experiment ID: 20001247 Result: Up-regulated in Transcription
  misc_feature: MA Experiment 20001247 PARAMETER Experiment Name: At_Far-red-induction_P Parameter: Age (day) Value: 7
  misc_feature: MA Experiment 20001247 PARAMETER Experiment Name: At_Far-red-induction_P Parameter: Light Value: Far-red vs. White
  misc_feature: MA Experiment 20001247 PARAMETER Experiment Name: At_Far-red-induction_P Parameter: Organism Value: A. thaliana
  misc_feature: MA Experiment 20001247 PARAMETER Experiment Name: At_Far-red-induction_P Parameter: Plant Line Value: Columbia
  misc_feature: MA Experiment 20001247 PARAMETER Experiment Name: At_Far-red-induction_P Parameter: Timepoint (hr) Value: 1
  misc_feature: MA Experiment 20001247 PARAMETER Experiment Name: At_Far-red-induction_P Parameter: Tissue Value: Whole Plant
  misc_feature: MA Experiment ID: 20001248 Result: Up-regulated in Transcription
  misc_feature: MA Experiment 20001248 PARAMETER Experiment Name: At_Far-red-induction_P Parameter: Age (day) Value: 7
  misc_feature: MA Experiment 20001248 PARAMETER Experiment Name: At_Far-red-induction_P Parameter: Light Value: Far-red vs. White
  misc_feature: MA Experiment 20001248 PARAMETER Experiment Name: At_Far-red-induction_P Parameter: Organism Value: A. thaliana
  misc_feature: MA Experiment 20001248 PARAMETER Experiment Name: At_Far-red-induction_P Parameter: Plant Line Value: Columbia
  misc_feature: MA Experiment 20001248 PARAMETER Experiment Name: At_Far-red-induction_P Parameter: Timepoint (hr) Value: 4
  misc_feature: MA Experiment 20001248 PARAMETER Experiment Name: At_Far-red-induction_P Parameter: Tissue Value: Whole Plant
  misc_feature: MA Experiment ID: 20001450 Result: Up-regulated in Transcription
  misc_feature: MA Experiment 20001450 PARAMETER Experiment Name: At_Far-red-induction_P Parameter: Age (day) Value: 7
  misc_feature: MA Experiment 20001450 PARAMETER Experiment Name: At_Far-red-induction_P Parameter: Light Value: Far-red vs. White
  misc_feature: MA Experiment 20001450 PARAMETER Experiment Name: At_Far-red-induction_P Parameter: Organism Value: A. thaliana
  misc_feature: MA Experiment 20001450 PARAMETER Experiment Name: At_Far-red-induction_P Parameter: Plant Line Value: Columbia
  misc_feature: MA Experiment 20001450 PARAMETER Experiment Name: At_Far-red-induction_P Parameter: Timepoint (hr) Value: 8
  misc_feature: MA Experiment 20001450 PARAMETER Experiment Name: At_Far-red-induction_P Parameter: Tissue Value: Whole Plant

SEQ ID NO: 32892 - protein, 384 aa, Arabidopsis thaliana; identical to SEQ ID NO: 29302
  peptide (1)..(384): Ceres Seq. ID no. 12395191
  misc_feature (49)..(330): Pfam Name: Protein phosphatase 2C Pfam Description: Protein phosphatase 2C
  misc_feature (40)..(379): Homolog of NCBI NO: 15239244 NR Description: protein phosphatase 2C-like protein
  misc_feature (34)..(379): Homolog of NCBI NO: 7768153 NR Description: protein phosphatase 2C (PP2C) [Fagus sylvatica]
  misc_feature (6)..(381): Homolog of NCBI NO: 7485891 NR Description: hypothetical protein F20M13.80 - Arabidopsis
  misc_feature (1)..(381): Homolog of NCBI NO: 17064756 NR Description: putative protein phosphatase-2c [Arabidopsis
  misc_feature (4)..(379): Homolog of NCBI NO: 18855039 NR Description: putative protein phosphatase [Oryza sativa]
  misc_feature (1)..(384): Homolog of NCBI NO: 11282004 NR Description: protein phosphatase 2C homolog [imported] -
  misc_feature (1)..(381): Homolog of NCBI NO: 22329238 NR Description: putative protein phosphatase-2c
  misc_feature (6)..(384): Homolog of NCBI NO: 7670033 NR Description: protein phosphatase 2C-like protein [Arabidopsis
  misc_feature (1)..(384): Homolog of NCBI NO: 21537406 NR Description: protein phosphatase-2c, putative [Arabidopsis
  misc_feature (1)..(384): Homolog of NCBI NO: 18401370 NR Description: protein phosphatase-2c, putative

SEQ ID NO: 32893 - protein, 379 aa, Arabidopsis thaliana; identical to SEQ ID NO: 29303
  peptide (1)..(379): Ceres Seq. ID no. 12395192
  misc_feature (44)..(325): Pfam Name: Protein phosphatase 2C Pfam Description: Protein phosphatase 2C
  misc_feature (35)..(374): Homolog of NCBI NO: 15239244 NR Description: protein phosphatase 2C-like protein
  misc_feature (29)..(374): Homolog of NCBI NO: 7768153 NR Description: protein phosphatase 2C (PP2C) [Fagus sylvatica]
  misc_feature (1)..(376): Homolog of NCBI NO: 7485891 NR Description: hypothetical protein F20M13.80 - Arabidopsis
  misc_feature (1)..(376): Homolog of NCBI NO: 17064756 NR Description: putative protein phosphatase-2c [Arabidopsis
  misc_feature (1)..(374): Homolog of NCBI NO: 18855039 NR Description: putative protein phosphatase [Oryza sativa]
  misc_feature (1)..(379): Homolog of NCBI NO: 11282004 NR Description: protein phosphatase 2C homolog [imported] -
  misc_feature (1)..(376): Homolog of NCBI NO: 22329238 NR Description: putative protein phosphatase-2c
  misc_feature (1)..(379): Homolog of NCBI NO: 7670033 NR Description: protein phosphatase 2C-like protein [Arabidopsis
  misc_feature (1)..(379): Homolog of NCBI NO: 21537406 NR Description: protein phosphatase-2c, putative [Arabidopsis
  misc_feature (1)..(379): Homolog of NCBI NO: 18401370 NR Description: protein phosphatase-2c, putative

SEQ ID NO: 32894 - protein, 324 aa, Arabidopsis thaliana; identical to SEQ ID NO: 29304
  peptide (1)..(324): Ceres Seq. ID no. 12395193
  misc_feature (1)..(270): Pfam Name: Protein phosphatase 2C Pfam Description: Protein phosphatase 2C
  misc_feature (1)..(319): Homolog of NCBI NO: 15239244 NR Description: protein phosphatase 2C-like protein
  misc_feature (1)..(319): Homolog of NCBI NO: 7768153 NR Description: protein phosphatase 2C (PP2C) [Fagus sylvatica]
  misc_feature (1)..(321): Homolog of NCBI NO: 7485891 NR Description: hypothetical protein F20M13.80 - Arabidopsis
  misc_feature (1)..(321): Homolog of NCBI NO: 17064756 NR Description: putative protein phosphatase-2c [Arabidopsis
  misc_feature (1)..(319): Homolog of NCBI NO: 18855039 NR Description: putative protein phosphatase [Oryza sativa]
  misc_feature (1)..(324): Homolog of NCBI NO: 11282004 NR Description: protein phosphatase 2C homolog [imported] -
  misc_feature (1)..(321): Homolog of NCBI NO: 22329238 NR Description: putative protein phosphatase-2c
  misc_feature (1)..(324): Homolog of NCBI NO: 7670033 NR Description: protein phosphatase 2C-like protein [Arabidopsis
  misc_feature (1)..(324): Homolog of NCBI NO: 21537406 NR Description: protein phosphatase-2c, putative [Arabidopsis
  misc_feature (1)..(324): Homolog of NCBI NO: 18401370 NR Description: protein phosphatase-2c, putative

SEQ ID NO: 32895 - DNA, 2300 bp, Arabidopsis thaliana; identical to SEQ ID NO: 29305
  misc_feature (1)..(2300): Ceres Seq. ID no. 13580663
  misc_feature: MA Experiment ID: 108434 Result: Up-regulated in Transcription
  misc_feature: MA Experiment 108434 PARAMETER Experiment Name: At_Root_Tips_cDNA_P Parameter: Tissue Value: Root Tips
  misc_feature: MA Experiment ID: 108462 Result: Down-regulated in Transcription
  misc_feature: MA Experiment 108462 PARAMETER Experiment Name: At_Germinating_Seeds_cDNA_P Parameter: Age (day) Value: 2 vs. 0
  misc_feature: MA Experiment 108462 PARAMETER Experiment Name: At_Germinating_Seeds_cDNA_P Parameter: Tissue Value: Germinating Seeds
  misc_feature: MA Experiment ID: 108463 Result: Down-regulated in Transcription
  misc_feature: MA Experiment 108463 PARAMETER Experiment Name: At_Germinating_Seeds_cDNA_P Parameter: Age (day) Value: 3 vs. 0
  misc_feature: MA Experiment 108463 PARAMETER Experiment Name: At_Germinating_Seeds_cDNA_P Parameter: Tissue Value: Germinating Seeds
  misc_feature: MA Experiment ID: 108464 Result: Down-regulated in Transcription
  misc_feature: MA Experiment 108464 PARAMETER Experiment Name: At_Germinating_Seeds_cDNA_P Parameter: Age (day) Value: 4 vs. 0
  misc_feature: MA Experiment 108464 PARAMETER Experiment Name: At_Germinating_Seeds_cDNA_P Parameter: Tissue Value: Germinating Seeds
  misc_feature: MA Experiment ID: 108573 Result: Down-regulated in Transcription
  misc_feature: MA Experiment 108573 PARAMETER Experiment Name: At_Drought_cDNA_P Parameter: Timepoint (hr) Value: 6
  misc_feature: MA Experiment 108573 PARAMETER Experiment Name: At_Drought_cDNA_P Parameter: Tissue Value: Aerial
  misc_feature: MA Experiment 108573 PARAMETER Experiment Name: At_Drought_cDNA_P Parameter: Treatment Value: Drought vs. No Drought
  misc_feature: MA Experiment ID: 20000227 Result: Up-regulated in Transcription
  misc_feature: MA Experiment 20000227 PARAMETER Experiment Name: At_Root-Tips-vs-Tops_P Parameter: Tissue Value: Root Tips vs. Root Tops
  misc_feature: MA Experiment ID: 20000437 Result: Down-regulated in Transcription
  misc_feature: MA Experiment 20000437 PARAMETER Experiment Name: At_Drought_P Parameter: Age (day) Value: 8
  misc_feature: MA Experiment 20000437 PARAMETER Experiment Name: At_Drought_P Parameter: Organism Value: A. thaliana
  misc_feature: MA Experiment 20000437 PARAMETER Experiment Name: At_Drought_P Parameter: Plant Line Value: WS
  misc_feature: MA Experiment 20000437 PARAMETER Experiment Name: At_Drought_P Parameter: Timepoint (hr) Value: 24
  misc_feature: MA Experiment 20000437 PARAMETER Experiment Name: At_Drought_P Parameter: Tissue Value: Whole Plant
  misc_feature: MA Experiment 20000437 PARAMETER Experiment Name: At_Drought_P Parameter: Treatment Value: Drought vs. No Drought
  misc_feature: MA Experiment ID: 20000496 Result: Up-regulated in Transcription
  misc_feature: MA Experiment 20000496 PARAMETER Experiment Name: At_Guard_Cells_P Parameter: Harvest Date Value: 7/19/2002
  misc_feature: MA Experiment 20000496 PARAMETER Experiment Name: At_Guard_Cells_P Parameter: Organism Value: Canola
  misc_feature: MA Experiment 20000496 PARAMETER Experiment Name: At_Guard_Cells_P Parameter: Tissue Value: Guard Cells vs. Leaves
  misc_feature: MA Experiment ID: 20000794 Result: Down-regulated in Transcription
  misc_feature: MA Experiment 20000794 PARAMETER Experiment Name: At_Petals_P Parameter: Age (day) Value: 23-25 days
  misc_feature: MA Experiment 20000794 PARAMETER Experiment Name: At_Petals_P Parameter: Plant Line Value: WS
  misc_feature: MA Experiment 20000794 PARAMETER Experiment Name: At_Petals_P Parameter: Tissue Value: Petals vs. Whole plant
  misc_feature: MA Experiment ID: 20001558 Result: Up-regulated in Transcription
  misc_feature: MA Experiment 20001558 PARAMETER Experiment Name: At_Drought_Soil_Dry_P Parameter: Age (day) Value: 27
  misc_feature: MA Experiment 20001558 PARAMETER Experiment Name: At_Drought_Soil_Dry_P Parameter: Organism Value: A. thaliana
  misc_feature: MA Experiment 20001558 PARAMETER Experiment Name: At_Drought_Soil_Dry_P Parameter: Plant Line Value: WS
  misc_feature: MA Experiment 20001558 PARAMETER Experiment Name: At_Drought_Soil_Dry_P Parameter: Post Timepoint (hr) Value: 6
  misc_feature: MA Experiment 20001558 PARAMETER Experiment Name: At_Drought_Soil_Dry_P Parameter: Post-Treatment Value: Re-Water vs. No Drought
  misc_feature: MA Experiment 20001558 PARAMETER Experiment Name: At_Drought_Soil_Dry_P Parameter: Timepoint (day) Value: 13
  misc_feature: MA Experiment 20001558 PARAMETER Experiment Name: At_Drought_Soil_Dry_P Parameter: Treatment Value: Drought vs. No Drought
  misc_feature: MA Experiment ID: 20001757 Result: Up-regulated in Transcription
  misc_feature: MA Experiment 20001757 PARAMETER Experiment Name: At_50mM_NH4NO3_L-to-H_P Parameter: Timepoint (hr) Value: 6
  misc_feature: MA Experiment 20001757 PARAMETER Experiment Name: At_50mM_NH4NO3_L-to-H_P Parameter: Tissue Value: Leaf
  misc_feature: MA Experiment 20001757 PARAMETER Experiment Name: At_50mM_NH4NO3_L-to-H_P Parameter: Treatment Value: 50mM NH4NO3 vs 100mM Mannitol

SEQ ID NO: 32896 - protein, 366 aa, Arabidopsis thaliana; identical to SEQ ID NO: 29306
  peptide (1)..(366): Ceres Seq. ID no. 13580664
  misc_feature (74)..(285): Pfam Name: Calcineurin-like phosphoesterase Pfam Description: Calcineurin-like phosphoesterase
  misc_feature (37)..(339): Homolog of NCBI NO: 6635445 NR Description: putative purple acid phosphatase precursor
  misc_feature (37)..(363): Homolog of NCBI NO: 25752251 NR Description: probable acid phosphatase (EC 3.1.3.2) At2g01890
  misc_feature (37)..(363): Homolog of NCBI NO: 22325419 NR Description: calcineurin-like phosphoesterase family
  misc_feature (15)..(366): Homolog of NCBI NO: 30911094 NR Description: putative purple acid phosphatase [Arabidopsis
  misc_feature (1)..(366): Homolog of NCBI NO: 25752249 NR Description: probable acid phosphatase (EC 3.1.3.2) F10B6.10
  misc_feature (1)..(366): Homolog of NCBI NO: 30683951 NR Description: calcineurin-like phosphoesterase family

SEQ ID NO: 32897 - protein, 336 aa, Arabidopsis thaliana; identical to SEQ ID NO: 29307
  peptide (1)..(336): Ceres Seq. ID no. 13580665
  misc_feature (44)..(255): Pfam Name: Calcineurin-like phosphoesterase Pfam Description: Calcineurin-like phosphoesterase
  misc_feature (7)..(309): Homolog of NCBI NO: 6635445 NR Description: putative purple acid phosphatase precursor
  misc_feature (7)..(333): Homolog of NCBI NO: 25752251 NR Description: probable acid phosphatase (EC 3.1.3.2) At2g01890
  misc_feature (7)..(333): Homolog of NCBI NO: 22325419 NR Description: calcineurin-like phosphoesterase family
  misc_feature (1)..(336): Homolog of NCBI NO: 30911094 NR Description: putative purple acid phosphatase [Arabidopsis
  misc_feature (1)..(336): Homolog of NCBI NO: 25752249 NR Description: probable acid phosphatase (EC 3.1.3.2) F10B6.10
  misc_feature (1)..(336): Homolog of NCBI NO: 30683951 NR Description: calcineurin-like phosphoesterase family

SEQ ID NO: 32898 - protein, 270 aa, Arabidopsis thaliana; identical to SEQ ID NO: 29308
  peptide (1)..(270): Ceres Seq. ID no. 13580666
  misc_feature (1)..(189): Pfam Name: Calcineurin-like phosphoesterase Pfam Description: Calcineurin-like phosphoesterase
  misc_feature (1)..(243): Homolog of NCBI NO: 6635445 NR Description: putative purple acid phosphatase precursor
  misc_feature (1)..(267): Homolog of NCBI NO: 25752251 NR Description: probable acid phosphatase (EC 3.1.3.2) At2g01890
  misc_feature (1)..(267): Homolog of NCBI NO: 22325419 NR Description: calcineurin-like phosphoesterase family
  misc_feature (1)..(270): Homolog of NCBI NO: 30911094 NR Description: putative purple acid phosphatase [Arabidopsis
  misc_feature (1)..(270): Homolog of NCBI NO: 25752249 NR Description: probable acid phosphatase (EC 3.1.3.2) F10B6.10
  misc_feature (1)..(270): Homolog of NCBI NO: 30683951 NR Description: calcineurin-like phosphoesterase family

SEQ ID NO: 32899 - DNA, 1389 bp, Arabidopsis thaliana; identical to SEQ ID NO: 29309
  misc_feature (1)..(1389): Ceres Seq. ID no. 13486876
  misc_feature: MA Experiment ID: 20000314 Result: Down-regulated in Transcription
  misc_feature: MA Experiment 20000314 PARAMETER Experiment Name: At_14day_Shoots-Roots_Sub_P Parameter: Age (day) Value: 14
  misc_feature: MA Experiment 20000314 PARAMETER Experiment Name: At_14day_Shoots-Roots_Sub_P Parameter: Organism Value: A. thaliana
  misc_feature: MA Experiment 20000314 PARAMETER Experiment Name: At_14day_Shoots-Roots_Sub_P Parameter: Plant Line Value: WS
  misc_feature: MA Experiment 20000314 PARAMETER Experiment Name: At_14day_Shoots-Roots_Sub_P Parameter: Tissue Value: Roots vs. Whole Plant
  misc_feature: MA Experiment ID: 20000315 Result: Down-regulated in Transcription
  misc_feature: MA Experiment 20000315 PARAMETER Experiment Name: At_14day_Shoots-Roots_Sub_P Parameter: Age (day) Value: 14
  misc_feature: MA Experiment 20000315 PARAMETER Experiment Name: At_14day_Shoots-Roots_Sub_P Parameter: Organism Value: A. thaliana
  misc_feature: MA Experiment 20000315 PARAMETER Experiment Name: At_14day_Shoots-Roots_Sub_P Parameter: Plant Line Value: WS
  misc_feature: MA Experiment 20000315 PARAMETER Experiment Name: At_14day_Shoots-Roots_Sub_P Parameter: Tissue Value: Shoots vs. Whole Plant
  misc_feature: Phenotype: ROSETTE LEAVES Disorganized Rosette-Disorganized Rosette
  misc_feature: Phenotype: ROSETTE LEAVES Shape-Lanceolate
  misc_feature: Phenotype: ROSETTE LEAVES Other
  misc_feature: Phenotype: WHOLE PLANT Size-Small
  misc_feature: Phenotype: ROSETTE LEAVES Disorganized Rosette-Disorganized Rosette
  misc_feature: Phenotype: ROSETTE LEAVES Shape-Lanceolate
  misc_feature: Phenotype: ROSETTE LEAVES Other
  misc_feature: Phenotype: WHOLE PLANT Size-Small
  misc_feature: Phenotype: ROSETTE LEAVES Disorganized Rosette-Disorganized Rosette
  misc_feature: Phenotype: ROSETTE LEAVES Shape-Lanceolate
  misc_feature: Phenotype: ROSETTE LEAVES Other
  misc_feature: Phenotype: WHOLE PLANT Size-Small
  misc_feature: Phenotype: ROSETTE LEAVES Disorganized Rosette-Disorganized Rosette
  misc_feature: Phenotype: ROSETTE LEAVES Shape-Lanceolate
  misc_feature: Phenotype: ROSETTE LEAVES Other
  misc_feature: Phenotype: WHOLE PLANT Size-Small
  misc_feature: Phenotype: ROSETTE LEAVES Disorganized Rosette-Disorganized Rosette
  misc_feature: Phenotype: ROSETTE LEAVES Shape-Lanceolate
  misc_feature: Phenotype: ROSETTE LEAVES Other
  misc_feature: Phenotype: WHOLE PLANT Size-Small
  misc_feature: Phenotype: ROSETTE LEAVES Disorganized Rosette-Disorganized Rosette
  misc_feature: Phenotype: ROSETTE LEAVES Shape-Lanceolate
  misc_feature: Phenotype: ROSETTE LEAVES Other
  misc_feature: Phenotype: CAULINE LEAVES Shape-Lanceolate
  misc_feature: Phenotype: ROSETTE LEAVES Disorganized Rosette-Disorganized Rosette
  misc_feature: Phenotype: ROSETTE LEAVES Shape-Lanceolate
  misc_feature: Phenotype: ROSETTE LEAVES Other
  misc_feature: Phenotype: WHOLE PLANT Size-Small
  misc_feature: Phenotype: ROSETTE LEAVES Disorganized Rosette-Disorganized Rosette
  misc_feature: Phenotype: ROSETTE LEAVES Shape-Lanceolate
  misc_feature: Phenotype: INFLORESCENCE Height-Short
  misc_feature: Phenotype: ROSETTE LEAVES Disorganized Rosette-Disorganized Rosette
  misc_feature: Phenotype: ROSETTE LEAVES Shape-Lanceolate
  misc_feature: Phenotype: ROSETTE LEAVES Other
  misc_feature: Phenotype: FLOWERS Other
  misc_feature: Phenotype: INFLORESCENCE Height-Short
  misc_feature: Phenotype: FERTILITY Fertility-Reduced
  misc_feature: Phenotype: ROSETTE LEAVES Disorganized Rosette-Disorganized Rosette
  misc_feature: Phenotype: ROSETTE LEAVES Shape-Lanceolate
  misc_feature: Phenotype: ROSETTE LEAVES Other
  misc_feature: Phenotype: FLOWERS Other
  misc_feature: Phenotype: INFLORESCENCE Height-Short
  misc_feature: Phenotype: FERTILITY Fertility-Reduced
  misc_feature: Phenotype: ROSETTE LEAVES Disorganized Rosette-Disorganized Rosette
  misc_feature: Phenotype: ROSETTE LEAVES Shape-Lanceolate
  misc_feature: Phenotype: INFLORESCENCE Height-Short
  misc_feature: Phenotype: ROSETTE LEAVES Disorganized Rosette-Disorganized Rosette
  misc_feature: Phenotype: ROSETTE LEAVES Shape-Lanceolate
  misc_feature: Phenotype: ROSETTE LEAVES Other
  misc_feature: Phenotype: FLOWERS Other
  misc_feature: Phenotype: INFLORESCENCE Height-Short
  misc_feature: Phenotype: FERTILITY Fertility-Reduced
  misc_feature: Phenotype: ROSETTE LEAVES Disorganized Rosette-Disorganized Rosette
  misc_feature: Phenotype: ROSETTE LEAVES Shape-Lanceolate
  misc_feature: Phenotype: INFLORESCENCE Height-Short
  misc_feature: Phenotype: ROSETTE LEAVES Disorganized Rosette-Disorganized Rosette
  misc_feature: Phenotype: ROSETTE LEAVES Shape-Lanceolate
  misc_feature: Phenotype: ROSETTE LEAVES Other
  misc_feature: Phenotype: FLOWERS Other
  misc_feature: Phenotype: INFLORESCENCE Height-Short
  misc_feature: Phenotype: FERTILITY Fertility-Reduced
  misc_feature: Phenotype: ROSETTE LEAVES Disorganized Rosette-Disorganized Rosette
  misc_feature: Phenotype: ROSETTE LEAVES Shape-Lanceolate
  misc_feature: Phenotype: INFLORESCENCE Height-Short
  misc_feature: Phenotype: ROSETTE LEAVES Disorganized Rosette-Disorganized Rosette
  misc_feature: Phenotype: ROSETTE LEAVES Shape-Lanceolate
  misc_feature: Phenotype: ROSETTE LEAVES Other
  misc_feature: Phenotype: FLOWERS Other
  misc_feature: Phenotype: INFLORESCENCE Height-Short
  misc_feature: Phenotype: FERTILITY Fertility-Reduced
  misc_feature: Phenotype: ROSETTE LEAVES Disorganized Rosette-Disorganized Rosette
  misc_feature: Phenotype: ROSETTE LEAVES Shape-Lanceolate
  misc_feature: Phenotype: INFLORESCENCE Height-Short
  misc_feature: Phenotype: ROSETTE LEAVES Shape-Lanceolate
  misc_feature: Phenotype: ROSETTE LEAVES Shape-Lanceolate
  misc_feature: Phenotype: ROSETTE LEAVES Shape-Lanceolate
  misc_feature: Phenotype: ROSETTE LEAVES Shape-Lanceolate
  misc_feature: Phenotype: ROSETTE LEAVES Shape-Lanceolate
  misc_feature: Phenotype: ROSETTE LEAVES Shape-Lanceolate
  misc_feature: Phenotype: ROSETTE LEAVES Shape-Lanceolate
  misc_feature: Phenotype: ROSETTE LEAVES Shape-Lanceolate
  misc_feature: Phenotype: ROSETTE LEAVES Shape-Lanceolate
  misc_feature: Phenotype: ROSETTE LEAVES Shape-Lanceolate
  misc_feature: Phenotype: ROSETTE LEAVES Shape-Lanceolate
  misc_feature: Phenotype: ROSETTE LEAVES Other
  misc_feature: Phenotype: CAULINE LEAVES Shape-Lanceolate
  misc_feature: Phenotype: CAULINE LEAVES Other
  misc_feature: Phenotype: ROSETTE LEAVES Disorganized Rosette-Disorganized Rosette
  misc_feature: Phenotype: ROSETTE LEAVES Shape-Lanceolate
  misc_feature: Phenotype: ROSETTE LEAVES Other
  misc_feature: Phenotype: INFLORESCENCE Other
  misc_feature: Phenotype: ROSETTE LEAVES Disorganized Rosette-Disorganized Rosette
  misc_feature: Phenotype: ROSETTE LEAVES Shape-Lanceolate
  misc_feature: Phenotype: ROSETTE LEAVES Other
  misc_feature: Phenotype: INFLORESCENCE Height-Short
  misc_feature: Phenotype: INFLORESCENCE Other
  misc_feature: Phenotype: FERTILITY Fertility-Reduced
  misc_feature: Phenotype: ROSETTE LEAVES Disorganized Rosette-Disorganized Rosette
  misc_feature: Phenotype: ROSETTE LEAVES Shape-Lanceolate
  misc_feature: Phenotype: ROSETTE LEAVES Other
  misc_feature: Phenotype: INFLORESCENCE Height-Short
  misc_feature: Phenotype: INFLORESCENCE Other
  misc_feature: Phenotype: FERTILITY Fertility-Reduced
  misc_feature: Phenotype: ROSETTE LEAVES Disorganized Rosette-Disorganized Rosette
  misc_feature: Phenotype: ROSETTE LEAVES Shape-Lanceolate
  misc_feature: Phenotype: ROSETTE LEAVES Other
  misc_feature: Phenotype: INFLORESCENCE Height-Short
  misc_feature: Phenotype: INFLORESCENCE Other
  misc_feature: Phenotype: FERTILITY Fertility-Reduced
  misc_feature: Phenotype: ROSETTE LEAVES Disorganized Rosette-Disorganized Rosette
  misc_feature: Phenotype: ROSETTE LEAVES Shape-Lanceolate
  misc_feature: Phenotype: ROSETTE LEAVES Other
  misc_feature: Phenotype: INFLORESCENCE Height-Short
  misc_feature: Phenotype: INFLORESCENCE Other
  misc_feature: Phenotype: FERTILITY Fertility-Reduced
  misc_feature: Phenotype: INFLORESCENCE Other
  misc_feature: Phenotype: ROSETTE LEAVES Shape-Lanceolate
  misc_feature: Phenotype: ROSETTE LEAVES Shape-Serrate
  misc_feature: Phenotype: ROSETTE LEAVES Other
  misc_feature: Phenotype: ROSETTE LEAVES Other
  misc_feature: Phenotype: WHOLE PLANT Color-Dark Green
  misc_feature: Phenotype: WHOLE PLANT Color-Dark Green
  misc_feature: Phenotype: WHOLE PLANT Color-Dark Green
  misc_feature: Phenotype: WHOLE PLANT Size-Small
  misc_feature: Phenotype: WHOLE PLANT Size-Small
  misc_feature: Phenotype: WHOLE PLANT Other
  misc_feature: Phenotype: INFLORESCENCE Branching-No Branching
  misc_feature: Phenotype: INFLORESCENCE Flowering Time-Late Flowering
  misc_feature: Phenotype: INFLORESCENCE Flowering Time-Late Flowering
  misc_feature: Phenotype: INFLORESCENCE Flowering Time-Late Flowering
  misc_feature: Phenotype: SENESCENCE TIME Senescence Time-Late Senescence
  misc_feature: Phenotype: ROSETTE LEAVES Disorganized Rosette-Disorganized Rosette
  misc_feature: Phenotype: ROSETTE LEAVES Shape-Lanceolate
  misc_feature: Phenotype: ROSETTE LEAVES Other
  misc_feature: Phenotype: ROSETTE LEAVES Other
  misc_feature: Phenotype: WHOLE PLANT Color-Dark Green
  misc_feature: Phenotype: WHOLE PLANT Color-Dark Green
  misc_feature: Phenotype: WHOLE PLANT Color-Dark Green
  misc_feature: Phenotype: WHOLE PLANT Rosette Shape-Bushy
  misc_feature: Phenotype: WHOLE PLANT Size-Small
  misc_feature: Phenotype: WHOLE PLANT Size-Small
  misc_feature: Phenotype: WHOLE PLANT Size-Small
  misc_feature: Phenotype: CAULINE LEAVES Size-Small
  misc_feature: Phenotype: CAULINE LEAVES Other
  misc_feature: Phenotype: FLOWERS Size-Small
  misc_feature: Phenotype: INFLORESCENCE Branching-No Branching
  misc_feature: Phenotype: INFLORESCENCE Branching-Reduced Apical Dominance
  misc_feature: Phenotype: INFLORESCENCE Flowering Time-Late Flowering
  misc_feature: Phenotype: INFLORESCENCE Flowering Time-Late Flowering
  misc_feature: Phenotype: INFLORESCENCE Flowering Time-Late Flowering
  misc_feature: Phenotype: INFLORESCENCE Height-Short
  misc_feature: Phenotype: INFLORESCENCE Internode Length-Short Internode
  misc_feature: Phenotype: INFLORESCENCE Other
  misc_feature: Phenotype: FERTILITY Fertility-Reduced
  misc_feature: Phenotype: SENESCENCE TIME Senescence Time-Late Senescence
  misc_feature: Phenotype: WHOLE PLANT Rosette Shape-Standing
  misc_feature: Phenotype: WHOLE PLANT Size-Small
  misc_feature: Phenotype: INFLORESCENCE Flowering Time-Late Flowering
  misc_feature: Phenotype: ROSETTE LEAVES Curled-Curled 1
  misc_feature: Phenotype: WHOLE PLANT Color-Dark Green
  misc_feature: Phenotype: WHOLE PLANT Size-Small
  misc_feature: Phenotype: ROSETTE LEAVES Other
  misc_feature: Phenotype: WHOLE PLANT Color-Dark Green
  misc_feature: Phenotype: WHOLE PLANT Color-Dark Green
  misc_feature: Phenotype: WHOLE PLANT Size-Small
  misc_feature: Phenotype: WHOLE PLANT Size-Small
  misc_feature: Phenotype: CAULINE LEAVES Size-Small
  misc_feature: Phenotype: FLOWERS Other
  misc_feature: Phenotype: INFLORESCENCE Branching-Reduced Apical Dominance
  misc_feature: Phenotype: INFLORESCENCE Flowering Time-Late Flowering
  misc_feature: Phenotype: INFLORESCENCE Internode Length-Short Internode
  misc_feature: Phenotype: INFLORESCENCE Other
  misc_feature: Phenotype: FERTILITY Fertility-Reduced
  misc_feature: Phenotype: ROSETTE LEAVES Disorganized Rosette-Disorganized Rosette
  misc_feature: Phenotype: ROSETTE LEAVES Petiole Length-Long Petioles
  misc_feature: Phenotype: ROSETTE LEAVES Other
  misc_feature: Phenotype: WHOLE PLANT Color-Dark Green
  misc_feature: Phenotype: WHOLE PLANT Size-Small
  misc_feature: Phenotype: CAULINE LEAVES Other
  misc_feature: Phenotype: INFLORESCENCE Branching-No Branching
  misc_feature: Phenotype: INFLORESCENCE Flowering Time-Late Flowering
  misc_feature: Phenotype: INFLORESCENCE Flowering Time-Late Flowering
  misc_feature: Phenotype: ROSETTE LEAVES Disorganized Rosette-Disorganized Rosette
  misc_feature: Phenotype: ROSETTE LEAVES Other
  misc_feature: Phenotype: WHOLE PLANT Color-Dark Green
  misc_feature: Phenotype: WHOLE PLANT Color-Dark Green
  misc_feature: Phenotype: WHOLE PLANT Rosette Shape-Bushy
  misc_feature: Phenotype: WHOLE PLANT Size-Small
  misc_feature: Phenotype: WHOLE PLANT Size-Small
  misc_feature: Phenotype: CAULINE LEAVES Size-Small
  misc_feature: Phenotype: CAULINE LEAVES Other
  misc_feature: Phenotype: FLOWERS Size-Small
  misc_feature: Phenotype: INFLORESCENCE Branching-No Branching
  misc_feature: Phenotype: INFLORESCENCE Branching-Reduced Apical Dominance
  misc_feature: Phenotype: INFLORESCENCE Flowering Time-Late Flowering
  misc_feature: Phenotype: INFLORESCENCE Flowering Time-Late Flowering
  misc_feature: Phenotype: INFLORESCENCE Height-Short
  misc_feature: Phenotype: INFLORESCENCE Internode Length-Short Internode
  misc_feature: Phenotype: INFLORESCENCE Other
  misc_feature: Phenotype: FERTILITY Fertility-Reduced
  misc_feature: Phenotype: SENESCENCE TIME Senescence Time-Late Senescence
  misc_feature: Phenotype: WHOLE PLANT Color-Dark Green
  misc_feature: Phenotype: INFLORESCENCE Height-Short
  misc_feature: Phenotype: WHOLE PLANT Size-Small
  misc_feature: Phenotype: INFLORESCENCE Height-Short
  misc_feature: Phenotype: ROSETTE LEAVES Other
  misc_feature: Phenotype: WHOLE PLANT Color-Dark Green
  misc_feature: Phenotype: WHOLE PLANT Color-High Anthocyanin
  misc_feature: Phenotype: WHOLE PLANT Size-Small
  misc_feature: Phenotype: INFLORESCENCE Flowering Time-Late Flowering
  misc_feature: Phenotype: WHOLE PLANT Size-Small
  misc_feature: Phenotype: CAULINE LEAVES Other
  misc_feature: Phenotype: INFLORESCENCE Flowering Time-Late Flowering
  misc_feature: Phenotype: SILIQUES Length-Short

SEQ ID NO: 32900 - protein, 299 aa, Arabidopsis thaliana; identical to SEQ ID NO: 29310
  peptide (1)..(299): Ceres Seq. ID no. 13486877
  misc_feature (22)..(131): Pfam Name: B3 DNA binding domain Pfam Description: B3 DNA binding domain
  misc_feature (19)..(128): Homolog of NCBI NO: 15239984 NR Description: DNA-binding protein, putative [Arabidopsis
  misc_feature (18)..(226): Homolog of NCBI NO: 30681787 NR Description: DNA-binding protein, putative [Arabidopsis
  misc_feature (3)..(169): Homolog of NCBI NO: 37536454 NR Description: putative DNA-binding protein
  misc_feature (15)..(131): Homolog of NCBI NO: 34902226 NR Description: Putative RAV-like B3 domain DNA binding protein
  misc_feature (17)..(138): Homolog of NCBI NO: 32492293 NR Description: OSJNBa0088A01.1 [Oryza sativa (japonica
  misc_feature (18)..(181): Homolog of NCBI NO: 15223284 NR Description: DNA-binding protein, putative [Arabidopsis
  misc_feature (1)..(299): Homolog of NCBI NO: 18407193 NR Description: DNA-binding protein, putative [Arabidopsis
  misc_feature (17)..(299): Homolog of NCBI NO: 21618252 NR Description: RAV-like protein [Arabidopsis thaliana]
  misc_feature (1)..(299): Homolog of NCBI NO: 15228649 NR Description: DNA-binding protein, putative [Arabidopsis
  misc_feature (1)..(299): Homolog of NCBI NO: 26450371 NR Description: putative RAV [Arabidopsis thaliana]

SEQ ID NO: 32901 - protein, 283 aa, Arabidopsis thaliana; identical to SEQ ID NO: 29311
  peptide (1)..(283): Ceres Seq. ID no. 13486878
  misc_feature (6)..(115): Pfam Name: B3 DNA binding domain Pfam Description: B3 DNA binding domain
  misc_feature (3)..(112): Homolog of NCBI NO: 15239984 NR Description: DNA-binding protein, putative [Arabidopsis
  misc_feature (2)..(210): Homolog of NCBI NO: 30681787 NR Description: DNA-binding protein, putative [Arabidopsis
  misc_feature (1)..(153): Homolog of NCBI NO: 37536454 NR Description: putative DNA-binding protein
  misc_feature (1)..(115): Homolog of NCBI NO: 34902226 NR Description: Putative RAV-like B3 domain DNA binding protein
  misc_feature (1)..(122): Homolog of NCBI NO: 32492293 NR Description: OSJNBa0088A01.1 [Oryza sativa (japonica
  misc_feature (2)..(165): Homolog of NCBI NO: 15223284 NR Description: DNA-binding protein, putative [Arabidopsis
  misc_feature (1)..(283): Homolog of NCBI NO: 18407193 NR Description: DNA-binding protein, putative [Arabidopsis
  misc_feature (1)..(283): Homolog of NCBI NO: 21618252 NR Description: RAV-like protein [Arabidopsis thaliana]
  misc_feature (1)..(283): Homolog of NCBI NO: 15228649 NR Description: DNA-binding protein, putative [Arabidopsis
  misc_feature (1)..(283): Homolog of NCBI NO: 26450371 NR Description: putative RAV [Arabidopsis thaliana]

SEQ ID NO: 32902 - protein, 278 aa, Arabidopsis thaliana; identical to SEQ ID NO: 29312
  peptide (1)..(278): Ceres Seq. ID no. 13486879
  misc_feature (1)..(110): Pfam Name: B3 DNA binding domain Pfam Description: B3 DNA binding domain
  misc_feature (1)..(107): Homolog of NCBI NO: 15239984 NR Description: DNA-binding protein, putative [Arabidopsis
  misc_feature (1)..(205): Homolog of NCBI NO: 30681787 NR Description: DNA-binding protein, putative [Arabidopsis
  misc_feature (1)..(148): Homolog of NCBI NO: 37536454 NR Description: putative DNA-binding protein
  misc_feature (1)..(110): Homolog of NCBI NO: 34902226 NR Description: Putative RAV-like B3 domain DNA binding protein
  misc_feature (1)..(117): Homolog of NCBI NO: 32492293 NR Description: OSJNBa0088A01.1 [Oryza sativa (japonica
  misc_feature (1)..(160): Homolog of NCBI NO: 15223284 NR Description: DNA-binding protein, putative [Arabidopsis
  misc_feature (1)..(278): Homolog of NCBI NO: 18407193 NR Description: DNA-binding protein, putative [Arabidopsis
  misc_feature (1)..(278): Homolog of NCBI NO: 21618252 NR Description: RAV-like protein [Arabidopsis thaliana]
  misc_feature (1)..(278): Homolog of NCBI NO: 15228649 NR Description: DNA-binding protein, putative [Arabidopsis
  misc_feature (1)..(278): Homolog of NCBI NO: 26450371 NR Description: putative RAV [Arabidopsis thaliana]

SEQ ID NO: 32903 - DNA, 1558 bp, Arabidopsis thaliana; identical to SEQ ID NO: 29313
  misc_feature (1)..(1558): Ceres Seq. ID no. 12321966
  misc_feature: MA Experiment ID: 108434 Result: Down-regulated in Transcription
  misc_feature: MA Experiment 108434 PARAMETER Experiment Name: At_Root_Tips_cDNA_P Parameter: Tissue Value: Root Tips
  misc_feature: MA Experiment ID: 108594 Result: Up-regulated in Transcription
  misc_feature: MA Experiment 108594 PARAMETER Experiment Name: At_Ler-rhl_Root_cDNA_P Parameter: Plant Line Value: null
  misc_feature: MA Experiment ID: 108595 Result: Up-regulated in Transcription
  misc_feature: MA Experiment 108595 PARAMETER Experiment Name: At_Ler-pi_Ovule_cDNA_P Parameter: Plant Line Value: null
  misc_feature: MA Experiment ID: 108608 Result: Down-regulated in Transcription
  misc_feature: MA Experiment 108608 PARAMETER Experiment Name: At_100uM_ABA_cDNA_P Parameter: Timepoint (hr) Value: 1
  misc_feature: MA Experiment 108608 PARAMETER Experiment Name: At_100uM_ABA_cDNA_P Parameter: Tissue Value: Aerial
  misc_feature: MA Experiment 108608 PARAMETER Experiment Name: At_100uM_ABA_cDNA_P Parameter: Treatment Value: 100uM ABA vs. No Treatment
  misc_feature: MA Experiment ID: 20000111 Result: Down-regulated in Transcription
  misc_feature: MA Experiment 20000111 PARAMETER Experiment Name: At_42deg_Heat_cDNA_P Parameter: Temperature (deg C) Value: 42 vs. 22
  misc_feature: MA Experiment 20000111 PARAMETER Experiment Name: At_42deg_Heat_cDNA_P Parameter: Timepoint (hr) Value: 6
  misc_feature: MA Experiment 20000111 PARAMETER Experiment Name: At_42deg_Heat_cDNA_P Parameter: Tissue Value: Aerial
  misc_feature: MA Experiment ID: 20000166 Result: Down-regulated in Transcription
  misc_feature: MA Experiment 20000166 PARAMETER Experiment Name: At_100uM_ABA_P Parameter: Age (day) Value: 14
  misc_feature: MA Experiment 20000166 PARAMETER Experiment Name: At_100uM_ABA_P Parameter: Organism Value: A. thaliana
  misc_feature: MA Experiment 20000166 PARAMETER Experiment Name: At_100uM_ABA_P Parameter: Plant Line Value: WS
  misc_feature: MA Experiment 20000166 PARAMETER Experiment Name: At_100uM_ABA_P Parameter: Timepoint (hr) Value: 1
  misc_feature: MA Experiment 20000166 PARAMETER Experiment Name: At_100uM_ABA_P Parameter: Tissue Value: Aerial
  misc_feature: MA Experiment 20000166 PARAMETER Experiment Name: At_100uM_ABA_P Parameter: Treatment Value: 100uM ABA vs. No Treatment
  misc_feature: MA Experiment ID: 20000173 Result: Down-regulated in Transcription
  misc_feature: MA Experiment 20000173 PARAMETER Experiment Name: At_42deg_Heat_P Parameter: Age (day) Value: 14
  misc_feature: MA Experiment 20000173 PARAMETER Experiment Name: At_42deg_Heat_P Parameter: Organism Value: A. thaliana
  misc_feature: MA Experiment 20000173 PARAMETER Experiment Name: At_42deg_Heat_P Parameter: Plant Line Value: WS
  misc_feature: MA Experiment 20000173 PARAMETER Experiment Name: At_42deg_Heat_P Parameter: Temperature (deg C) Value: 42 vs. 22
  misc_feature: MA Experiment 20000173 PARAMETER Experiment Name: At_42deg_Heat_P Parameter: Timepoint (hr) Value: 6
  misc_feature: MA Experiment 20000173 PARAMETER Experiment Name: At_42deg_Heat_P Parameter: Tissue Value: Aerial
  misc_feature: MA Experiment ID: 20000184 Result: Down-regulated in Transcription
  misc_feature: MA Experiment 20000184 PARAMETER Experiment Name: At_Shoots__P Parameter: Age (day) Value: 7
  misc_feature: MA Experiment 20000184 PARAMETER Experiment Name: At_Shoots__P Parameter: Tissue Value: Shoots vs. Whole Plant
  misc_feature: MA Experiment ID: 20000213 Result: Up-regulated in Transcription
  misc_feature: MA Experiment 20000213 PARAMETER Experiment Name: At_4deg_Cold_P Parameter: Timepoint (hr) Value: 2
  misc_feature: MA Experiment ID: 20000437 Result: Down-regulated in Transcription
  misc_feature: MA Experiment 20000437 PARAMETER Experiment Name: At_Drought_P Parameter: Age (day) Value: 8
  misc_feature: MA Experiment 20000437 PARAMETER Experiment Name: At_Drought_P Parameter: Organism Value: A. thaliana
  misc_feature: MA Experiment 20000437 PARAMETER Experiment Name: At_Drought_P Parameter: Plant Line Value: WS
  misc_feature: MA Experiment 20000437 PARAMETER Experiment Name: At_Drought_P Parameter: Timepoint (hr) Value: 24
  misc_feature: MA Experiment 20000437 PARAMETER Experiment Name: At_Drought_P Parameter: Tissue Value: Whole Plant
  misc_feature: MA Experiment 20000437 PARAMETER Experiment Name: At_Drought_P Parameter: Treatment Value: Drought vs. No Drought
  misc_feature: MA Experiment ID: 20000438 Result: Down-regulated in Transcription
  misc_feature: MA Experiment 20000438 PARAMETER Experiment Name: At_Shoots__P Parameter: Age (day) Value: 14
  misc_feature: MA Experiment 20000438 PARAMETER Experiment Name: At_Shoots__P Parameter: Tissue Value: Shoots vs. Whole Plant
  misc_feature: MA Experiment ID: 20001557 Result: Up-regulated in Transcription
  misc_feature: MA Experiment 20001557 PARAMETER Experiment Name: At_Drought_Soil_Dry_P Parameter: Age (day) Value: 27
  misc_feature: MA Experiment 20001557 PARAMETER Experiment Name: At_Drought_Soil_Dry_P Parameter: Organism Value: A. thaliana
  misc_feature: MA Experiment 20001557 PARAMETER Experiment Name: At_Drought_Soil_Dry_P Parameter: Plant Line Value: WS
  misc_feature: MA Experiment 20001557 PARAMETER Experiment Name: At_Drought_Soil_Dry_P Parameter: Post Timepoint (hr) Value: 3
  misc_feature: MA Experiment 20001557 PARAMETER Experiment Name: At_Drought_Soil_Dry_P Parameter: Post-Treatment Value: Re-Water vs. No Drought
  misc_feature: MA Experiment 20001557 PARAMETER Experiment Name: At_Drought_Soil_Dry_P Parameter: Timepoint (day) Value: 13
  misc_feature: MA Experiment 20001557 PARAMETER Experiment Name: At_Drought_Soil_Dry_P Parameter: Treatment Value: Drought vs. No Drought
  misc_feature: MA Experiment ID: 20001558 Result: Up-regulated in Transcription
  misc_feature: MA Experiment 20001558 PARAMETER Experiment Name: At_Drought_Soil_Dry_P Parameter: Age (day) Value: 27
  misc_feature: MA Experiment 20001558 PARAMETER Experiment Name: At_Drought_Soil_Dry_P Parameter: Organism Value: A. thaliana
  misc_feature: MA Experiment 20001558 PARAMETER Experiment Name: At_Drought_Soil_Dry_P Parameter: Plant Line Value: WS
  misc_feature: MA Experiment 20001558 PARAMETER Experiment Name: At_Drought_Soil_Dry_P Parameter: Post Timepoint (hr) Value: 6
  misc_feature: MA Experiment 20001558 PARAMETER Experiment Name: At_Drought_Soil_Dry_P Parameter: Post-Treatment Value: Re-Water vs. No Drought
  misc_feature: MA Experiment 20001558 PARAMETER Experiment Name: At_Drought_Soil_Dry_P Parameter: Timepoint (day) Value: 13
  misc_feature: MA Experiment 20001558 PARAMETER Experiment Name: At_Drought_Soil_Dry_P Parameter: Treatment Value: Drought vs. No Drought
  misc_feature: MA Experiment ID: 20001911 Result: Down-regulated in Transcription
  misc_feature: MA Experiment 20001911 PARAMETER Experiment Name: At_Drought_Reproduction_P Parameter: Age (day) Value: 40
  misc_feature: MA Experiment 20001911 PARAMETER Experiment Name: At_Drought_Reproduction_P Parameter: Organism Value: A. thaliana
  misc_feature: MA Experiment 20001911 PARAMETER Experiment Name: At_Drought_Reproduction_P Parameter: Plant Line Value: WS
  misc_feature: MA Experiment 20001911 PARAMETER Experiment Name: At_Drought_Reproduction_P Parameter: Timepoint (day) Value: 10
  misc_feature: MA Experiment 20001911 PARAMETER Experiment Name: At_Drought_Reproduction_P Parameter: Tissue Value: Flowers
  misc_feature: MA Experiment 20001911 PARAMETER Experiment Name: At_Drought_Reproduction_P Parameter: Treatment Value: Drought vs. No Drought

SEQ ID NO: 32904 - protein, 487 aa, Arabidopsis thaliana; identical to SEQ ID NO: 29314
  peptide (1)..(487): Ceres Seq. ID no. 12321967
  misc_feature (23)..(441): Homolog of NCBI NO: 19911203 NR Description: glucosyltransferase-10 [Vigna angularis]
  misc_feature (23)..(478): Homolog of NCBI NO: 15218268 NR Description: UDP-glucose glucosyltransferase, putative
  misc_feature (17)..(477): Homolog of NCBI NO: 15219876 NR Description: UDP-glucose glucosyltransferase, putative
  misc_feature (23)..(477): Homolog of NCBI NO: 25286821 NR Description: T16E15.2 protein - Arabidopsis thaliana
  misc_feature (17)..(484): Homolog of NCBI NO: 15219867 NR Description: UDP-glucose glucosyltransferase, putative
  misc_feature (23)..(78): Homolog of NCBI NO: 37534766 NR Description: putative putative glucosyltransferase
  misc_feature (80)..(486): Homolog of NCBI NO: 37534766 NR Description: putative putative glucosyltransferase
  misc_feature (23)..(480): Homolog of NCBI NO: 15228063 NR Description: putative glucosyltransferase
  misc_feature (6)..(487): Homolog of NCBI NO: 15226332 NR Description: putative glucosyltransferase
  misc_feature (6)..(487): Homolog of NCBI NO: 21537408 NR Description: putative glucosyltransferase [Arabidopsis

SEQ ID NO: 32905 - protein, 482 aa, Arabidopsis thaliana; identical to SEQ ID NO: 29315
  peptide (1)..(482): Ceres Seq. ID no. 12321968
  misc_feature (18)..(436): Homolog of NCBI NO: 19911203 NR Description: glucosyltransferase-10 [Vigna angularis]
  misc_feature (18)..(473): Homolog of NCBI NO: 15218268 NR Description: UDP-glucose glucosyltransferase, putative
  misc_feature (12)..(472): Homolog of NCBI NO: 15219876 NR Description: UDP-glucose glucosyltransferase, putative
  misc_feature (18)..(472): Homolog of NCBI NO: 25286821 NR Description: T16E15.2 protein - Arabidopsis thaliana
  misc_feature (12)..(479): Homolog of NCBI NO: 15219867 NR Description: UDP-glucose glucosyltransferase, putative
  misc_feature (18)..(73): Homolog of NCBI NO: 37534766 NR Description: putative putative glucosyltransferase
  misc_feature (75)..(481): Homolog of NCBI NO: 37534766 NR Description: putative putative glucosyltransferase
  misc_feature (18)..(475): Homolog of NCBI NO: 15228063 NR Description: putative glucosyltransferase
  misc_feature (1)..(482): Homolog of NCBI NO: 15226332 NR Description: putative glucosyltransferase
  misc_feature (1)..(482): Homolog of NCBI NO: 21537408 NR Description: putative glucosyltransferase [Arabidopsis

SEQ ID NO: 32906 - protein, 353 aa, Arabidopsis thaliana; identical to SEQ ID NO: 29316
  peptide (1)..(353): Ceres Seq. ID no. 12321969
  misc_feature (1)..(343): Homolog of NCBI NO: 15219870 NR Description: UDP-glucose glucosyltransferase
  misc_feature (1)..(307): Homolog of NCBI NO: 19911203 NR Description: glucosyltransferase-10 [Vigna angularis]
  misc_feature (1)..(344): Homolog of NCBI NO: 15218268 NR Description: UDP-glucose glucosyltransferase, putative
  misc_feature (1)..(343): Homolog of NCBI NO: 15219876 NR Description: UDP-glucose glucosyltransferase, putative
  misc_feature (1)..(343): Homolog of NCBI NO: 25286821 NR Description: T16E15.2 protein - Arabidopsis thaliana
  misc_feature (1)..(350): Homolog of NCBI NO: 15219867 NR Description: UDP-glucose glucosyltransferase, putative
  misc_feature (1)..(352): Homolog of NCBI NO: 37534766 NR Description: putative putative glucosyltransferase
  misc_feature (1)..(346): Homolog of NCBI NO: 15228063 NR Description: putative glucosyltransferase
  misc_feature (1)..(353): Homolog of NCBI NO: 15226332 NR Description: putative glucosyltransferase
  misc_feature (1)..(353): Homolog of NCBI NO: 21537408 NR Description: putative glucosyltransferase [Arabidopsis

SEQ ID NO: 32907 - DNA, 1190 bp, Arabidopsis thaliana; identical to SEQ ID NO: 29317
  misc_feature (1)..(1190): Ceres Seq. ID no. 12562676
  misc_feature: MA Experiment ID: 108434 Result: Up-regulated in Transcription
  misc_feature: MA Experiment 108434 PARAMETER Experiment Name: At_Root_Tips_cDNA_P Parameter: Tissue Value: Root Tips
  misc_feature: MA Experiment ID: 108435 Result: Up-regulated in Transcription
  misc_feature: MA Experiment 108435 PARAMETER Experiment Name: At_stm_Mutants_cDNA_P Parameter: Plant Line Value: wt Landsburg vs stm
  misc_feature: MA Experiment 108435 PARAMETER Experiment Name: At_stm_Mutants_cDNA_P Parameter: Tissue Value: Shoot Apical Meristem Region
  misc_feature: MA Experiment ID: 108461 Result: Down-regulated in Transcription
  misc_feature: MA Experiment 108461 PARAMETER Experiment Name: At_Germinating_Seeds_cDNA_P Parameter: Age (day) Value: 1 vs. 0
  misc_feature: MA Experiment 108461 PARAMETER Experiment Name: At_Germinating_Seeds_cDNA_P Parameter: Tissue Value: Germinating Seeds
  misc_feature: MA Experiment ID: 108462 Result: Down-regulated in Transcription
  misc_feature: MA Experiment 108462 PARAMETER Experiment Name: At_Germinating_Seeds_cDNA_P Parameter: Age (day) Value: 2 vs. 0
  misc_feature: MA Experiment 108462 PARAMETER Experiment Name: At_Germinating_Seeds_cDNA_P Parameter: Tissue Value: Germinating Seeds
  misc_feature: MA Experiment ID: 108463 Result: Down-regulated in Transcription
  misc_feature: MA Experiment 108463 PARAMETER Experiment Name: At_Germinating_Seeds_cDNA_P Parameter: Age (day) Value: 3 vs. 0
  misc_feature: MA Experiment 108463 PARAMETER Experiment Name: At_Germinating_Seeds_cDNA_P Parameter: Tissue Value: Germinating Seeds
  misc_feature: MA Experiment ID: 108464 Result: Down-regulated in Transcription
  misc_feature: MA Experiment 108464 PARAMETER Experiment Name: At_Germinating_Seeds_cDNA_P Parameter: Age (day) Value: 4 vs. 0
  misc_feature: MA Experiment 108464 PARAMETER Experiment Name: At_Germinating_Seeds_cDNA_P Parameter: Tissue Value: Germinating Seeds
  misc_feature: MA Experiment ID: 20000180 Result: Down-regulated in Transcription
  misc_feature: MA Experiment 20000180 PARAMETER Experiment Name: At_Germinating_Seeds_P Parameter: Age (hr) Value: 24 vs. 0
  misc_feature: MA Experiment 20000180 PARAMETER Experiment Name: At_Germinating_Seeds_P Parameter: Tissue Value: Germinating Seeds
  misc_feature: MA Experiment ID: 20000214 Result: Down-regulated in Transcription
  misc_feature: MA Experiment 20000214 PARAMETER Experiment Name: At_4deg_Cold_P Parameter: Timepoint (hr) Value: 6
  misc_feature: MA Experiment ID: 20000224 Result: Down-regulated in Transcription
  misc_feature: MA Experiment ID: 20000307 Result: Down-regulated in Transcription
  misc_feature: MA Experiment 20000307 PARAMETER Experiment Name: At_Germinating_Seeds_Sub_P Parameter: Age (hr) Value: 24 vs. 0
  misc_feature: MA Experiment 20000307 PARAMETER Experiment Name: At_Germinating_Seeds_Sub_P Parameter: Organism Value: A. thaliana
  misc_feature: MA Experiment 20000307 PARAMETER Experiment Name: At_Germinating_Seeds_Sub_P Parameter: Plant Line Value: WS
  misc_feature: MA Experiment 20000307 PARAMETER Experiment Name: At_Germinating_Seeds_Sub_P Parameter: Tissue Value: Germinating Seeds
  misc_feature: MA Experiment ID: 20000328 Result: Up-regulated in Transcription
  misc_feature: MA Experiment 20000328 PARAMETER Experiment Name: At_42deg_Heat_Sub_P Parameter: Age (day) Value: 14
  misc_feature: MA Experiment 20000328 PARAMETER Experiment Name: At_42deg_Heat_Sub_P Parameter: Organism Value: A. thaliana
  misc_feature: MA Experiment 20000328 PARAMETER Experiment Name: At_42deg_Heat_Sub_P Parameter: Plant Line Value: WS
  misc_feature: MA Experiment 20000328 PARAMETER Experiment Name: At_42deg_Heat_Sub_P Parameter: Temperature (deg C) Value: 42 vs. 22
  misc_feature: MA Experiment 20000328 PARAMETER Experiment Name: At_42deg_Heat_Sub_P Parameter: Timepoint (hr) Value: 6
  misc_feature: MA Experiment 20000328 PARAMETER Experiment Name: At_42deg_Heat_Sub_P Parameter: Tissue Value: Aerial
  misc_feature: MA Experiment ID: 20001450 Result: Up-regulated in Transcription
  misc_feature: MA Experiment 20001450 PARAMETER Experiment Name: At_Far-red-induction_P Parameter: Age (day) Value: 7
  misc_feature: MA Experiment 20001450 PARAMETER Experiment Name: At_Far-red-induction_P Parameter: Light Value: Far-red vs. White
  misc_feature: MA Experiment 20001450 PARAMETER Experiment Name: At_Far-red-induction_P Parameter: Organism Value: A. thaliana
  misc_feature: MA Experiment 20001450 PARAMETER Experiment Name: At_Far-red-induction_P Parameter: Plant Line Value: Columbia
  misc_feature: MA Experiment 20001450 PARAMETER Experiment Name: At_Far-red-induction_P Parameter: Timepoint (hr) Value: 8
  misc_feature: MA Experiment 20001450 PARAMETER Experiment Name: At_Far-red-induction_P Parameter: Tissue Value: Whole Plant
  misc_feature: MA Experiment ID: 20001451 Result: Up-regulated in Transcription
  misc_feature: MA Experiment 20001451 PARAMETER Experiment Name: At_Far-red-induction_P Parameter: Age (day) Value: 7
  misc_feature: MA Experiment 20001451 PARAMETER Experiment Name: At_Far-red-induction_P Parameter: Light Value: Far-red vs. White
  misc_feature: MA Experiment 20001451 PARAMETER Experiment Name: At_Far-red-induction_P Parameter: Organism Value: A. thaliana
  misc_feature: MA Experiment 20001451 PARAMETER Experiment Name: At_Far-red-induction_P Parameter: Plant Line Value: Columbia
  misc_feature: MA Experiment 20001451 PARAMETER Experiment Name: At_Far-red-induction_P Parameter: Timepoint (hr) Value: 24
  misc_feature: MA Experiment 20001451 PARAMETER Experiment Name: At_Far-red-induction_P Parameter: Tissue Value: Whole Plant

SEQ ID NO: 32908 - protein, 307 aa, Arabidopsis thaliana; identical to SEQ ID NO: 29318
  peptide (1)..(307): Ceres Seq. ID no. 12562677
  misc_feature (9)..(77): Pfam Name: RNA recognition motif. (a.k.a. RRM, RBD, or RNP domain) Pfam Description: RNA recognition motif. (a.k.a. RRM, RBD, or RNP
  misc_feature (1)..(276): Homolog of NCBI NO: 22331714 NR Description: arginine/serine-rich splicing factor (atSRp34),
  misc_feature (1)..(307): Homolog of NCBI NO: 33146854 NR Description: putative pre-mRNA splicing factor SF2
  misc_feature (1)..(211): Homolog of NCBI NO: 5815238 NR Description: splicing factor SR1D [Arabidopsis thaliana]
  misc_feature (1)..(270): Homolog of NCBI NO: 2443473 NR Description: ASF/SF2 homolog [Arabidopsis thaliana]
  misc_feature (1)..(270): Homolog of NCBI NO: 5815239 NR Description: splicing factor SR1E [Arabidopsis thaliana]
  misc_feature (1)..(270): Homolog of NCBI NO: 5815237 NR Description: splicing factor SR1C [Arabidopsis thaliana]
  misc_feature (1)..(270): Homolog of NCBI NO: 5815236 NR Description: splicing factor SR1B [Arabidopsis thaliana]
  misc_feature (1)..(307): Homolog of NCBI NO: 2129717 NR Description: splicing factor SF-2 homolog - Arabidopsis
  misc_feature (1)..(307): Homolog of NCBI NO: 30678391 NR Description: pre-mRNA splicing factor SF2 (SR1 protein)
  misc_feature (1)..(307): Homolog of NCBI NO: 5815235 NR Description: splicing factor SR1 [Arabidopsis thaliana]

SEQ ID NO: 32909 - protein, 165 aa, Arabidopsis thaliana; identical to SEQ ID NO: 29319
  peptide (1)..(165): Ceres Seq. ID no. 12562678
  misc_feature (1)..(134): Homolog of NCBI NO: 22331714 NR Description: arginine/serine-rich splicing factor (atSRp34),
  misc_feature (1)..(165): Homolog of NCBI NO: 33146854 NR Description: putative pre-mRNA splicing factor SF2
  misc_feature (1)..(69): Homolog of NCBI NO: 5815238 NR Description: splicing factor SR1D [Arabidopsis thaliana]
  misc_feature (1)..(128): Homolog of NCBI NO: 2443473 NR Description: ASF/SF2 homolog [Arabidopsis thaliana]
  misc_feature (1)..(128): Homolog of NCBI NO: 5815237 NR Description: splicing factor SR1C [Arabidopsis thaliana]
  misc_feature (1)..(128): Homolog of NCBI NO: 5815239 NR Description: splicing factor SR1E [Arabidopsis thaliana]
  misc_feature (1)..(128): Homolog of NCBI NO: 5815236 NR Description: splicing factor SR1B [Arabidopsis thaliana]
  misc_feature (1)..(165): Homolog of NCBI NO: 2129717 NR Description: splicing factor SF-2 homolog - Arabidopsis
  misc_feature (1)..(165): Homolog of NCBI NO: 30678391 NR Description: pre-mRNA splicing factor SF2 (SR1 protein)
  misc_feature (1)..(165): Homolog of NCBI NO: 5815235 NR Description: splicing factor SR1 [Arabidopsis thaliana]

SEQ ID NO: 32910 - DNA, 1302 bp, Arabidopsis thaliana; identical to SEQ ID NO: 29320
  misc_feature (1)..(1302): Ceres Seq. ID no. 13622021
  misc_feature: MA Experiment ID: 20000180 Result: Up-regulated in Transcription
  misc_feature: MA Experiment 20000180 PARAMETER Experiment Name: At_Germinating_Seeds_P Parameter: Age (hr) Value: 24 vs. 0
  misc_feature: MA Experiment 20000180 PARAMETER Experiment Name: At_Germinating_Seeds_P Parameter: Tissue Value: Germinating Seeds
  misc_feature: MA Experiment ID: 20000182 Result: Up-regulated in Transcription
  misc_feature: MA Experiment 20000182 PARAMETER Experiment Name: At_2mM_SA_P Parameter: Age (day) Value: 14
  misc_feature: MA Experiment 20000182 PARAMETER Experiment Name: At_2mM_SA_P Parameter: Organism Value: A. thaliana
  misc_feature: MA Experiment 20000182 PARAMETER Experiment Name: At_2mM_SA_P Parameter: Plant Line Value: WS
  misc_feature: MA Experiment 20000182 PARAMETER Experiment Name: At_2mM_SA_P Parameter: Timepoint (hr) Value: 6
  misc_feature: MA Experiment 20000182 PARAMETER Experiment Name: At_2mM_SA_P Parameter: Tissue Value: Aerial
  misc_feature: MA Experiment 20000182 PARAMETER Experiment Name: At_2mM_SA_P Parameter: Treatment Value: 2mM SA vs. No Treatment
  misc_feature: MA Experiment ID: 20000227 Result: Up-regulated in Transcription
  misc_feature: MA Experiment 20000227 PARAMETER Experiment Name: At_Root-Tips-vs-Tops_P Parameter: Tissue Value: Root Tips vs. Root Tops
  misc_feature: MA Experiment ID: 20000234 Result: Up-regulated in Transcription
  misc_feature: MA Experiment 20000234 PARAMETER Experiment Name: At_Siliques_P Parameter: Age (day) Value: 21
  misc_feature: MA Experiment 20000234 PARAMETER Experiment Name: At_Siliques_P Parameter: Organism Value: A. thaliana
  misc_feature: MA Experiment 20000234 PARAMETER Experiment Name: At_Siliques_P Parameter: Plant Line Value: WS
  misc_feature: MA Experiment 20000234 PARAMETER Experiment Name: At_Siliques_P Parameter: Tissue Value: Less Than 5mm Siliques vs. Whole Plant
  misc_feature: MA Experiment ID: 20000495 Result: Up-regulated in Transcription
  misc_feature: MA Experiment 20000495 PARAMETER Experiment Name: At_Guard_Cells_P Parameter: Harvest Date Value: 8/2/2002
  misc_feature: MA Experiment 20000495 PARAMETER Experiment Name: At_Guard_Cells_P Parameter: Organism Value: A. thaliana
  misc_feature: MA Experiment 20000495 PARAMETER Experiment Name: At_Guard_Cells_P Parameter: Tissue Value: Guard Cells vs. Leaves

SEQ ID NO: 32911 - protein, 361 aa, Arabidopsis thaliana; identical to SEQ ID NO: 29321
  peptide (1)..(361): Ceres Seq. ID no. 13622022
  misc_feature (17)..(358): Homolog of NCBI NO: 2501210 NR Description: PUTATIVE DISULFIDE ISOMERASE TIGA PRECURSOR
  misc_feature (10)..(358): Homolog of NCBI NO: 19114496 NR Description: putative protein disulfide isomerase (EC 5.3.4.1)
  misc_feature (165)..(361): Homolog of NCBI NO: 10180029 NR Description: putative protein disulfide-isomerase [Prunus
  misc_feature (13)..(357): Homolog of NCBI NO: 2627440 NR Description: protein disulfide isomerase; PDI; P5-like
  misc_feature (13)..(357): Homolog of NCBI NO: 28829383 NR Description: similar to Dictyostelium discoideum (Slime mold).
  misc_feature (14)..(357): Homolog of NCBI NO: 34897646 NR Description: putative disulfide-isomerase precursor [Oryza
  misc_feature (10)..(357): Homolog of NCBI NO: 34894982 NR Description: putative protein disulfide isomerase
  misc_feature (1)..(357): Homolog of NCBI NO: 7489183 NR Description: probable protein disulfide-isomerase (EC 5.3.4.1)
  misc_feature (1)..(357): Homolog of NCBI NO: 729442 NR Description: PROBABLE PROTEIN DISULFIDE ISOMERASE P5 PRECURSOR
  misc_feature (1)..(361): Homolog of NCBI NO: 15226610 NR Description: protein disulfide isomerase family [Arabidopsis

SEQ ID NO: 32912 - DNA, 1522 bp, Arabidopsis thaliana; identical to SEQ ID NO: 29322
  misc_feature (1)..(1522): Ceres Seq. ID no. 13621932
  misc_feature: MA Experiment ID: 108434 Result: Up-regulated in Transcription
  misc_feature: MA Experiment 108434 PARAMETER Experiment Name: At_Root_Tips_cDNA_P Parameter: Tissue Value: Root Tips
  misc_feature: MA Experiment ID: 108461 Result: Up-regulated in Transcription
  misc_feature: MA Experiment 108461 PARAMETER Experiment Name: At_Germinating_Seeds_cDNA_P Parameter: Age (day) Value: 1 vs. 0
  misc_feature: MA Experiment 108461 PARAMETER Experiment Name: At_Germinating_Seeds_cDNA_P Parameter: Tissue Value: Germinating Seeds
  misc_feature: MA Experiment ID: 108462 Result: Up-regulated in Transcription
  misc_feature: MA Experiment 108462 PARAMETER Experiment Name: At_Germinating_Seeds_cDNA_P Parameter: Age (day) Value: 2 vs. 0
  misc_feature: MA Experiment 108462 PARAMETER Experiment Name: At_Germinating_Seeds_cDNA_P Parameter: Tissue Value: Germinating Seeds
  misc_feature: MA Experiment ID: 108473 Result: Down-regulated in Transcription
  misc_feature: MA Experiment 108473 PARAMETER Experiment Name: At_Drought_Flowers_cDNA_P Parameter: Timepoint (hr) Value: 7 d
  misc_feature: MA Experiment 108473 PARAMETER Experiment Name: At_Drought_Flowers_cDNA_P Parameter: Tissue Value: Flower
  misc_feature: MA Experiment 108473 PARAMETER Experiment Name: At_Drought_Flowers_cDNA_P Parameter: Treatment Value: Drought vs. No Drought
  misc_feature: MA Experiment ID: 108489 Result: Down-regulated in Transcription
  misc_feature: MA Experiment ID: 108561 Result: Down-regulated in Transcription
  misc_feature: MA Experiment 108561 PARAMETER Experiment Name: At_100uM_ABA_cDNA_P Parameter: Timepoint (hr) Value: 6
  misc_feature: MA Experiment 108561 PARAMETER Experiment Name: At_100uM_ABA_cDNA_P Parameter: Tissue Value: Aerial
  misc_feature: MA Experiment 108561 PARAMETER Experiment Name: At_100uM_ABA_cDNA_P Parameter: Treatment Value: 100uM ABA vs. No Treatment
  misc_feature: MA Experiment ID: 108569 Result: Up-regulated in Transcription
  misc_feature: MA Experiment 108569 PARAMETER Experiment Name: At_0.001%_MeJA__cDNA_P Parameter: Timepoint (hr) Value: 6
  misc_feature: MA Experiment 108569 PARAMETER Experiment Name: At_0.001%_MeJA__cDNA_P Parameter: Tissue Value: Aerial
  misc_feature: MA Experiment 108569 PARAMETER Experiment Name: At_0.001%_MeJA__cDNA_P Parameter: Treatment Value: 0.001% MeJA vs. No Treatment
  misc_feature: MA Experiment ID: 108573 Result: Down-regulated in Transcription
  misc_feature: MA Experiment 108573 PARAMETER Experiment Name: At_Drought_cDNA_P Parameter: Timepoint (hr) Value: 6
  misc_feature: MA Experiment 108573 PARAMETER Experiment Name: At_Drought_cDNA_P Parameter: Tissue Value: Aerial
  misc_feature: MA Experiment 108573 PARAMETER Experiment Name: At_Drought_cDNA_P Parameter: Treatment Value: Drought vs. No Drought
  misc_feature: MA Experiment ID: 108574 Result: Up-regulated in Transcription
  misc_feature: MA Experiment 108574 PARAMETER Experiment Name: At_Wounding__cDNA_P Parameter: Timepoint (hr) Value: 1
  misc_feature: MA Experiment 108574 PARAMETER Experiment Name: At_Wounding__cDNA_P Parameter: Tissue Value: Aerial
  misc_feature: MA Experiment 108574 PARAMETER Experiment Name: At_Wounding__cDNA_P Parameter: Treatment Value: Wounding vs. No Wounding
  misc_feature: MA Experiment ID: 108576 Result: Down-regulated in Transcription
  misc_feature: MA Experiment 108576 PARAMETER Experiment Name: At_42deg_Heat_cDNA_P Parameter: Temperature (deg C) Value: 42 vs. 22
  misc_feature: MA Experiment 108576 PARAMETER Experiment Name: At_42deg_Heat_cDNA_P Parameter: Timepoint (hr) Value: 1
  misc_feature: MA Experiment 108576 PARAMETER Experiment Name: At_42deg_Heat_cDNA_P Parameter: Tissue Value: Aerial
  misc_feature: MA Experiment ID: 108579 Result: Up-regulated in Transcription
  misc_feature: MA Experiment 108579 PARAMETER Experiment Name: At_4deg_Cold_cDNA_P Parameter: Temperature (deg C) Value: 4 vs. 22
  misc_feature: MA Experiment 108579 PARAMETER Experiment Name: At_4deg_Cold_cDNA_P Parameter: Timepoint (hr) Value: 6
  misc_feature: MA Experiment 108579 PARAMETER Experiment Name: At_4deg_Cold_cDNA_P Parameter: Tissue Value: Aerial
  misc_feature: MA Experiment ID: 108585 Result: Down-regulated in Transcription
  misc_feature: MA Experiment 108585 PARAMETER Experiment Name: At_5mM_NaNP_cDNA_P Parameter: Timepoint (hr) Value: 6
  misc_feature: MA Experiment 108585 PARAMETER Experiment Name: At_5mM_NaNP_cDNA_P Parameter: Tissue Value: Aerial
  misc_feature: MA Experiment 108585 PARAMETER Experiment Name: At_5mM_NaNP_cDNA_P Parameter: Treatment Value: null
  misc_feature: MA Experiment ID: 20000111 Result: Down-regulated in Transcription
  misc_feature: MA Experiment 20000111 PARAMETER Experiment Name: At_42deg_Heat_cDNA_P Parameter: Temperature (deg C) Value: 42 vs. 22
  misc_feature: MA Experiment 20000111 PARAMETER Experiment Name: At_42deg_Heat_cDNA_P Parameter: Timepoint (hr) Value: 6
  misc_feature: MA Experiment 20000111 PARAMETER Experiment Name: At_42deg_Heat_cDNA_P Parameter: Tissue Value: Aerial
  misc_feature: MA Experiment ID: 20000113 Result: Down-regulated in Transcription
  misc_feature: MA Experiment 20000113 PARAMETER Experiment Name: At_42deg_Heat_cDNA_P Parameter: Temperature (deg C) Value: 42 vs. 22
  misc_feature: MA Experiment 20000113 PARAMETER Experiment Name: At_42deg_Heat_cDNA_P Parameter: Timepoint (hr) Value: 8
  misc_feature: MA Experiment 20000113 PARAMETER Experiment Name: At_42deg_Heat_cDNA_P Parameter: Tissue Value: Aerial
  misc_feature: MA Experiment ID: 20000171 Result: Down-regulated in Transcription
  misc_feature: MA Experiment 20000171 PARAMETER Experiment Name: At_42deg_Heat_P Parameter: Age (day) Value: 14
  misc_feature: MA Experiment 20000171 PARAMETER Experiment Name: At_42deg_Heat_P Parameter: Organism Value: A. thaliana
  misc_feature: MA Experiment 20000171 PARAMETER Experiment Name: At_42deg_Heat_P Parameter: Plant Line Value: WS
  misc_feature: MA Experiment 20000171 PARAMETER Experiment Name: At_42deg_Heat_P Parameter: Temperature (deg C) Value: 42 vs. 22
  misc_feature: MA Experiment 20000171 PARAMETER Experiment Name: At_42deg_Heat_P Parameter: Timepoint (hr) Value: 1
  misc_feature: MA Experiment 20000171 PARAMETER Experiment Name: At_42deg_Heat_P Parameter: Tissue Value: Aerial
  misc_feature: MA Experiment ID: 20000173 Result: Down-regulated in Transcription
  misc_feature: MA Experiment 20000173 PARAMETER Experiment Name: At_42deg_Heat_P Parameter: Age (day) Value: 14
  misc_feature: MA Experiment 20000173 PARAMETER Experiment Name: At_42deg_Heat_P Parameter: Organism Value: A. thaliana
  misc_feature: MA Experiment 20000173 PARAMETER Experiment Name: At_42deg_Heat_P Parameter: Plant Line Value: WS
  misc_feature: MA Experiment 20000173 PARAMETER Experiment Name: At_42deg_Heat_P Parameter: Temperature (deg C) Value: 42 vs. 22
  misc_feature: MA Experiment 20000173 PARAMETER Experiment Name: At_42deg_Heat_P Parameter: Timepoint (hr) Value: 6
  misc_feature: MA Experiment 20000173 PARAMETER Experiment Name: At_42deg_Heat_P Parameter: Tissue Value: Aerial
  misc_feature: MA Experiment ID: 20000180 Result: Up-regulated in Transcription
  misc_feature: MA Experiment 20000180 PARAMETER Experiment Name: At_Germinating_Seeds_P Parameter: Age (hr) Value: 24 vs. 0
  misc_feature: MA Experiment 20000180 PARAMETER Experiment Name: At_Germinating_Seeds_P Parameter: Tissue Value: Germinating Seeds
  misc_feature: MA Experiment ID: 20000234 Result: Up-regulated in Transcription
  misc_feature: MA Experiment 20000234 PARAMETER Experiment Name: At_Siliques_P Parameter: Age (day) Value: 21
  misc_feature: MA Experiment 20000234 PARAMETER Experiment Name: At_Siliques_P Parameter: Organism Value: A. thaliana
  misc_feature: MA Experiment 20000234 PARAMETER Experiment Name: At_Siliques_P Parameter: Plant Line Value: WS
  misc_feature: MA Experiment 20000234 PARAMETER Experiment Name: At_Siliques_P Parameter: Tissue Value: Less Than 5mm Siliques vs. Whole Plant
  misc_feature: MA Experiment ID: 20000264 Result: Up-regulated in Transcription
  misc_feature: MA Experiment 20000264 PARAMETER Experiment Name: At_Open_Flower_P Parameter: Age (day) Value: 21
  misc_feature: MA Experiment 20000264 PARAMETER Experiment Name: At_Open_Flower_P Parameter: Plant Line Value: WS
  misc_feature: MA Experiment 20000264 PARAMETER Experiment Name: At_Open_Flower_P Parameter: Tissue Value: Open Flower vs. Whole Plant
  misc_feature: MA Experiment ID: 20000265 Result: Up-regulated in Transcription
  misc_feature: MA Experiment 20000265 PARAMETER Experiment Name: At_Open_Flower_P Parameter: Age (day) Value: 21
  misc_feature: MA Experiment 20000265 PARAMETER Experiment Name: At_Open_Flower_P Parameter: Plant Line Value: WS
  misc_feature: MA Experiment 20000265 PARAMETER Experiment Name: At_Open_Flower_P Parameter: Tissue Value: Closed Flower vs. Whole Plant
  misc_feature: MA Experiment ID: 20000286 Result: Up-regulated in Transcription
  misc_feature: MA Experiment 20000286 PARAMETER Experiment Name: At_Open_Flower_P Parameter: Age (day) Value: 21
  misc_feature: MA Experiment 20000286 PARAMETER Experiment Name: At_Open_Flower_P Parameter: Plant Line Value: WS
  misc_feature: MA Experiment 20000286 PARAMETER Experiment Name: At_Open_Flower_P Parameter: Tissue Value: Half Open vs. Whole Plant
  misc_feature: MA Experiment ID: 20000438 Result: Up-regulated in Transcription
  misc_feature: MA Experiment 20000438 PARAMETER Experiment Name: At_Shoots__P Parameter: Age (day) Value: 14
  misc_feature: MA Experiment 20000438 PARAMETER Experiment Name: At_Shoots__P Parameter: Tissue Value: Shoots vs. Whole Plant
  misc_feature: MA Experiment ID: 20000452 Result: Up-regulated in Transcription
  misc_feature: MA Experiment 20000452 PARAMETER Experiment Name: At_CS6879_Shoots-Roots_P Parameter: Age (day) Value: 14
  misc_feature: MA Experiment 20000452 PARAMETER Experiment Name: At_CS6879_Shoots-Roots_P Parameter: Organism Value: A. thaliana
  misc_feature: MA Experiment 20000452 PARAMETER Experiment Name: At_CS6879_Shoots-Roots_P Parameter: Plant Line Value: CS6879 vs. WS
  misc_feature: MA Experiment 20000452 PARAMETER Experiment Name: At_CS6879_Shoots-Roots_P Parameter: Tissue Value: Shoots
  misc_feature: MA Experiment ID: 20000573 Result: Down-regulated in Transcription
  misc_feature: MA Experiment 20000573 PARAMETER Experiment Name: At_100uM_ABA_Mutants__P Parameter: Organism Value: A. thaliana
  misc_feature: MA Experiment 20000573 PARAMETER Experiment Name: At_100uM_ABA_Mutants__P Parameter: Plant Line Value: CS22 vs. Ler wt
  misc_feature: MA Experiment 20000573 PARAMETER Experiment Name: At_100uM_ABA_Mutants__P Parameter: Timepoint (hr) Value: N/A
  misc_feature: MA Experiment 20000573 PARAMETER Experiment Name: At_100uM_ABA_Mutants__P Parameter: Tissue Value: Whole Plant
  misc_feature: MA Experiment 20000573 PARAMETER Experiment Name: At_100uM_ABA_Mutants__P Parameter: Treatment Value: None
  misc_feature: MA Experiment ID: 20000574 Result: Down-regulated in Transcription
  misc_feature: MA Experiment 20000574 PARAMETER Experiment Name: At_100uM_ABA_Mutants__P Parameter: Organism Value: A. thaliana
  misc_feature: MA Experiment 20000574 PARAMETER Experiment Name: At_100uM_ABA_Mutants__P Parameter: Plant Line Value: CS23 vs. Ler wt
  misc_feature: MA Experiment 20000574 PARAMETER Experiment Name: At_100uM_ABA_Mutants__P Parameter: Timepoint (hr) Value: N/A
  misc_feature: MA Experiment 20000574 PARAMETER Experiment Name: At_100uM_ABA_Mutants__P Parameter: Tissue Value: Whole Plant
  misc_feature: MA Experiment 20000574 PARAMETER Experiment Name: At_100uM_ABA_Mutants__P Parameter: Treatment Value: None
  misc_feature: MA Experiment ID: 20000794 Result: Up-regulated in Transcription
  misc_feature: MA Experiment 20000794 PARAMETER Experiment Name: At_Petals_P Parameter: Age (day) Value: 23-25 days
  misc_feature: MA Experiment 20000794 PARAMETER Experiment Name: At_Petals_P Parameter: Plant Line Value: WS
  misc_feature: MA Experiment 20000794 PARAMETER Experiment Name: At_Petals_P Parameter: Tissue Value: Petals vs. Whole plant
  misc_feature: MA Experiment ID: 20001247 Result: Down-regulated in Transcription
  misc_feature: MA Experiment 20001247 PARAMETER Experiment Name: At_Far-red-induction_P Parameter: Age (day) Value: 7
  misc_feature: MA Experiment 20001247 PARAMETER Experiment Name: At_Far-red-induction_P Parameter: Light Value: Far-red vs. White
  misc_feature: MA Experiment 20001247 PARAMETER Experiment Name: At_Far-red-induction_P Parameter: Organism Value: A. thaliana
  misc_feature: MA Experiment 20001247 PARAMETER Experiment Name: At_Far-red-induction_P Parameter: Plant Line Value: Columbia
  misc_feature: MA Experiment 20001247 PARAMETER Experiment Name: At_Far-red-induction_P Parameter: Timepoint (hr) Value: 1
  misc_feature: MA Experiment 20001247 PARAMETER Experiment Name: At_Far-red-induction_P Parameter: Tissue Value: Whole Plant
  misc_feature: MA Experiment ID: 20001248 Result: Down-regulated in Transcription
  misc_feature: MA Experiment 20001248 PARAMETER Experiment Name: At_Far-red-induction_P Parameter: Age (day) Value: 7
  misc_feature: MA Experiment 20001248 PARAMETER Experiment Name: At_Far-red-induction_P Parameter: Light Value: Far-red vs. White
  misc_feature: MA Experiment 20001248 PARAMETER Experiment Name: At_Far-red-induction_P Parameter: Organism Value: A. thaliana
  misc_feature: MA Experiment 20001248 PARAMETER Experiment Name: At_Far-red-induction_P Parameter: Plant Line Value: Columbia
  misc_feature: MA Experiment 20001248 PARAMETER Experiment Name: At_Far-red-induction_P Parameter: Timepoint (hr) Value: 4
  misc_feature: MA Experiment 20001248 PARAMETER Experiment Name: At_Far-red-induction_P Parameter: Tissue Value: Whole Plant
  misc_feature: MA Experiment ID: 20001450 Result: Down-regulated in Transcription
  misc_feature: MA Experiment 20001450 PARAMETER Experiment Name: At_Far-red-induction_P Parameter: Age (day) Value: 7
  misc_feature: MA Experiment 20001450 PARAMETER Experiment Name: At_Far-red-induction_P Parameter: Light Value: Far-red vs. White
  misc_feature: MA Experiment 20001450 PARAMETER Experiment Name: At_Far-red-induction_P Parameter: Organism Value: A. thaliana
  misc_feature: MA Experiment 20001450 PARAMETER Experiment Name: At_Far-red-induction_P Parameter: Plant Line Value: Columbia
  misc_feature: MA Experiment 20001450 PARAMETER Experiment Name: At_Far-red-induction_P Parameter: Timepoint (hr) Value: 8
  misc_feature: MA Experiment 20001450 PARAMETER Experiment Name: At_Far-red-induction_P Parameter: Tissue Value: Whole Plant
  misc_feature: MA Experiment ID: 20001558 Result: Down-regulated in Transcription
  misc_feature: MA Experiment 20001558 PARAMETER Experiment Name: At_Drought_Soil_Dry_P Parameter: Age (day) Value: 27
  misc_feature: MA Experiment 20001558 PARAMETER Experiment Name: At_Drought_Soil_Dry_P Parameter: Organism Value: A. thaliana
  misc_feature: MA Experiment 20001558 PARAMETER Experiment Name: At_Drought_Soil_Dry_P Parameter: Plant Line Value: WS
  misc_feature: MA Experiment 20001558 PARAMETER Experiment Name: At_Drought_Soil_Dry_P Parameter: Post Timepoint (hr) Value: 6
  misc_feature: MA Experiment 20001558 PARAMETER Experiment Name: At_Drought_Soil_Dry_P Parameter: Post-Treatment Value: Re-Water vs. No Drought
  misc_feature: MA Experiment 20001558 PARAMETER Experiment Name: At_Drought_Soil_Dry_P Parameter: Timepoint (day) Value: 13
  misc_feature: MA Experiment 20001558 PARAMETER Experiment Name: At_Drought_Soil_Dry_P Parameter: Treatment Value: Drought vs. No Drought
  misc_feature: MA Experiment ID: 20001757 Result: Down-regulated in Transcription
  misc_feature: MA Experiment 20001757 PARAMETER Experiment Name: At_50mM_NH4NO3_L-to-H_P Parameter: Timepoint (hr) Value: 6
  misc_feature: MA Experiment 20001757 PARAMETER Experiment Name: At_50mM_NH4NO3_L-to-H_P Parameter: Tissue Value: Leaf
  misc_feature: MA Experiment 20001757 PARAMETER Experiment Name: At_50mM_NH4NO3_L-to-H_P Parameter: Treatment Value: 50mM NH4NO3 vs 100mM Mannitol

SEQ ID NO: 32913 - protein, 414 aa, Arabidopsis thaliana; identical to SEQ ID NO: 29323
  peptide (1)..(414): Ceres Seq. ID no. 13621933
  misc_feature (5)..(265): Pfam Name: Thiolase, N-terminal domain Pfam Description: Thiolase, N-terminal domain
  misc_feature (1)..(407): Homolog of NCBI NO: 21537268 NR Description: putative acetyl-CoA acyltransferase [Arabidopsis
  misc_feature (4)..(414): Homolog of NCBI NO: 7433644 NR Description: acetyl-CoA C-acyltransferase (EC 2.3.1.16)
  misc_feature (1)..(407): Homolog of NCBI NO: 15219797 NR Description: acetyl-CoA C-acyltransferase (3-ketoacyl-CoA
  misc_feature (4)..(407): Homolog of NCBI NO: 15225798 NR Description: acetyl-CoA C-acyltransferase (3-ketoacyl-CoA
  misc_feature (2)..(407): Homolog of NCBI NO: 29367431 NR Description: 3-ketoacyl-CoA thiolase-like protein
  misc_feature (2)..(411): Homolog of NCBI NO: 421810 NR Description: acetyl-CoA C-acyltransferase (EC 2.3.1.16)
  misc_feature (2)..(411): Homolog of NCBI NO: 7433647 NR Description: acetyl-CoA C-acyltransferase (EC 2.3.1.16)
  misc_feature (2)..(411): Homolog of NCBI NO: 393707 NR Description: 3-ketoacyl-CoA thiolase; acetyl-CoA
  misc_feature (1)..(414): Homolog of NCBI NO: 30695561 NR Description: acetyl-CoA C-acyltransferase 1 (3-ketoacyl-CoA
  misc_feature (1)..(414): Homolog of NCBI NO: 30695564 NR Description: acetyl-CoA C-acyltransferase 1 (3-ketoacyl-CoA

SEQ ID NO: 32914 - protein, 345 aa, Arabidopsis thaliana; identical to SEQ ID NO: 29324
  peptide (1)..(345): Ceres Seq. ID no. 13621934
  misc_feature (1)..(196): Pfam Name: Thiolase, N-terminal domain Pfam Description: Thiolase, N-terminal domain
  misc_feature (1)..(338): Homolog of NCBI NO: 21537268 NR Description: putative acetyl-CoA acyltransferase [Arabidopsis
  misc_feature (1)..(345): Homolog of NCBI NO: 7433644 NR Description: acetyl-CoA C-acyltransferase (EC 2.3.1.16)
  misc_feature (1)..(338): Homolog of NCBI NO: 15219797 NR Description: acetyl-CoA C-acyltransferase (3-ketoacyl-CoA
  misc_feature (1)..(338): Homolog of NCBI NO: 15225798 NR Description: acetyl-CoA C-acyltransferase (3-ketoacyl-CoA
  misc_feature (1)..(338): Homolog of NCBI NO: 29367431 NR Description: 3-ketoacyl-CoA thiolase-like protein
  misc_feature (1)..(342): Homolog of NCBI NO: 421810 NR Description: acetyl-CoA C-acyltransferase (EC 2.3.1.16)
  misc_feature (1)..(342): Homolog of NCBI NO: 7433647 NR Description: acetyl-CoA C-acyltransferase (EC 2.3.1.16)
  misc_feature (1)..(342): Homolog of NCBI NO: 393707 NR Description: 3-ketoacyl-CoA thiolase; acetyl-CoA
  misc_feature (1)..(345): Homolog of NCBI NO: 30695561 NR Description: acetyl-CoA C-acyltransferase 1 (3-ketoacyl-CoA
  misc_feature (1)..(345): Homolog of NCBI NO: 30695564 NR Description: acetyl-CoA C-acyltransferase 1 (3-ketoacyl-CoA

SEQ ID NO: 32915 - protein, 291 aa, Arabidopsis thaliana; identical to SEQ ID NO: 29325
  peptide (1)..(291): Ceres Seq. ID no. 13621935
  misc_feature (1)..(142): Pfam Name: Thiolase, N-terminal domain Pfam Description: Thiolase, N-terminal domain
  misc_feature (1)..(284): Homolog of NCBI NO: 21537268 NR Description: putative acetyl-CoA acyltransferase [Arabidopsis
  misc_feature (1)..(291): Homolog of NCBI NO: 7433644 NR Description: acetyl-CoA C-acyltransferase (EC 2.3.1.16)
  misc_feature (1)..(284): Homolog of NCBI NO: 15219797 NR Description: acetyl-CoA C-acyltransferase (3-ketoacyl-CoA
  misc_feature (1)..(284): Homolog of NCBI NO: 15225798 NR Description: acetyl-CoA C-acyltransferase (3-ketoacyl-CoA
  misc_feature (1)..(284): Homolog of NCBI NO: 29367431 NR Description: 3-ketoacyl-CoA thiolase-like protein
  misc_feature (1)..(288): Homolog of NCBI NO: 421810 NR Description: acetyl-CoA C-acyltransferase (EC 2.3.1.16)
  misc_feature (1)..(288): Homolog of NCBI NO: 7433647 NR Description: acetyl-CoA C-acyltransferase (EC 2.3.1.16)
  misc_feature (1)..(288): Homolog of NCBI NO: 393707 NR Description: 3-ketoacyl-CoA thiolase; acetyl-CoA
  misc_feature (1)..(291): Homolog of NCBI NO: 30695561 NR Description: acetyl-CoA C-acyltransferase 1 (3-ketoacyl-CoA
  misc_feature (1)..(291): Homolog of NCBI NO: 30695564 NR Description: acetyl-CoA C-acyltransferase 1 (3-ketoacyl-CoA

SEQ ID NO: 32916 - DNA, 903 bp, Arabidopsis thaliana; identical to SEQ ID NO: 29326
  misc_feature (1)..(903): Ceres Seq. ID no. 12348734
  misc_feature: MA Experiment ID: 108463 Result: Up-regulated in Transcription
  misc_feature: MA Experiment 108463 PARAMETER Experiment Name: At_Germinating_Seeds_cDNA_P Parameter: Age (day) Value: 3 vs. 0
  misc_feature: MA Experiment 108463 PARAMETER Experiment Name: At_Germinating_Seeds_cDNA_P Parameter: Tissue Value: Germinating Seeds
  misc_feature: MA Experiment ID: 108464 Result: Up-regulated in Transcription
  misc_feature: MA Experiment 108464 PARAMETER Experiment Name: At_Germinating_Seeds_cDNA_P Parameter: Age (day) Value: 4 vs. 0
  misc_feature: MA Experiment 108464 PARAMETER Experiment Name: At_Germinating_Seeds_cDNA_P Parameter: Tissue Value: Germinating Seeds
  misc_feature: MA Experiment ID: 108572 Result: Up-regulated in Transcription
  misc_feature: MA Experiment 108572 PARAMETER Experiment Name: At_Drought_cDNA_P Parameter: Timepoint (hr) Value: 1
  misc_feature: MA Experiment 108572 PARAMETER Experiment Name: At_Drought_cDNA_P Parameter: Tissue Value: Aerial
  misc_feature: MA Experiment 108572 PARAMETER Experiment Name: At_Drought_cDNA_P Parameter: Treatment Value: Drought vs. No Drought
  misc_feature: MA Experiment ID: 108594 Result: Down-regulated in Transcription
  misc_feature: MA Experiment 108594 PARAMETER Experiment Name: At_Ler-rhl_Root_cDNA_P Parameter: Plant Line Value: null
  misc_feature: MA Experiment ID: 20000068 Result: Up-regulated in Transcription
  misc_feature: MA Experiment ID: 20000070 Result: Up-regulated in Transcription
  misc_feature: MA Experiment 20000070 PARAMETER Experiment Name: At_100uM_ABA_Mutants_cDNA_P Parameter: Plant Line Value: CS24
  misc_feature: MA Experiment 20000070 PARAMETER Experiment Name: At_100uM_ABA_Mutants_cDNA_P Parameter: Timepoint (hr) Value: 6
  misc_feature: MA Experiment 20000070 PARAMETER Experiment Name: At_100uM_ABA_Mutants_cDNA_P Parameter: Tissue Value: Aerial
  misc_feature: MA Experiment 20000070 PARAMETER Experiment Name: At_100uM_ABA_Mutants_cDNA_P Parameter: Treatment Value: 100uM ABA vs. No Treatment
  misc_feature: MA Experiment ID: 20000182 Result: Up-regulated in Transcription
  misc_feature: MA Experiment 20000182 PARAMETER Experiment Name: At_2mM_SA_P Parameter: Age (day) Value: 14
  misc_feature: MA Experiment 20000182 PARAMETER Experiment Name: At_2mM_SA_P Parameter: Organism Value: A. thaliana
  misc_feature: MA Experiment 20000182 PARAMETER Experiment Name: At_2mM_SA_P Parameter: Plant Line Value: WS
  misc_feature: MA Experiment 20000182 PARAMETER Experiment Name: At_2mM_SA_P Parameter: Timepoint (hr) Value: 6
  misc_feature: MA Experiment 20000182 PARAMETER Experiment Name: At_2mM_SA_P Parameter: Tissue Value: Aerial
  misc_feature: MA Experiment 20000182 PARAMETER Experiment Name: At_2mM_SA_P Parameter: Treatment Value: 2mM SA vs. No Treatment
  misc_feature: MA Experiment ID: 20000227 Result: Down-regulated in Transcription
  misc_feature: MA Experiment 20000227 PARAMETER Experiment Name: At_Root-Tips-vs-Tops_P Parameter: Tissue Value: Root Tips vs. Root Tops
  misc_feature: MA Experiment ID: 20000235 Result: Down-regulated in Transcription
  misc_feature: MA Experiment 20000235 PARAMETER Experiment Name: At_Siliques_P Parameter: Age (day) Value: 21
  misc_feature: MA Experiment 20000235 PARAMETER Experiment Name: At_Siliques_P Parameter: Organism Value: A. thaliana
  misc_feature: MA Experiment 20000235 PARAMETER Experiment Name: At_Siliques_P Parameter: Plant Line Value: WS
  misc_feature: MA Experiment 20000235 PARAMETER Experiment Name: At_Siliques_P Parameter: Tissue Value: 5-10mm Siliques vs. Whole Plant
  misc_feature: MA Experiment ID: 20000308 Result: Up-regulated in Transcription
  misc_feature: MA Experiment 20000308 PARAMETER Experiment Name: At_100mM_NaCl__P Parameter: Age (day) Value: 17
  misc_feature: MA Experiment 20000308 PARAMETER Experiment Name: At_100mM_NaCl__P Parameter: Organism Value: A. thaliana
  misc_feature: MA Experiment 20000308 PARAMETER Experiment Name: At_100mM_NaCl__P Parameter: Plant Line Value: WS
  misc_feature: MA Experiment 20000308 PARAMETER Experiment Name: At_100mM_NaCl__P Parameter: Timepoint (hr) Value: 72
  misc_feature: MA Experiment 20000308 PARAMETER Experiment Name: At_100mM_NaCl__P Parameter: Tissue Value: Whole Plant
  misc_feature: MA Experiment 20000308 PARAMETER Experiment Name: At_100mM_NaCl__P Parameter: Treatment Value: 100mM NaCl vs. No Treatment
  misc_feature: MA Experiment ID: 20000436 Result: Up-regulated in Transcription
  misc_feature: MA Experiment 20000436 PARAMETER Experiment Name: At_Drought_P Parameter: Age (day) Value: 7
  misc_feature: MA Experiment 20000436 PARAMETER Experiment Name: At_Drought_P Parameter: Organism Value: A. thaliana
  misc_feature: MA Experiment 20000436 PARAMETER Experiment Name: At_Drought_P Parameter: Plant Line Value: WS
  misc_feature: MA Experiment 20000436 PARAMETER Experiment Name: At_Drought_P Parameter: Timepoint (hr) Value: 12
  misc_feature: MA Experiment 20000436 PARAMETER Experiment Name: At_Drought_P Parameter: Tissue Value: Whole Plant
  misc_feature: MA Experiment 20000436 PARAMETER Experiment Name: At_Drought_P Parameter: Treatment Value: Drought vs. No Drought
  misc_feature: MA Experiment ID: 20000439 Result: Up-regulated in Transcription
  misc_feature: MA Experiment 20000439 PARAMETER Experiment Name: At_Roots__P Parameter: Age (day) Value: 14 vs. 21
  misc_feature: MA Experiment 20000439 PARAMETER Experiment Name: At_Roots__P Parameter: Organism Value: A. thaliana
  misc_feature: MA Experiment 20000439 PARAMETER Experiment Name: At_Roots__P Parameter: Tissue Value: Roots vs. Whole Plant
  misc_feature: MA Experiment ID: 20000453 Result: Up-regulated in Transcription
  misc_feature: MA Experiment 20000453 PARAMETER Experiment Name: At_100uM_ABA_P Parameter: Age (day) Value: 15
  misc_feature: MA Experiment 20000453 PARAMETER Experiment Name: At_100uM_ABA_P Parameter: Organism Value: A. thaliana
  misc_feature: MA Experiment 20000453 PARAMETER Experiment Name: At_100uM_ABA_P Parameter: Plant Line Value: WS
  misc_feature: MA Experiment 20000453 PARAMETER Experiment Name: At_100uM_ABA_P Parameter: Timepoint (hr) Value: 24
  misc_feature: MA Experiment 20000453 PARAMETER Experiment Name: At_100uM_ABA_P Parameter: Tissue Value: Aerial
  misc_feature: MA Experiment 20000453 PARAMETER Experiment Name: At_100uM_ABA_P Parameter: Treatment Value: 100uM ABA vs. No Treatment
  misc_feature: MA Experiment ID: 20000527 Result: Down-regulated in Transcription
  misc_feature: MA Experiment 20000527 PARAMETER Experiment Name: At_10percent_PEG_P Parameter: Age (day) Value: 20
  misc_feature: MA Experiment 20000527 PARAMETER Experiment Name: At_10percent_PEG_P Parameter: Organism Value: A. thaliana
  misc_feature: MA Experiment 20000527 PARAMETER Experiment Name: At_10percent_PEG_P Parameter: Plant Line Value: WS
  misc_feature: MA Experiment 20000527 PARAMETER Experiment Name: At_10percent_PEG_P Parameter: Timepoint (day) Value: 20
  misc_feature: MA Experiment 20000527 PARAMETER Experiment Name: At_10percent_PEG_P Parameter: Tissue Value: Whole Plant
  misc_feature: MA Experiment 20000527 PARAMETER Experiment Name: At_10percent_PEG_P Parameter: Treatment Value: 10percent PEG vs. No Treatment
  misc_feature: MA Experiment ID: 20000794 Result: Down-regulated in Transcription
  misc_feature: MA Experiment 20000794 PARAMETER Experiment Name: At_Petals_P Parameter: Age (day) Value: 23-25 days
  misc_feature: MA Experiment 20000794 PARAMETER Experiment Name: At_Petals_P Parameter: Plant Line Value: WS
  misc_feature: MA Experiment 20000794 PARAMETER Experiment Name: At_Petals_P Parameter: Tissue Value: Petals vs. Whole plant
  misc_feature: MA Experiment ID: 20001556 Result: Down-regulated in Transcription
  misc_feature: MA Experiment 20001556 PARAMETER Experiment Name: At_Drought_Soil_Dry_P Parameter: Age (day) Value: 26
  misc_feature: MA Experiment 20001556 PARAMETER Experiment Name: At_Drought_Soil_Dry_P Parameter: Organism Value: A. thaliana
  misc_feature: MA Experiment 20001556 PARAMETER Experiment Name: At_Drought_Soil_Dry_P Parameter: Plant Line Value: WS
  misc_feature: MA Experiment 20001556 PARAMETER Experiment Name: At_Drought_Soil_Dry_P Parameter: Post Timepoint (hr) Value: None
  misc_feature: MA Experiment 20001556 PARAMETER Experiment Name: At_Drought_Soil_Dry_P Parameter: Post-Treatment Value: None
  misc_feature: MA Experiment 20001556 PARAMETER Experiment Name: At_Drought_Soil_Dry_P Parameter: Timepoint (day) Value: 12
  misc_feature: MA Experiment 20001556 PARAMETER Experiment Name: At_Drought_Soil_Dry_P Parameter: Treatment Value: Drought vs. No Drought
  misc_feature: MA Experiment ID: 20001557 Result: Down-regulated in Transcription
  misc_feature: MA Experiment 20001557 PARAMETER Experiment Name: At_Drought_Soil_Dry_P Parameter: Age (day) Value: 27
  misc_feature: MA Experiment 20001557 PARAMETER Experiment Name: At_Drought_Soil_Dry_P Parameter: Organism Value: A. thaliana
  misc_feature: MA Experiment 20001557 PARAMETER Experiment Name: At_Drought_Soil_Dry_P Parameter: Plant Line Value: WS
  misc_feature: MA Experiment 20001557 PARAMETER Experiment Name: At_Drought_Soil_Dry_P Parameter: Post Timepoint (hr) Value: 3
  misc_feature: MA Experiment 20001557 PARAMETER Experiment Name: At_Drought_Soil_Dry_P Parameter: Post-Treatment Value: Re-Water vs. No Drought
  misc_feature: MA Experiment 20001557 PARAMETER Experiment Name: At_Drought_Soil_Dry_P Parameter: Timepoint (day) Value: 13
  misc_feature: MA Experiment 20001557 PARAMETER Experiment Name: At_Drought_Soil_Dry_P Parameter: Treatment Value: Drought vs. No Drought
  misc_feature: MA Experiment ID: 20001558 Result: Down-regulated in Transcription
  misc_feature: MA Experiment 20001558 PARAMETER Experiment Name: At_Drought_Soil_Dry_P Parameter: Age (day) Value: 27
  misc_feature: MA Experiment 20001558 PARAMETER Experiment Name: At_Drought_Soil_Dry_P Parameter: Organism Value: A. thaliana
  misc_feature: MA Experiment 20001558 PARAMETER Experiment Name: At_Drought_Soil_Dry_P Parameter: Plant Line Value: WS
  misc_feature: MA Experiment 20001558 PARAMETER Experiment Name: At_Drought_Soil_Dry_P Parameter: Post Timepoint (hr) Value: 6
  misc_feature: MA Experiment 20001558 PARAMETER Experiment Name: At_Drought_Soil_Dry_P Parameter: Post-Treatment Value: Re-Water vs. No Drought
  misc_feature: MA Experiment 20001558 PARAMETER Experiment Name: At_Drought_Soil_Dry_P Parameter: Timepoint (day) Value: 13
  misc_feature: MA Experiment 20001558 PARAMETER Experiment Name: At_Drought_Soil_Dry_P Parameter: Treatment Value: Drought vs. No Drought
  misc_feature: MA Experiment ID: 20001560 Result: Down-regulated in Transcription
  misc_feature: MA Experiment 20001560 PARAMETER Experiment Name: At_Drought_Soil_Dry_P Parameter: Age (day) Value: 28
  misc_feature: MA Experiment 20001560 PARAMETER Experiment Name: At_Drought_Soil_Dry_P Parameter: Organism Value: A. thaliana
  misc_feature: MA Experiment 20001560 PARAMETER Experiment Name: At_Drought_Soil_Dry_P Parameter: Plant Line Value: WS
  misc_feature: MA Experiment 20001560 PARAMETER Experiment Name: At_Drought_Soil_Dry_P Parameter: Post Timepoint (hr) Value: None
  misc_feature: MA Experiment 20001560 PARAMETER Experiment Name: At_Drought_Soil_Dry_P Parameter: Post-Treatment Value: None
  misc_feature: MA Experiment 20001560 PARAMETER Experiment Name: At_Drought_Soil_Dry_P Parameter: Timepoint (day) Value: 14
  misc_feature: MA Experiment 20001560 PARAMETER Experiment Name: At_Drought_Soil_Dry_P Parameter: Treatment Value: Drought vs. No Drought
  misc_feature: MA Experiment ID: 20001757 Result: Up-regulated in Transcription
  misc_feature: MA Experiment 20001757 PARAMETER Experiment Name: At_50mM_NH4NO3_L-to-H_P Parameter: Timepoint (hr) Value: 6
  misc_feature: MA Experiment 20001757 PARAMETER Experiment Name: At_50mM_NH4NO3_L-to-H_P Parameter: Tissue Value: Leaf
  misc_feature: MA Experiment 20001757 PARAMETER Experiment Name: At_50mM_NH4NO3_L-to-H_P Parameter: Treatment Value: 50mM NH4NO3 vs 100mM Mannitol

SEQ ID NO: 32917 - protein, 244 aa, Arabidopsis thaliana; identical to SEQ ID NO: 29327
  peptide (1)..(244): Ceres Seq. ID no. 12348735
  misc_feature (29)..(223): Pfam Name: Thaumatin family Pfam Description: Thaumatin family
  misc_feature (5)..(239): Homolog of NCBI NO: 15419836 NR Description: thaumatin-like protein [Capsicum annuum]
  misc_feature (5)..(239): Homolog of NCBI NO: 1709493 NR Description: OSMOTIN-LIKE PROTEIN OSML13 PRECURSOR (PA13)
  misc_feature (1)..(223): Homolog of NCBI NO: 14290151 NR Description: thaumatin-like protein [Sambucus nigra]
  misc_feature (1)..(223): Homolog of NCBI NO: 14290147 NR Description: thaumatin-like protein [Sambucus nigra]
  misc_feature (1)..(223): Homolog of NCBI NO: 5881239 NR Description: thaumatin [Vitis riparia]
  misc_feature (5)..(229): Homolog of NCBI NO: 3549691 NR Description: thaumatin-like protein PR-5b [Cicer arietinum]
  misc_feature (1)..(244): Homolog of NCBI NO: 33589680 NR Description: At4g11650 [Arabidopsis thaliana]
  misc_feature (1)..(244): Homolog of NCBI NO: 21537409 NR Description: osmotin precursor [Arabidopsis thaliana]
  misc_feature (1)..(244): Homolog of NCBI NO: 15234263 NR Description: osmotin precursor
  misc_feature (1)..(244): Homolog of NCBI NO: 887390 NR Description: osmotin [Arabidopsis thaliana]

SEQ ID NO: 32918 - protein, 182 aa, Arabidopsis thaliana; identical to SEQ ID NO: 29328
  peptide (1)..(182): Ceres Seq. ID no. 12348736
  misc_feature (1)..(161): Pfam Name: Thaumatin family Pfam Description: Thaumatin family
  misc_feature (1)..(177): Homolog of NCBI NO: 15419836 NR Description: thaumatin-like protein [Capsicum annuum]
  misc_feature (1)..(177): Homolog of NCBI NO: 1709493 NR Description: OSMOTIN-LIKE PROTEIN OSML13 PRECURSOR (PA13)
  misc_feature (1)..(161): Homolog of NCBI NO: 14290151 NR Description: thaumatin-like protein [Sambucus nigra]
  misc_feature (1)..(161): Homolog of NCBI NO: 14290147 NR Description: thaumatin-like protein [Sambucus nigra]
  misc_feature (1)..(161): Homolog of NCBI NO: 5881239 NR Description: thaumatin [Vitis riparia]
  misc_feature (1)..(167): Homolog of NCBI NO: 3549691 NR Description: thaumatin-like protein PR-5b [Cicer arietinum]
  misc_feature (1)..(182): Homolog of NCBI NO: 33589680 NR Description: At4g11650 [Arabidopsis thaliana]
  misc_feature (1)..(182): Homolog of NCBI NO: 21537409 NR Description: osmotin precursor [Arabidopsis thaliana]
  misc_feature (1)..(182): Homolog of NCBI NO: 15234263 NR Description: osmotin precursor
  misc_feature (1)..(182): Homolog of NCBI NO: 887390 NR Description: osmotin [Arabidopsis thaliana]

SEQ ID NO: 32919 - DNA, 1206 bp, Arabidopsis thaliana; identical to SEQ ID NO: 29329
  misc_feature (1)..(1206): Ceres Seq. ID no. 12601145
  misc_feature: MA Experiment ID: 108561 Result: Down-regulated in Transcription
  misc_feature: MA Experiment 108561 PARAMETER Experiment Name: At_100uM_ABA_cDNA_P Parameter: Timepoint (hr) Value: 6
  misc_feature: MA Experiment 108561 PARAMETER Experiment Name: At_100uM_ABA_cDNA_P Parameter: Tissue Value: Aerial
  misc_feature: MA Experiment 108561 PARAMETER Experiment Name: At_100uM_ABA_cDNA_P Parameter: Treatment Value: 100uM ABA vs. No Treatment
  misc_feature: MA Experiment ID: 108585 Result: Down-regulated in Transcription
  misc_feature: MA Experiment 108585 PARAMETER Experiment Name: At_5mM_NaNP_cDNA_P Parameter: Timepoint (hr) Value: 6
  misc_feature: MA Experiment 108585 PARAMETER Experiment Name: At_5mM_NaNP_cDNA_P Parameter: Tissue Value: Aerial
  misc_feature: MA Experiment 108585 PARAMETER Experiment Name: At_5mM_NaNP_cDNA_P Parameter: Treatment Value: null
  misc_feature: MA Experiment ID: 20000180 Result: Up-regulated in Transcription
  misc_feature: MA Experiment 20000180 PARAMETER Experiment Name: At_Germinating_Seeds_P Parameter: Age (hr) Value: 24 vs. 0
  misc_feature: MA Experiment 20000180 PARAMETER Experiment Name: At_Germinating_Seeds_P Parameter: Tissue Value: Germinating Seeds
  misc_feature: MA Experiment ID: 20000185 Result: Down-regulated in Transcription
  misc_feature: MA Experiment 20000185 PARAMETER Experiment Name: At_Roots__P Parameter: Age (day) Value: 7 vs. 21
  misc_feature: MA Experiment 20000185 PARAMETER Experiment Name: At_Roots__P Parameter: Organism Value: A. thaliana
  misc_feature: MA Experiment 20000185 PARAMETER Experiment Name: At_Roots__P Parameter: Tissue Value: Roots vs. Whole Plant
  misc_feature: MA Experiment ID: 20000234 Result: Up-regulated in Transcription
  misc_feature: MA Experiment 20000234 PARAMETER Experiment Name: At_Siliques_P Parameter: Age (day) Value: 21
  misc_feature: MA Experiment 20000234 PARAMETER Experiment Name: At_Siliques_P Parameter: Organism Value: A. thaliana
  misc_feature: MA Experiment 20000234 PARAMETER Experiment Name: At_Siliques_P Parameter: Plant Line Value: WS
  misc_feature: MA Experiment 20000234 PARAMETER Experiment Name: At_Siliques_P Parameter: Tissue Value: Less Than 5mm Siliques vs. Whole Plant
  misc_feature: MA Experiment ID: 20000436 Result: Down-regulated in Transcription
  misc_feature: MA Experiment 20000436 PARAMETER Experiment Name: At_Drought_P Parameter: Age (day) Value: 7
  misc_feature: MA Experiment 20000436 PARAMETER Experiment Name: At_Drought_P Parameter: Organism Value: A. thaliana
  misc_feature: MA Experiment 20000436 PARAMETER Experiment Name: At_Drought_P Parameter: Plant Line Value: WS
  misc_feature: MA Experiment 20000436 PARAMETER Experiment Name: At_Drought_P Parameter: Timepoint (hr) Value: 12
  misc_feature: MA Experiment 20000436 PARAMETER Experiment Name: At_Drought_P Parameter: Tissue Value: Whole Plant
  misc_feature: MA Experiment 20000436 PARAMETER Experiment Name: At_Drought_P Parameter: Treatment Value: Drought vs. No Drought
  misc_feature: MA Experiment ID: 20000437 Result: Down-regulated in Transcription
  misc_feature: MA Experiment 20000437 PARAMETER Experiment Name: At_Drought_P Parameter: Age (day) Value: 8
  misc_feature: MA Experiment 20000437 PARAMETER Experiment Name: At_Drought_P Parameter: Organism Value: A. thaliana
  misc_feature: MA Experiment 20000437 PARAMETER Experiment Name: At_Drought_P Parameter: Plant Line Value: WS
  misc_feature: MA Experiment 20000437 PARAMETER Experiment Name: At_Drought_P Parameter: Timepoint (hr) Value: 24
  misc_feature: MA Experiment 20000437 PARAMETER Experiment Name: At_Drought_P Parameter: Tissue Value: Whole Plant
  misc_feature: MA Experiment 20000437 PARAMETER Experiment Name: At_Drought_P Parameter: Treatment Value: Drought vs. No Drought
  misc_feature: MA Experiment ID: 20000439 Result: Down-regulated in Transcription
  misc_feature: MA Experiment 20000439 PARAMETER Experiment Name: At_Roots__P Parameter: Age (day) Value: 14 vs. 21
  misc_feature: MA Experiment 20000439 PARAMETER Experiment Name: At_Roots__P Parameter: Organism Value: A. thaliana
  misc_feature: MA Experiment 20000439 PARAMETER Experiment Name: At_Roots__P Parameter: Tissue Value: Roots vs. Whole Plant
  misc_feature: MA Experiment ID: 20000794 Result: Down-regulated in Transcription
  misc_feature: MA Experiment 20000794 PARAMETER Experiment Name: At_Petals_P Parameter: Age (day) Value: 23-25 days
  misc_feature: MA Experiment 20000794 PARAMETER Experiment Name: At_Petals_P Parameter: Plant Line Value: WS
  misc_feature: MA Experiment 20000794 PARAMETER Experiment Name: At_Petals_P Parameter: Tissue Value: Petals vs. Whole plant
  misc_feature: MA Experiment ID: 20001248 Result: Down-regulated in Transcription
  misc_feature: MA Experiment 20001248 PARAMETER Experiment Name: At_Far-red-induction_P Parameter: Age (day) Value: 7
  misc_feature: MA Experiment 20001248 PARAMETER Experiment Name: At_Far-red-induction_P Parameter: Light Value: Far-red vs. White
  misc_feature: MA Experiment 20001248 PARAMETER Experiment Name: At_Far-red-induction_P Parameter: Organism Value: A. thaliana
  misc_feature: MA Experiment 20001248 PARAMETER Experiment Name: At_Far-red-induction_P Parameter: Plant Line Value: Columbia
  misc_feature: MA Experiment 20001248 PARAMETER Experiment Name: At_Far-red-induction_P Parameter: Timepoint (hr) Value: 4
  misc_feature: MA Experiment 20001248 PARAMETER Experiment Name: At_Far-red-induction_P Parameter: Tissue Value: Whole Plant
  misc_feature: MA Experiment ID: 20001450 Result: Down-regulated in Transcription
  misc_feature: MA Experiment 20001450 PARAMETER Experiment Name: At_Far-red-induction_P Parameter: Age (day) Value: 7
  misc_feature: MA Experiment 20001450 PARAMETER Experiment Name: At_Far-red-induction_P Parameter: Light Value: Far-red vs. White
  misc_feature: MA Experiment 20001450 PARAMETER Experiment Name: At_Far-red-induction_P Parameter: Organism Value: A. thaliana
  misc_feature: MA Experiment 20001450 PARAMETER Experiment Name: At_Far-red-induction_P Parameter: Plant Line Value: Columbia
  misc_feature: MA Experiment 20001450 PARAMETER Experiment Name: At_Far-red-induction_P Parameter: Timepoint (hr) Value: 8
  misc_feature: MA Experiment 20001450 PARAMETER Experiment Name: At_Far-red-induction_P Parameter: Tissue Value: Whole Plant
  misc_feature: MA Experiment ID: 20001560 Result: Up-regulated in Transcription
  misc_feature: MA Experiment 20001560 PARAMETER Experiment Name: At_Drought_Soil_Dry_P Parameter: Age (day) Value: 28
  misc_feature: MA Experiment 20001560 PARAMETER Experiment Name: At_Drought_Soil_Dry_P Parameter: Organism Value: A. thaliana
  misc_feature: MA Experiment 20001560 PARAMETER Experiment Name: At_Drought_Soil_Dry_P Parameter: Plant Line Value: WS
  misc_feature: MA Experiment 20001560 PARAMETER Experiment Name: At_Drought_Soil_Dry_P Parameter: Post Timepoint (hr) Value: None
  misc_feature: MA Experiment 20001560 PARAMETER Experiment Name: At_Drought_Soil_Dry_P Parameter: Post-Treatment Value: None
  misc_feature: MA Experiment 20001560 PARAMETER Experiment Name: At_Drought_Soil_Dry_P Parameter: Timepoint (day) Value: 14
  misc_feature: MA Experiment 20001560 PARAMETER Experiment Name: At_Drought_Soil_Dry_P Parameter: Treatment Value: Drought vs. No Drought
  misc_feature: MA Experiment ID: 20001757 Result: Up-regulated in Transcription
  misc_feature: MA Experiment 20001757 PARAMETER Experiment Name: At_50mM_NH4NO3_L-to-H_P Parameter: Timepoint (hr) Value: 6
  misc_feature: MA Experiment 20001757 PARAMETER Experiment Name: At_50mM_NH4NO3_L-to-H_P Parameter: Tissue Value: Leaf
  misc_feature: MA Experiment 20001757 PARAMETER Experiment Name: At_50mM_NH4NO3_L-to-H_P Parameter: Treatment Value: 50mM NH4NO3 vs 100mM Mannitol
  misc_feature: MA Experiment ID: 20001905 Result: Down-regulated in Transcription
  misc_feature: MA Experiment 20001905 PARAMETER Experiment Name: At_Drought_Reproduction_P Parameter: Age (day) Value: 40
  misc_feature: MA Experiment 20001905 PARAMETER Experiment Name: At_Drought_Reproduction_P Parameter: Organism Value: A. thaliana
  misc_feature: MA Experiment 20001905 PARAMETER Experiment Name: At_Drought_Reproduction_P Parameter: Plant Line Value: WS
  misc_feature: MA Experiment 20001905 PARAMETER Experiment Name: At_Drought_Reproduction_P Parameter: Timepoint (day) Value: 10
  misc_feature: MA Experiment 20001905 PARAMETER Experiment Name: At_Drought_Reproduction_P Parameter: Tissue Value: Rosettes
  misc_feature: MA Experiment 20001905 PARAMETER Experiment Name: At_Drought_Reproduction_P Parameter: Treatment Value: Drought vs. No Drought

SEQ ID NO: 32920 - protein, 325 aa, Arabidopsis thaliana; identical to SEQ ID NO: 29330
  peptide (1)..(325): Ceres Seq. ID no. 12601146
  misc_feature (164)..(320): Homolog of NCBI NO: 17230243 NR Description: hypothetical protein [Nostoc sp. PCC 7120]
  misc_feature (170)..(311): Homolog of NCBI NO: 37523053 NR Description: hypothetical protein gll3484 [Gloeobacter
  misc_feature (164)..(321): Homolog of NCBI NO: 16330694 NR Description: hypothetical protein [Synechocystis sp. PCC 6803]
  misc_feature (3)..(324): Homolog of NCBI NO: 30689062 NR Description: expressed protein [Arabidopsis thaliana]
  misc_feature (78)..(320): Homolog of NCBI NO: 11358410 NR Description: hypothetical protein T7H20.290 - Arabidopsis
  misc_feature (78)..(325): Homolog of NCBI NO: 18413869 NR Description: putative protein
  misc_feature (78)..(325): Homolog of NCBI NO: 34897418 NR Description: unknown protein [Oryza sativa (japonica
  misc_feature (62)..(325): Homolog of NCBI NO: 14719331 NR Description: putative 3-beta hydroxysteroid
  misc_feature (1)..(325): Homolog of NCBI NO: 7485430 NR Description: hypothetical protein At2g37660 [imported] -
  misc_feature (1)..(325): Homolog of NCBI NO: 18404496 NR Description: expressed protein
  misc_feature (164)..(320): Homolog of NCBI NO: 17230243 NR Description: hypothetical protein [Nostoc sp. PCC 7120]
  misc_feature (170)..(311): Homolog of NCBI NO: 37523053 NR Description: hypothetical protein gll3484 [Gloeobacter
  misc_feature (164)..(321): Homolog of NCBI NO: 16330694 NR Description: hypothetical protein [Synechocystis sp. PCC 6803]
  misc_feature (3)..(324): Homolog of NCBI NO: 30689062 NR Description: expressed protein [Arabidopsis thaliana]
  misc_feature (78)..(320): Homolog of NCBI NO: 11358410 NR Description: hypothetical protein T7H20.290 - Arabidopsis
  misc_feature (78)..(325): Homolog of NCBI NO: 18413869 NR Description: putative protein
  misc_feature (78)..(325): Homolog of NCBI NO: 34897418 NR Description: unknown protein [Oryza sativa (japonica
  misc_feature (62)..(325): Homolog of NCBI NO: 14719331 NR Description: putative 3-beta hydroxysteroid
  misc_feature (1)..(325): Homolog of NCBI NO: 7485430 NR Description: hypothetical protein At2g37660 [imported] -
  misc_feature (1)..(325): Homolog of NCBI NO: 18404496 NR Description: expressed protein
  misc_feature (164)..(320): Homolog of NCBI NO: 17230243 NR Description: hypothetical protein [Nostoc sp. PCC 7120]
  misc_feature (170)..(311): Homolog of NCBI NO: 37523053 NR Description: hypothetical protein gll3484 [Gloeobacter
  misc_feature (164)..(321): Homolog of NCBI NO: 16330694 NR Description: hypothetical protein [Synechocystis sp. PCC 6803]
  misc_feature (3)..(324): Homolog of NCBI NO: 30689062 NR Description: expressed protein [Arabidopsis thaliana]
  misc_feature (78)..(320): Homolog of NCBI NO: 11358410 NR Description: hypothetical protein T7H20.290 - Arabidopsis
  misc_feature (78)..(325): Homolog of NCBI NO: 18413869 NR Description: putative protein
  misc_feature (78)..(325): Homolog of NCBI NO: 34897418 NR Description: unknown protein [Oryza sativa (japonica
  misc_feature (62)..(325): Homolog of NCBI NO: 14719331 NR Description: putative 3-beta hydroxysteroid
  misc_feature (1)..(325): Homolog of NCBI NO: 7485430 NR Description: hypothetical protein At2g37660 [imported] -
  misc_feature (1)..(325): Homolog of NCBI NO: 18404496 NR Description: expressed protein
  misc_feature (164)..(320): Homolog of NCBI NO: 17230243 NR Description: hypothetical protein [Nostoc sp. PCC 7120]
  misc_feature (170)..(311): Homolog of NCBI NO: 37523053 NR Description: hypothetical protein gll3484 [Gloeobacter
  misc_feature (164)..(321): Homolog of NCBI NO: 16330694 NR Description: hypothetical protein [Synechocystis sp. PCC 6803]
  misc_feature (3)..(324): Homolog of NCBI NO: 30689062 NR Description: expressed protein [Arabidopsis thaliana]
  misc_feature (78)..(320): Homolog of NCBI NO: 11358410 NR Description: hypothetical protein T7H20.290 - Arabidopsis
  misc_feature (78)..(325): Homolog of NCBI NO: 18413869 NR Description: putative protein
  misc_feature (78)..(325): Homolog of NCBI NO: 34897418 NR Description: unknown protein [Oryza sativa (japonica
  misc_feature (62)..(325): Homolog of NCBI NO: 14719331 NR Description: putative 3-beta hydroxysteroid
  misc_feature (1)..(325): Homolog of NCBI NO: 7485430 NR Description: hypothetical protein At2g37660 [imported] -
  misc_feature (1)..(325): Homolog of NCBI NO: 18404496 NR Description: expressed protein

SEQ ID NO: 32921 - protein, 323 aa, Arabidopsis thaliana; identical to SEQ ID NO: 29331
  peptide (1)..(323): Ceres Seq. ID no. 12601147
  misc_feature (162)..(318): Homolog of NCBI NO: 17230243 NR Description: hypothetical protein [Nostoc sp. PCC 7120]
  misc_feature (168)..(309): Homolog of NCBI NO: 37523053 NR Description: hypothetical protein gll3484 [Gloeobacter
  misc_feature (162)..(319): Homolog of NCBI NO: 16330694 NR Description: hypothetical protein [Synechocystis sp. PCC 6803]
  misc_feature (1)..(322): Homolog of NCBI NO: 30689062 NR Description: expressed protein [Arabidopsis thaliana]
  misc_feature (76)..(318): Homolog of NCBI NO: 11358410 NR Description: hypothetical protein T7H20.290 - Arabidopsis
  misc_feature (76)..(323): Homolog of NCBI NO: 18413869 NR Description: putative protein
  misc_feature (76)..(323): Homolog of NCBI NO: 34897418 NR Description: unknown protein [Oryza sativa (japonica
  misc_feature (60)..(323): Homolog of NCBI NO: 14719331 NR Description: putative 3-beta hydroxysteroid
  misc_feature (1)..(323): Homolog of NCBI NO: 7485430 NR Description: hypothetical protein At2g37660 [imported] -
  misc_feature (1)..(323): Homolog of NCBI NO: 18404496 NR Description: expressed protein
  misc_feature (162)..(318): Homolog of NCBI NO: 17230243 NR Description: hypothetical protein [Nostoc sp. PCC 7120]
  misc_feature (168)..(309): Homolog of NCBI NO: 37523053 NR Description: hypothetical protein gll3484 [Gloeobacter
  misc_feature (162)..(319): Homolog of NCBI NO: 16330694 NR Description: hypothetical protein [Synechocystis sp. PCC 6803]
  misc_feature (1)..(322): Homolog of NCBI NO: 30689062 NR Description: expressed protein [Arabidopsis thaliana]
  misc_feature (76)..(318): Homolog of NCBI NO: 11358410 NR Description: hypothetical protein T7H20.290 - Arabidopsis
  misc_feature (76)..(323): Homolog of NCBI NO: 18413869 NR Description: putative protein
  misc_feature (76)..(323): Homolog of NCBI NO: 34897418 NR Description: unknown protein [Oryza sativa (japonica
  misc_feature (60)..(323): Homolog of NCBI NO: 14719331 NR Description: putative 3-beta hydroxysteroid
  misc_feature (1)..(323): Homolog of NCBI NO: 7485430 NR Description: hypothetical protein At2g37660 [imported] -
  misc_feature (1)..(323): Homolog of NCBI NO: 18404496 NR Description: expressed protein
  misc_feature (162)..(318): Homolog of NCBI NO: 17230243 NR Description: hypothetical protein [Nostoc sp. PCC 7120]
  misc_feature (168)..(309): Homolog of NCBI NO: 37523053 NR Description: hypothetical protein gll3484 [Gloeobacter
  misc_feature (162)..(319): Homolog of NCBI NO: 16330694 NR Description: hypothetical protein [Synechocystis sp. PCC 6803]
  misc_feature (1)..(322): Homolog of NCBI NO: 30689062 NR Description: expressed protein [Arabidopsis thaliana]
  misc_feature (76)..(318): Homolog of NCBI NO: 11358410 NR Description: hypothetical protein T7H20.290 - Arabidopsis
  misc_feature (76)..(323): Homolog of NCBI NO: 18413869 NR Description: putative protein
  misc_feature (76)..(323): Homolog of NCBI NO: 34897418 NR Description: unknown protein [Oryza sativa (japonica
  misc_feature (60)..(323): Homolog of NCBI NO: 14719331 NR Description: putative 3-beta hydroxysteroid
  misc_feature (1)..(323): Homolog of NCBI NO: 7485430 NR Description: hypothetical protein At2g37660 [imported] -
  misc_feature (1)..(323): Homolog of NCBI NO: 18404496 NR Description: expressed protein
  misc_feature (162)..(318): Homolog of NCBI NO: 17230243 NR Description: hypothetical protein [Nostoc sp. PCC 7120]
  misc_feature (168)..(309): Homolog of NCBI NO: 37523053 NR Description: hypothetical protein gll3484 [Gloeobacter
  misc_feature (162)..(319): Homolog of NCBI NO: 16330694 NR Description: hypothetical protein [Synechocystis sp. PCC 6803]
  misc_feature (1)..(322): Homolog of NCBI NO: 30689062 NR Description: expressed protein [Arabidopsis thaliana]
  misc_feature (76)..(318): Homolog of NCBI NO: 11358410 NR Description: hypothetical protein T7H20.290 - Arabidopsis
  misc_feature (76)..(323): Homolog of NCBI NO: 18413869 NR Description: putative protein
  misc_feature (76)..(323): Homolog of NCBI NO: 34897418 NR Description: unknown protein [Oryza sativa (japonica
  misc_feature (60)..(323): Homolog of NCBI NO: 14719331 NR Description: putative 3-beta hydroxysteroid
  misc_feature (1)..(323): Homolog of NCBI NO: 7485430 NR Description: hypothetical protein At2g37660 [imported] -
  misc_feature (1)..(323): Homolog of NCBI NO: 18404496 NR Description: expressed protein

SEQ ID NO: 32922 - protein, 322 aa, Arabidopsis thaliana; identical to SEQ ID NO: 29332
  peptide (1)..(322): Ceres Seq. ID no. 12601148
  misc_feature (161)..(317): Homolog of NCBI NO: 17230243 NR Description: hypothetical protein [Nostoc sp. PCC 7120]
  misc_feature (167)..(308): Homolog of NCBI NO: 37523053 NR Description: hypothetical protein gll3484 [Gloeobacter
  misc_feature (161)..(318): Homolog of NCBI NO: 16330694 NR Description: hypothetical protein [Synechocystis sp. PCC 6803]
  misc_feature (1)..(321): Homolog of NCBI NO: 30689062 NR Description: expressed protein [Arabidopsis thaliana]
  misc_feature (75)..(317): Homolog of NCBI NO: 11358410 NR Description: hypothetical protein T7H20.290 - Arabidopsis
  misc_feature (75)..(322): Homolog of NCBI NO: 18413869 NR Description: putative protein
  misc_feature (75)..(322): Homolog of NCBI NO: 34897418 NR Description: unknown protein [Oryza sativa (japonica
  misc_feature (59)..(322): Homolog of NCBI NO: 14719331 NR Description: putative 3-beta hydroxysteroid
  misc_feature (1)..(322): Homolog of NCBI NO: 7485430 NR Description: hypothetical protein At2g37660 [imported] -
  misc_feature (1)..(322): Homolog of NCBI NO: 18404496 NR Description: expressed protein
  misc_feature (161)..(317): Homolog of NCBI NO: 17230243 NR Description: hypothetical protein [Nostoc sp. PCC 7120]
  misc_feature (167)..(308): Homolog of NCBI NO: 37523053 NR Description: hypothetical protein gll3484 [Gloeobacter
  misc_feature (161)..(318): Homolog of NCBI NO: 16330694 NR Description: hypothetical protein [Synechocystis sp. PCC 6803]
  misc_feature (1)..(321): Homolog of NCBI NO: 30689062 NR Description: expressed protein [Arabidopsis thaliana]
  misc_feature (75)..(317): Homolog of NCBI NO: 11358410 NR Description: hypothetical protein T7H20.290 - Arabidopsis
  misc_feature (75)..(322): Homolog of NCBI NO: 18413869 NR Description: putative protein
  misc_feature (75)..(322): Homolog of NCBI NO: 34897418 NR Description: unknown protein [Oryza sativa (japonica
  misc_feature (59)..(322): Homolog of NCBI NO: 14719331 NR Description: putative 3-beta hydroxysteroid
  misc_feature (1)..(322): Homolog of NCBI NO: 7485430 NR Description: hypothetical protein At2g37660 [imported] -
  misc_feature (1)..(322): Homolog of NCBI NO: 18404496 NR Description: expressed protein
  misc_feature (161)..(317): Homolog of NCBI NO: 17230243 NR Description: hypothetical protein [Nostoc sp. PCC 7120]
  misc_feature (167)..(308): Homolog of NCBI NO: 37523053 NR Description: hypothetical protein gll3484 [Gloeobacter
  misc_feature (161)..(318): Homolog of NCBI NO: 16330694 NR Description: hypothetical protein [Synechocystis sp. PCC 6803]
  misc_feature (1)..(321): Homolog of NCBI NO: 30689062 NR Description: expressed protein [Arabidopsis thaliana]
  misc_feature (75)..(317): Homolog of NCBI NO: 11358410 NR Description: hypothetical protein T7H20.290 - Arabidopsis
  misc_feature (75)..(322): Homolog of NCBI NO: 18413869 NR Description: putative protein
  misc_feature (75)..(322): Homolog of NCBI NO: 34897418 NR Description: unknown protein [Oryza sativa (japonica
  misc_feature (59)..(322): Homolog of NCBI NO: 14719331 NR Description: putative 3-beta hydroxysteroid
  misc_feature (1)..(322): Homolog of NCBI NO: 7485430 NR Description: hypothetical protein At2g37660 [imported] -
  misc_feature (1)..(322): Homolog of NCBI NO: 18404496 NR Description: expressed protein
  misc_feature (161)..(317): Homolog of NCBI NO: 17230243 NR Description: hypothetical protein [Nostoc sp. PCC 7120]
  misc_feature (167)..(308): Homolog of NCBI NO: 37523053 NR Description: hypothetical protein gll3484 [Gloeobacter
  misc_feature (161)..(318): Homolog of NCBI NO: 16330694 NR Description: hypothetical protein [Synechocystis sp. PCC 6803]
  misc_feature (1)..(321): Homolog of NCBI NO: 30689062 NR Description: expressed protein [Arabidopsis thaliana]
  misc_feature (75)..(317): Homolog of NCBI NO: 11358410 NR Description: hypothetical protein T7H20.290 - Arabidopsis
  misc_feature (75)..(322): Homolog of NCBI NO: 18413869 NR Description: putative protein
  misc_feature (75)..(322): Homolog of NCBI NO: 34897418 NR Description: unknown protein [Oryza sativa (japonica
  misc_feature (59)..(322): Homolog of NCBI NO: 14719331 NR Description: putative 3-beta hydroxysteroid
  misc_feature (1)..(322): Homolog of NCBI NO: 7485430 NR Description: hypothetical protein At2g37660 [imported] -
  misc_feature (1)..(322): Homolog of NCBI NO: 18404496 NR Description: expressed protein

SEQ ID NO: 32923 - DNA, 1400 bp, Arabidopsis thaliana; identical to SEQ ID NO: 29333
  misc_feature (1)..(1400): Ceres Seq. ID no. 12396512
  misc_feature: MA Experiment ID: 108434 Result: Up-regulated in Transcription
  misc_feature: MA Experiment 108434 PARAMETER Experiment Name: At_Root_Tips_cDNA_P Parameter: Tissue Value: Root Tips
  misc_feature: MA Experiment ID: 108462 Result: Down-regulated in Transcription
  misc_feature: MA Experiment 108462 PARAMETER Experiment Name: At_Germinating_Seeds_cDNA_P Parameter: Age (day) Value: 2 vs. 0
  misc_feature: MA Experiment 108462 PARAMETER Experiment Name: At_Germinating_Seeds_cDNA_P Parameter: Tissue Value: Germinating Seeds
  misc_feature: MA Experiment ID: 108463 Result: Down-regulated in Transcription
  misc_feature: MA Experiment 108463 PARAMETER Experiment Name: At_Germinating_Seeds_cDNA_P Parameter: Age (day) Value: 3 vs. 0
  misc_feature: MA Experiment 108463 PARAMETER Experiment Name: At_Germinating_Seeds_cDNA_P Parameter: Tissue Value: Germinating Seeds
  misc_feature: MA Experiment ID: 108595 Result: Down-regulated in Transcription
  misc_feature: MA Experiment 108595 PARAMETER Experiment Name: At_Ler-pi_Ovule_cDNA_P Parameter: Plant Line Value: null
  misc_feature: MA Experiment ID: 20000234 Result: Up-regulated in Transcription
  misc_feature: MA Experiment 20000234 PARAMETER Experiment Name: At_Siliques_P Parameter: Age (day) Value: 21
  misc_feature: MA Experiment 20000234 PARAMETER Experiment Name: At_Siliques_P Parameter: Organism Value: A. thaliana
  misc_feature: MA Experiment 20000234 PARAMETER Experiment Name: At_Siliques_P Parameter: Plant Line Value: WS
  misc_feature: MA Experiment 20000234 PARAMETER Experiment Name: At_Siliques_P Parameter: Tissue Value: Less Than 5mm Siliques vs. Whole Plant
  misc_feature: MA Experiment ID: 20001557 Result: Up-regulated in Transcription
  misc_feature: MA Experiment 20001557 PARAMETER Experiment Name: At_Drought_Soil_Dry_P Parameter: Age (day) Value: 27
  misc_feature: MA Experiment 20001557 PARAMETER Experiment Name: At_Drought_Soil_Dry_P Parameter: Organism Value: A. thaliana
  misc_feature: MA Experiment 20001557 PARAMETER Experiment Name: At_Drought_Soil_Dry_P Parameter: Plant Line Value: WS
  misc_feature: MA Experiment 20001557 PARAMETER Experiment Name: At_Drought_Soil_Dry_P Parameter: Post Timepoint (hr) Value: 3
  misc_feature: MA Experiment 20001557 PARAMETER Experiment Name: At_Drought_Soil_Dry_P Parameter: Post-Treatment Value: Re-Water vs. No Drought
  misc_feature: MA Experiment 20001557 PARAMETER Experiment Name: At_Drought_Soil_Dry_P Parameter: Timepoint (day) Value: 13
  misc_feature: MA Experiment 20001557 PARAMETER Experiment Name: At_Drought_Soil_Dry_P Parameter: Treatment Value: Drought vs. No Drought

SEQ ID NO: 32924 - protein, 344 aa, Arabidopsis thaliana [sequence omitted]

SEQ ID NO: 32925 - protein, 333 aa, Arabidopsis thaliana; identical to SEQ ID NO: 29335
  peptide (1)..(333): Ceres Seq. ID no. 12396514
  misc_feature (6)..(81): Pfam Name: S1 RNA binding domain Pfam Description: S1 RNA binding domain
  misc_feature (1)..(315): Homolog of NCBI NO: 12711655 NR Description: eukaryotic initiation factor 2 alpha subunit
  misc_feature (166)..(333): Homolog of NCBI NO: 4588003 NR Description: hypothetical EIF-2-Alpha [Arabidopsis thaliana]
  misc_feature (171)..(314): Homolog of NCBI NO: 19114993 NR Description: eukaryotic translation initiation factor 2 alpha
  misc_feature (1)..(148): Homolog of NCBI NO: 19114993 NR Description: eukaryotic translation initiation factor 2 alpha
  misc_feature (1)..(330): Homolog of NCBI NO: 34898218 NR Description: putative eukaryotic translation initiation factor
  misc_feature (1)..(268): Homolog of NCBI NO: 4588003 NR Description: hypothetical EIF-2-Alpha [Arabidopsis thaliana]
  misc_feature (1)..(333): Homolog of NCBI NO: 13549160 NR Description: protein synthesis initiation factor eIF2 alpha
  misc_feature (1)..(333): Homolog of NCBI NO: 15239135 NR Description: eukaryotic translation initiation factor 2 alpha
  misc_feature (1)..(333): Homolog of NCBI NO: 21537411 NR Description: putative eukaryotic translation initiation factor
  misc_feature (1)..(333): Homolog of NCBI NO: 18405334 NR Description: putative eukaryotic translation initiation factor

SEQ ID NO: 32926 - protein, 323 aa, Arabidopsis thaliana; identical to SEQ ID NO: 29336
  peptide (1)..(323): Ceres Seq. ID no. 12396515
  misc_feature (1)..(71): Pfam Name: S1 RNA binding domain Pfam Description: S1 RNA binding domain
  misc_feature (1)..(305): Homolog of NCBI NO: 12711655 NR Description: eukaryotic initiation factor 2 alpha subunit
  misc_feature (156)..(323): Homolog of NCBI NO: 4588003 NR Description: hypothetical EIF-2-Alpha [Arabidopsis thaliana]
  misc_feature (161)..(304): Homolog of NCBI NO: 19114993 NR Description: eukaryotic translation initiation factor 2 alpha
  misc_feature (1)..(138): Homolog of NCBI NO: 19114993 NR Description: eukaryotic translation initiation factor 2 alpha
  misc_feature (1)..(320): Homolog of NCBI NO: 34898218 NR Description: putative eukaryotic translation initiation factor
  misc_feature (1)..(258): Homolog of NCBI NO: 4588003 NR Description: hypothetical EIF-2-Alpha [Arabidopsis thaliana]
  misc_feature (1)..(323): Homolog of NCBI NO: 13549160 NR Description: protein synthesis initiation factor eIF2 alpha
  misc_feature (1)..(323): Homolog of NCBI NO: 15239135 NR Description: eukaryotic translation initiation factor 2 alpha
  misc_feature (1)..(323): Homolog of NCBI NO: 21537411 NR Description: putative eukaryotic translation initiation factor
  misc_feature (1)..(323): Homolog of NCBI NO: 18405334 NR Description: putative eukaryotic translation initiation factor

SEQ ID NO: 32927 - DNA, 1489 bp, Arabidopsis thaliana; identical to SEQ ID NO: 29337
  misc_feature (1)..(1489): Ceres Seq. ID no. 12371848
  misc_feature: MA Experiment ID: 108433 Result: Down-regulated in Transcription
  misc_feature: MA Experiment 108433 PARAMETER Experiment Name: At_rhl_Mutant2_cDNA_P Parameter: Age (day) Value: 7
  misc_feature: MA Experiment 108433 PARAMETER Experiment Name: At_rhl_Mutant2_cDNA_P Parameter: Organism Value: A. thaliana
  misc_feature: MA Experiment 108433 PARAMETER Experiment Name: At_rhl_Mutant2_cDNA_P Parameter: Plant Line Value: rhl Mutant vs. wt landsburg
  misc_feature: MA Experiment 108433 PARAMETER Experiment Name: At_rhl_Mutant2_cDNA_P Parameter: Tissue Value: Roots
  misc_feature: MA Experiment ID: 20000315 Result: Down-regulated in Transcription
  misc_feature: MA Experiment 20000315 PARAMETER Experiment Name: At_14day_Shoots-Roots_Sub_P Parameter: Age (day) Value: 14
  misc_feature: MA Experiment 20000315 PARAMETER Experiment Name: At_14day_Shoots-Roots_Sub_P Parameter: Organism Value: A. thaliana
  misc_feature: MA Experiment 20000315 PARAMETER Experiment Name: At_14day_Shoots-Roots_Sub_P Parameter: Plant Line Value: WS
  misc_feature: MA Experiment 20000315 PARAMETER Experiment Name: At_14day_Shoots-Roots_Sub_P Parameter: Tissue Value: Shoots vs. Whole Plant
  misc_feature: MA Experiment ID: 20000328 Result: Down-regulated in Transcription
  misc_feature: MA Experiment 20000328 PARAMETER Experiment Name: At_42deg_Heat_Sub_P Parameter: Age (day) Value: 14
  misc_feature: MA Experiment 20000328 PARAMETER Experiment Name: At_42deg_Heat_Sub_P Parameter: Organism Value: A. thaliana
  misc_feature: MA Experiment 20000328 PARAMETER Experiment Name: At_42deg_Heat_Sub_P Parameter: Plant Line Value: WS
  misc_feature: MA Experiment 20000328 PARAMETER Experiment Name: At_42deg_Heat_Sub_P Parameter: Temperature (deg C) Value: 42 vs. 22
  misc_feature: MA Experiment 20000328 PARAMETER Experiment Name: At_42deg_Heat_Sub_P Parameter: Timepoint (hr) Value: 6
  misc_feature: MA Experiment 20000328 PARAMETER Experiment Name: At_42deg_Heat_Sub_P Parameter: Tissue Value: Aerial

SEQ ID NO: 32928 - protein, 438 aa, Arabidopsis thaliana; identical to SEQ ID NO: 29338
  peptide (1)..(438): Ceres Seq. ID no. 12371849
  misc_feature (45)..(161): Pfam Name: Putative GTPase activating protein for Arf Pfam Description: Putative GTPase activating protein for Arf
  misc_feature (224)..(436): Homolog of NCBI NO: 14042190 NR Description: unnamed protein product [Homo sapiens]
  misc_feature (45)..(189): Homolog of NCBI NO: 37362182 NR Description: ADP-ribosylation factor GTPase activating protein
  misc_feature (186)..(436): Homolog of NCBI NO: 37362182 NR Description: ADP-ribosylation factor GTPase activating protein
  misc_feature (36)..(438): Homolog of NCBI NO: 29126345 NR Description: putative zinc finger protein
  misc_feature (36)..(430): Homolog of NCBI NO: 18403775 NR Description: expressed protein
  misc_feature (36)..(438): Homolog of NCBI NO: 37537094 NR Description: unknown protein [Oryza sativa (japonica
  misc_feature (34)..(438): Homolog of NCBI NO: 13430530 NR Description: unknown protein [Arabidopsis thaliana]
  misc_feature (34)..(438): Homolog of NCBI NO: 18414983 NR Description: Expressed protein; protein id: At4g17890.1
  misc_feature (34)..(438): Homolog of NCBI NO: 7487780 NR Description: hypothetical protein T6K21.70 - Arabidopsis
  misc_feature (36)..(438): Homolog of NCBI NO: 15237500 NR Description: zinc finger protein Glo3-like

SEQ ID NO: 32929 - protein, 403 aa, Arabidopsis thaliana; identical to SEQ ID NO: 29339
  peptide (1)..(403): Ceres Seq. ID no. 12371850
  misc_feature (10)..(126): Pfam Name: Putative GTPase activating protein for Arf Pfam Description: Putative GTPase activating protein for Arf
  misc_feature (189)..(401): Homolog of NCBI NO: 14042190 NR Description: unnamed protein product [Homo sapiens]
  misc_feature (10)..(154): Homolog of NCBI NO: 37362182 NR Description: ADP-ribosylation factor GTPase activating protein
  misc_feature (151)..(401): Homolog of NCBI NO: 37362182 NR Description: ADP-ribosylation factor GTPase activating protein
  misc_feature (1)..(403): Homolog of NCBI NO: 29126345 NR Description: putative zinc finger protein
  misc_feature (1)..(395): Homolog of NCBI NO: 18403775 NR Description: expressed protein
  misc_feature (1)..(403): Homolog of NCBI NO: 37537094 NR Description: unknown protein [Oryza sativa (japonica
  misc_feature (1)..(403): Homolog of NCBI NO: 13430530 NR Description: unknown protein [Arabidopsis thaliana]
  misc_feature (1)..(403): Homolog of NCBI NO: 18414983 NR Description: Expressed protein; protein id: At4g17890.1
  misc_feature (1)..(403): Homolog of NCBI NO: 7487780 NR Description: hypothetical protein T6K21.70 - Arabidopsis
  misc_feature (1)..(403): Homolog of NCBI NO: 15237500 NR Description: zinc finger protein Glo3-like

SEQ ID NO: 32930 - protein, 326 aa, Arabidopsis thaliana; identical to SEQ ID NO: 29340
  peptide (1)..(326): Ceres Seq. ID no. 12371851
  misc_feature (112)..(324): Homolog of NCBI NO: 14042190 NR Description: unnamed protein product [Homo sapiens]
  misc_feature (1)..(77): Homolog of NCBI NO: 37362182 NR Description: ADP-ribosylation factor GTPase activating protein
  misc_feature (74)..(324): Homolog of NCBI NO: 37362182 NR Description: ADP-ribosylation factor GTPase activating protein
  misc_feature (1)..(326): Homolog of NCBI NO: 29126345 NR Description: putative zinc finger protein
  misc_feature (1)..(318): Homolog of NCBI NO: 18403775 NR Description: expressed protein
  misc_feature (1)..(326): Homolog of NCBI NO: 37537094 NR Description: unknown protein [Oryza sativa (japonica
  misc_feature (1)..(326): Homolog of NCBI NO: 13430530 NR Description: unknown protein [Arabidopsis thaliana]
  misc_feature (1)..(326): Homolog of NCBI NO: 18414983 NR Description: Expressed protein; protein id: At4g17890.1
  misc_feature (1)..(326): Homolog of NCBI NO: 7487780 NR Description: hypothetical protein T6K21.70 - Arabidopsis
  misc_feature (1)..(326): Homolog of NCBI NO: 15237500 NR Description: zinc finger protein Glo3-like

SEQ ID NO: 32931 - DNA, 1086 bp, Arabidopsis thaliana; identical to SEQ ID NO: 29341
  misc_feature (1)..(1086): Ceres Seq. ID no. 13493751
  misc_feature: MA Experiment ID: 108435 Result: Down-regulated in Transcription
  misc_feature: MA Experiment 108435 PARAMETER Experiment Name: At_stm_Mutants_cDNA_P Parameter: Plant Line Value: wt Landsburg vs stm
  misc_feature: MA Experiment 108435 PARAMETER Experiment Name: At_stm_Mutants_cDNA_P Parameter: Tissue Value: Shoot Apical Meristem Region
  misc_feature: MA Experiment ID: 108462 Result: Up-regulated in Transcription
  misc_feature: MA Experiment 108462 PARAMETER Experiment Name: At_Germinating_Seeds_cDNA_P Parameter: Age (day) Value: 2 vs. 0
  misc_feature: MA Experiment 108462 PARAMETER Experiment Name: At_Germinating_Seeds_cDNA_P Parameter: Tissue Value: Germinating Seeds
  misc_feature: MA Experiment ID: 108569 Result: Up-regulated in Transcription
  misc_feature: MA Experiment 108569 PARAMETER Experiment Name: At_0.001%_MeJA__cDNA_P Parameter: Timepoint (hr) Value: 6
  misc_feature: MA Experiment 108569 PARAMETER Experiment Name: At_0.001%_MeJA__cDNA_P Parameter: Tissue Value: Aerial
  misc_feature: MA Experiment 108569 PARAMETER Experiment Name: At_0.001%_MeJA__cDNA_P Parameter: Treatment Value: 0.001% MeJA vs. No Treatment
  misc_feature: MA Experiment ID: 108572 Result: Up-regulated in Transcription
  misc_feature: MA Experiment 108572 PARAMETER Experiment Name: At_Drought_cDNA_P Parameter: Timepoint (hr) Value: 1
  misc_feature: MA Experiment 108572 PARAMETER Experiment Name: At_Drought_cDNA_P Parameter: Tissue Value: Aerial
  misc_feature: MA Experiment 108572 PARAMETER Experiment Name: At_Drought_cDNA_P Parameter: Treatment Value: Drought vs. No Drought
  misc_feature: MA Experiment ID: 108573 Result: Up-regulated in Transcription
  misc_feature: MA Experiment 108573 PARAMETER Experiment Name: At_Drought_cDNA_P Parameter: Timepoint (hr) Value: 6
  misc_feature: MA Experiment 108573 PARAMETER Experiment Name: At_Drought_cDNA_P Parameter: Tissue Value: Aerial
  misc_feature: MA Experiment 108573 PARAMETER Experiment Name: At_Drought_cDNA_P Parameter: Treatment Value: Drought vs. No Drought
  misc_feature: MA Experiment ID: 108574 Result: Up-regulated in Transcription
  misc_feature: MA Experiment 108574 PARAMETER Experiment Name: At_Wounding__cDNA_P Parameter: Timepoint (hr) Value: 1
  misc_feature: MA Experiment 108574 PARAMETER Experiment Name: At_Wounding__cDNA_P Parameter: Tissue Value: Aerial
  misc_feature: MA Experiment 108574 PARAMETER Experiment Name: At_Wounding__cDNA_P Parameter: Treatment Value: Wounding vs. No Wounding
  misc_feature: MA Experiment ID: 108595 Result: Up-regulated in Transcription
  misc_feature: MA Experiment 108595 PARAMETER Experiment Name: At_Ler-pi_Ovule_cDNA_P Parameter: Plant Line Value: null
  misc_feature: MA Experiment ID: 20000185 Result: Down-regulated in Transcription
  misc_feature: MA Experiment 20000185 PARAMETER Experiment Name: At_Roots__P Parameter: Age (day) Value: 7 vs. 21
  misc_feature: MA Experiment 20000185 PARAMETER Experiment Name: At_Roots__P Parameter: Organism Value: A. thaliana
  misc_feature: MA Experiment 20000185 PARAMETER Experiment Name: At_Roots__P Parameter: Tissue Value: Roots vs. Whole Plant
  misc_feature: MA Experiment ID: 20000211 Result: Up-regulated in Transcription
  misc_feature: MA Experiment 20000211 PARAMETER Experiment Name: At_0.001percent_MeJA__P Parameter: Age (day) Value: 14
  misc_feature: MA Experiment 20000211 PARAMETER Experiment Name: At_0.001percent_MeJA__P Parameter: Organism Value: A. thaliana
  misc_feature: MA Experiment 20000211 PARAMETER Experiment Name: At_0.001percent_MeJA__P Parameter: Plant Line Value: WS
  misc_feature: MA Experiment 20000211 PARAMETER Experiment Name: At_0.001percent_MeJA__P Parameter: Timepoint (hr) Value: 1
  misc_feature: MA Experiment 20000211 PARAMETER Experiment Name: At_0.001percent_MeJA__P Parameter: Tissue Value: Aerial
  misc_feature: MA Experiment 20000211 PARAMETER Experiment Name: At_0.001percent_MeJA__P Parameter: Treatment Value: 0.001percent MeJA vs. No Treatment
  misc_feature: MA Experiment ID: 20000234 Result: Up-regulated in Transcription
  misc_feature: MA Experiment 20000234 PARAMETER Experiment Name: At_Siliques_P Parameter: Age (day) Value: 21
  misc_feature: MA Experiment 20000234 PARAMETER Experiment Name: At_Siliques_P Parameter: Organism Value: A. thaliana
  misc_feature: MA Experiment 20000234 PARAMETER Experiment Name: At_Siliques_P Parameter: Plant Line Value: WS
  misc_feature: MA Experiment 20000234 PARAMETER Experiment Name: At_Siliques_P Parameter: Tissue Value: Less Than 5mm Siliques vs. Whole Plant
  misc_feature: MA Experiment ID: 20000235 Result: Up-regulated in Transcription
  misc_feature: MA Experiment 20000235 PARAMETER Experiment Name: At_Siliques_P Parameter: Age (day) Value: 21
  misc_feature: MA Experiment 20000235 PARAMETER Experiment Name: At_Siliques_P Parameter: Organism Value: A. thaliana
  misc_feature: MA Experiment 20000235 PARAMETER Experiment Name: At_Siliques_P Parameter: Plant Line Value: WS
  misc_feature: MA Experiment 20000235 PARAMETER Experiment Name: At_Siliques_P Parameter: Tissue Value: 5-10mm Siliques vs. Whole Plant
  misc_feature: MA Experiment ID: 20000264 Result: Up-regulated in Transcription
  misc_feature: MA Experiment 20000264 PARAMETER Experiment Name: At_Open_Flower_P Parameter: Age (day) Value: 21
  misc_feature: MA Experiment 20000264 PARAMETER Experiment Name: At_Open_Flower_P Parameter: Plant Line Value: WS
  misc_feature: MA Experiment 20000264 PARAMETER Experiment Name: At_Open_Flower_P Parameter: Tissue Value: Open Flower vs. Whole Plant
  misc_feature: MA Experiment ID: 20000265 Result: Up-regulated in Transcription
  misc_feature: MA Experiment 20000265 PARAMETER Experiment Name: At_Open_Flower_P Parameter: Age (day) Value: 21
  misc_feature: MA Experiment 20000265 PARAMETER Experiment Name: At_Open_Flower_P Parameter: Plant Line Value: WS
  misc_feature: MA Experiment 20000265 PARAMETER Experiment Name: At_Open_Flower_P Parameter: Tissue Value: Closed Flower vs. Whole Plant
  misc_feature: MA Experiment ID: 20000439 Result: Down-regulated in Transcription
  misc_feature: MA Experiment 20000439 PARAMETER Experiment Name: At_Roots__P Parameter: Age (day) Value: 14 vs. 21
  misc_feature: MA Experiment 20000439 PARAMETER Experiment Name: At_Roots__P Parameter: Organism Value: A. thaliana
  misc_feature: MA Experiment 20000439 PARAMETER Experiment Name: At_Roots__P Parameter: Tissue Value: Roots vs. Whole Plant
  misc_feature: MA Experiment ID: 20000794 Result: Down-regulated in Transcription
  misc_feature: MA Experiment 20000794 PARAMETER Experiment Name: At_Petals_P Parameter: Age (day) Value: 23-25 days
  misc_feature: MA Experiment 20000794 PARAMETER Experiment Name: At_Petals_P Parameter: Plant Line Value: WS
  misc_feature: MA Experiment 20000794 PARAMETER Experiment Name: At_Petals_P Parameter: Tissue Value: Petals vs. Whole plant
  misc_feature: MA Experiment ID: 20001248 Result: Down-regulated in Transcription
  misc_feature: MA Experiment 20001248 PARAMETER Experiment Name: At_Far-red-induction_P Parameter: Age (day) Value: 7
  misc_feature: MA Experiment 20001248 PARAMETER Experiment Name: At_Far-red-induction_P Parameter: Light Value: Far-red vs. White
  misc_feature: MA Experiment 20001248 PARAMETER Experiment Name: At_Far-red-induction_P Parameter: Organism Value: A. thaliana
  misc_feature: MA Experiment 20001248 PARAMETER Experiment Name: At_Far-red-induction_P Parameter: Plant Line Value: Columbia
  misc_feature: MA Experiment 20001248 PARAMETER Experiment Name: At_Far-red-induction_P Parameter: Timepoint (hr) Value: 4
  misc_feature: MA Experiment 20001248 PARAMETER Experiment Name: At_Far-red-induction_P Parameter: Tissue Value: Whole Plant
  misc_feature: MA Experiment ID: 20001504 Result: Down-regulated in Transcription
  misc_feature: MA Experiment 20001504 PARAMETER Experiment Name: At_Far-red-enriched_P Parameter: Age (day) Value: 10
  misc_feature: MA Experiment 20001504 PARAMETER Experiment Name: At_Far-red-enriched_P Parameter: Light Value: Far-red enriched vs. White
  misc_feature: MA Experiment 20001504 PARAMETER Experiment Name: At_Far-red-enriched_P Parameter: Organism Value: A. thaliana
  misc_feature: MA Experiment 20001504 PARAMETER Experiment Name: At_Far-red-enriched_P Parameter: Plant Line Value: Columbia
  misc_feature: MA Experiment 20001504 PARAMETER Experiment Name: At_Far-red-enriched_P Parameter: Timepoint (day) Value: 6
  misc_feature: MA Experiment 20001504 PARAMETER Experiment Name: At_Far-red-enriched_P Parameter: Tissue Value: Whole Plant
  misc_feature: MA Experiment ID: 20001557 Result: Down-regulated in Transcription
  misc_feature: MA Experiment 20001557 PARAMETER Experiment Name: At_Drought_Soil_Dry_P Parameter: Age (day) Value: 27
  misc_feature: MA Experiment 20001557 PARAMETER Experiment Name: At_Drought_Soil_Dry_P Parameter: Organism Value: A. thaliana
  misc_feature: MA Experiment 20001557 PARAMETER Experiment Name: At_Drought_Soil_Dry_P Parameter: Plant Line Value: WS
  misc_feature: MA Experiment 20001557 PARAMETER Experiment Name: At_Drought_Soil_Dry_P Parameter: Post Timepoint (hr) Value: 3
  misc_feature: MA Experiment 20001557 PARAMETER Experiment Name: At_Drought_Soil_Dry_P Parameter: Post-Treatment Value: Re-Water vs. No Drought
  misc_feature: MA Experiment 20001557 PARAMETER Experiment Name: At_Drought_Soil_Dry_P Parameter: Timepoint (day) Value: 13
  misc_feature: MA Experiment 20001557 PARAMETER Experiment Name: At_Drought_Soil_Dry_P Parameter: Treatment Value: Drought vs. No Drought
  misc_feature: MA Experiment ID: 20001558 Result: Down-regulated in Transcription
  misc_feature: MA Experiment 20001558 PARAMETER Experiment Name: At_Drought_Soil_Dry_P Parameter: Age (day) Value: 27
  misc_feature: MA Experiment 20001558 PARAMETER Experiment Name: At_Drought_Soil_Dry_P Parameter: Organism Value: A. thaliana
  misc_feature: MA Experiment 20001558 PARAMETER Experiment Name: At_Drought_Soil_Dry_P Parameter: Plant Line Value: WS
  misc_feature: MA Experiment 20001558 PARAMETER Experiment Name: At_Drought_Soil_Dry_P Parameter: Post Timepoint (hr) Value: 6
  misc_feature: MA Experiment 20001558 PARAMETER Experiment Name: At_Drought_Soil_Dry_P Parameter: Post-Treatment Value: Re-Water vs. No Drought
  misc_feature: MA Experiment 20001558 PARAMETER Experiment Name: At_Drought_Soil_Dry_P Parameter: Timepoint (day) Value: 13
  misc_feature: MA Experiment 20001558 PARAMETER Experiment Name: At_Drought_Soil_Dry_P Parameter: Treatment Value: Drought vs. No Drought
  misc_feature: MA Experiment ID: 20001559 Result: Down-regulated in Transcription
  misc_feature: MA Experiment 20001559 PARAMETER Experiment Name: At_Drought_Soil_Dry_P Parameter: Age (day) Value: 28
  misc_feature: MA Experiment 20001559 PARAMETER Experiment Name: At_Drought_Soil_Dry_P Parameter: Organism Value: A. thaliana
  misc_feature: MA Experiment 20001559 PARAMETER Experiment Name: At_Drought_Soil_Dry_P Parameter: Plant Line Value: WS
  misc_feature: MA Experiment 20001559 PARAMETER Experiment Name: At_Drought_Soil_Dry_P Parameter: Post Timepoint (hr) Value: 29
  misc_feature: MA Experiment 20001559 PARAMETER Experiment Name: At_Drought_Soil_Dry_P Parameter: Post-Treatment Value: Re-Water vs. No Drought
  misc_feature: MA Experiment 20001559 PARAMETER Experiment Name: At_Drought_Soil_Dry_P Parameter: Timepoint (day) Value: 14
  misc_feature: MA Experiment 20001559 PARAMETER Experiment Name: At_Drought_Soil_Dry_P Parameter: Treatment Value: Drought vs. No Drought
  misc_feature: MA Experiment ID: 20001560 Result: Down-regulated in Transcription
  misc_feature: MA Experiment 20001560 PARAMETER Experiment Name: At_Drought_Soil_Dry_P Parameter: Age (day) Value: 28
  misc_feature: MA Experiment 20001560 PARAMETER Experiment Name: At_Drought_Soil_Dry_P Parameter: Organism Value: A. thaliana
  misc_feature: MA Experiment 20001560 PARAMETER Experiment Name: At_Drought_Soil_Dry_P Parameter: Plant Line Value: WS
  misc_feature: MA Experiment 20001560 PARAMETER Experiment Name: At_Drought_Soil_Dry_P Parameter: Post Timepoint (hr) Value: None
  misc_feature: MA Experiment 20001560 PARAMETER Experiment Name: At_Drought_Soil_Dry_P Parameter: Post-Treatment Value: None
  misc_feature: MA Experiment 20001560 PARAMETER Experiment Name: At_Drought_Soil_Dry_P Parameter: Timepoint (day) Value: 14
  misc_feature: MA Experiment 20001560 PARAMETER Experiment Name: At_Drought_Soil_Dry_P Parameter: Treatment Value: Drought vs. No Drought
  misc_feature: MA Experiment ID: 20001906 Result: Down-regulated in Transcription
  misc_feature: MA Experiment 20001906 PARAMETER Experiment Name: At_Drought_Reproduction_P Parameter: Age (day) Value: 35
  misc_feature: MA Experiment 20001906 PARAMETER Experiment Name: At_Drought_Reproduction_P Parameter: Organism Value: A. thaliana
  misc_feature: MA Experiment 20001906 PARAMETER Experiment Name: At_Drought_Reproduction_P Parameter: Plant Line Value: WS
  misc_feature: MA Experiment 20001906 PARAMETER Experiment Name: At_Drought_Reproduction_P Parameter: Timepoint (day) Value: 5
  misc_feature: MA Experiment 20001906 PARAMETER Experiment Name: At_Drought_Reproduction_P Parameter: Tissue Value: Siliques
  misc_feature: MA Experiment 20001906 PARAMETER Experiment Name: At_Drought_Reproduction_P Parameter: Treatment Value: Drought vs. No Drought
  misc_feature: MA Experiment ID: 20001908 Result: Down-regulated in Transcription
  misc_feature: MA Experiment 20001908 PARAMETER Experiment Name: At_Drought_Reproduction_P Parameter: Age (day) Value: 40
  misc_feature: MA Experiment 20001908 PARAMETER Experiment Name: At_Drought_Reproduction_P Parameter: Organism Value: A. thaliana
  misc_feature: MA Experiment 20001908 PARAMETER Experiment Name: At_Drought_Reproduction_P Parameter: Plant Line Value: WS
  misc_feature: MA Experiment 20001908 PARAMETER Experiment Name: At_Drought_Reproduction_P Parameter: Timepoint (day) Value: 10
  misc_feature: MA Experiment 20001908 PARAMETER Experiment Name: At_Drought_Reproduction_P Parameter: Tissue Value: Siliques
  misc_feature: MA Experiment 20001908 PARAMETER Experiment Name: At_Drought_Reproduction_P Parameter: Treatment Value: Drought vs. No Drought
  misc_feature: MA Experiment ID: 20001911 Result: Down-regulated in Transcription
  misc_feature: MA Experiment 20001911 PARAMETER Experiment Name: At_Drought_Reproduction_P Parameter: Age (day) Value: 40
  misc_feature: MA Experiment 20001911 PARAMETER Experiment Name: At_Drought_Reproduction_P Parameter: Organism Value: A. thaliana
  misc_feature: MA Experiment 20001911 PARAMETER Experiment Name: At_Drought_Reproduction_P Parameter: Plant Line Value: WS
  misc_feature: MA Experiment 20001911 PARAMETER Experiment Name: At_Drought_Reproduction_P Parameter: Timepoint (day) Value: 10
  misc_feature: MA Experiment 20001911 PARAMETER Experiment Name: At_Drought_Reproduction_P Parameter: Tissue Value: Flowers
  misc_feature: MA Experiment 20001911 PARAMETER Experiment Name: At_Drought_Reproduction_P Parameter: Treatment Value: Drought vs. No Drought

SEQ ID NO: 32932 - protein, 252 aa, Arabidopsis thaliana; identical to SEQ ID NO: 29342
  peptide (1)..(252): Ceres Seq. ID no. 13493752
  misc_feature (3)..(252): Homolog of NCBI NO: 28140256 NR Description: putative 6-phosphogluconolactonase [Elaeis
  misc_feature (3)..(252): Homolog of NCBI NO: 18420789 NR Description: 6-phosphogluconolactonase-related protein
  misc_feature (3)..(252): Homolog of NCBI NO: 10177901 NR Description: 6-phosphogluconolactonase-like protein
  misc_feature (3)..(252): Homolog of NCBI NO: 21554291 NR Description: 6-phosphogluconolactonase-like protein
  misc_feature (1)..(252): Homolog of NCBI NO: 21536675 NR Description: 6-phosphogluconolactonase-like protein
  misc_feature (5)..(252): Homolog of NCBI NO: 15238523 NR Description: 6-phosphogluconolactonase-related protein
  misc_feature (1)..(252): Homolog of NCBI NO: 15229127 NR Description: 6-phosphogluconolactonase - like protein
  misc_feature (1)..(252): Homolog of NCBI NO: 14009294 NR Description: putative 6-phosphogluconolactonase [Brassica
  misc_feature (1)..(252): Homolog of NCBI NO: 21537412 NR Description: 6-phosphogluconolactonase-like protein
  misc_feature (1)..(252): Homolog of NCBI NO: 15238526 NR Description: 6-phosphogluconolactonase-related protein

SEQ ID NO: 32933 - protein, 247 aa, Arabidopsis thaliana; identical to SEQ ID NO: 29343
  peptide (1)..(247): Ceres Seq. ID no. 13493753
  misc_feature (1)..(247): Homolog of NCBI NO: 28140256 NR Description: putative 6-phosphogluconolactonase [Elaeis
  misc_feature (1)..(247): Homolog of NCBI NO: 18420789 NR Description: 6-phosphogluconolactonase-related protein
  misc_feature (1)..(247): Homolog of NCBI NO: 10177901 NR Description: 6-phosphogluconolactonase-like protein
  misc_feature (1)..(247): Homolog of NCBI NO: 21554291 NR Description: 6-phosphogluconolactonase-like protein
  misc_feature (1)..(247): Homolog of NCBI NO: 21536675 NR Description: 6-phosphogluconolactonase-like protein
  misc_feature (1)..(247): Homolog of NCBI NO: 15238523 NR Description: 6-phosphogluconolactonase-related protein
  misc_feature (1)..(247): Homolog of NCBI NO: 15229127 NR Description: 6-phosphogluconolactonase - like protein
  misc_feature (1)..(247): Homolog of NCBI NO: 14009294 NR Description: putative 6-phosphogluconolactonase [Brassica
  misc_feature (1)..(247): Homolog of NCBI NO: 21537412 NR Description: 6-phosphogluconolactonase-like protein
  misc_feature (1)..(247): Homolog of NCBI NO: 15238526 NR Description: 6-phosphogluconolactonase-related protein

SEQ ID NO: 32934 - protein, 234 aa, Arabidopsis thaliana; identical to SEQ ID NO: 29344
  peptide (1)..(234): Ceres Seq. ID no. 13493754
  misc_feature (1)..(234): Homolog of NCBI NO: 28140256 NR Description: putative 6-phosphogluconolactonase [Elaeis
  misc_feature (1)..(234): Homolog of NCBI NO: 18420789 NR Description: 6-phosphogluconolactonase-related protein
  misc_feature (1)..(234): Homolog of NCBI NO: 10177901 NR Description: 6-phosphogluconolactonase-like protein
  misc_feature (1)..(234): Homolog of NCBI NO: 21554291 NR Description: 6-phosphogluconolactonase-like protein
  misc_feature (1)..(234): Homolog of NCBI NO: 21536675 NR Description: 6-phosphogluconolactonase-like protein
  misc_feature (1)..(234): Homolog of NCBI NO: 15238523 NR Description: 6-phosphogluconolactonase-related protein
  misc_feature (1)..(234): Homolog of NCBI NO: 15229127 NR Description: 6-phosphogluconolactonase - like protein
  misc_feature (1)..(234): Homolog of NCBI NO: 14009294 NR Description: putative 6-phosphogluconolactonase [Brassica
  misc_feature (1)..(234): Homolog of NCBI NO: 21537412 NR Description: 6-phosphogluconolactonase-like protein
  misc_feature (1)..(234): Homolog of NCBI NO: 15238526 NR Description: 6-phosphogluconolactonase-related protein

SEQ ID NO: 32935 - DNA, 897 bp, Arabidopsis thaliana; identical to SEQ ID NO: 26501
  misc_feature (1)..(897): Ceres Seq. ID no. 12603175
  misc_feature: MA Experiment ID: 108434 Result: Up-regulated in Transcription
  misc_feature: MA Experiment 108434 PARAMETER Experiment Name: At_Root_Tips_cDNA_P Parameter: Tissue Value: Root Tips
  misc_feature: MA Experiment ID: 108462 Result: Down-regulated in Transcription
  misc_feature: MA Experiment 108462 PARAMETER Experiment Name: At_Germinating_Seeds_cDNA_P Parameter: Age (day) Value: 2 vs. 0
  misc_feature: MA Experiment 108462 PARAMETER Experiment Name: At_Germinating_Seeds_cDNA_P Parameter: Tissue Value: Germinating Seeds
  misc_feature: MA Experiment ID: 108463 Result: Down-regulated in Transcription
  misc_feature: MA Experiment 108463 PARAMETER Experiment Name: At_Germinating_Seeds_cDNA_P Parameter: Age (day) Value: 3 vs. 0
  misc_feature: MA Experiment 108463 PARAMETER Experiment Name: At_Germinating_Seeds_cDNA_P Parameter: Tissue Value: Germinating Seeds
  misc_feature: MA Experiment ID: 108573 Result: Down-regulated in Transcription
  misc_feature: MA Experiment 108573 PARAMETER Experiment Name: At_Drought_cDNA_P Parameter: Timepoint (hr) Value: 6
  misc_feature: MA Experiment 108573 PARAMETER Experiment Name: At_Drought_cDNA_P Parameter: Tissue Value: Aerial
  misc_feature: MA Experiment 108573 PARAMETER Experiment Name: At_Drought_cDNA_P Parameter: Treatment Value: Drought vs. No Drought
  misc_feature: MA Experiment ID: 20000224 Result: Down-regulated in Transcription
  misc_feature: MA Experiment ID: 20000227 Result: Up-regulated in Transcription
  misc_feature: MA Experiment 20000227 PARAMETER Experiment Name: At_Root-Tips-vs-Tops_P Parameter: Tissue Value: Root Tips vs. Root Tops
  misc_feature: MA Experiment ID: 20000328 Result: Up-regulated in Transcription
  misc_feature: MA Experiment 20000328 PARAMETER Experiment Name: At_42deg_Heat_Sub_P Parameter: Age (day) Value: 14
  misc_feature: MA Experiment 20000328 PARAMETER Experiment Name: At_42deg_Heat_Sub_P Parameter: Organism Value: A. thaliana
  misc_feature: MA Experiment 20000328 PARAMETER Experiment Name: At_42deg_Heat_Sub_P Parameter: Plant Line Value: WS
  misc_feature: MA Experiment 20000328 PARAMETER Experiment Name: At_42deg_Heat_Sub_P Parameter: Temperature (deg C) Value: 42 vs. 22
  misc_feature: MA Experiment 20000328 PARAMETER Experiment Name: At_42deg_Heat_Sub_P Parameter: Timepoint (hr) Value: 6
  misc_feature: MA Experiment 20000328 PARAMETER Experiment Name: At_42deg_Heat_Sub_P Parameter: Tissue Value: Aerial
  misc_feature: MA Experiment ID: 20001557 Result: Up-regulated in Transcription
  misc_feature: MA Experiment 20001557 PARAMETER Experiment Name: At_Drought_Soil_Dry_P Parameter: Age (day) Value: 27
  misc_feature: MA Experiment 20001557 PARAMETER Experiment Name: At_Drought_Soil_Dry_P Parameter: Organism Value: A. thaliana
  misc_feature: MA Experiment 20001557 PARAMETER Experiment Name: At_Drought_Soil_Dry_P Parameter: Plant Line Value: WS
  misc_feature: MA Experiment 20001557 PARAMETER Experiment Name: At_Drought_Soil_Dry_P Parameter: Post Timepoint (hr) Value: 3
  misc_feature: MA Experiment 20001557 PARAMETER Experiment Name: At_Drought_Soil_Dry_P Parameter: Post-Treatment Value: Re-Water vs. No Drought
  misc_feature: MA Experiment 20001557 PARAMETER Experiment Name: At_Drought_Soil_Dry_P Parameter: Timepoint (day) Value: 13
  misc_feature: MA Experiment 20001557 PARAMETER Experiment Name: At_Drought_Soil_Dry_P Parameter: Treatment Value: Drought vs. No Drought
  misc_feature: MA Experiment ID: 20001558 Result: Up-regulated in Transcription
  misc_feature: MA Experiment 20001558 PARAMETER Experiment Name: At_Drought_Soil_Dry_P Parameter: Age (day) Value: 27
  misc_feature: MA Experiment 20001558 PARAMETER Experiment Name: At_Drought_Soil_Dry_P Parameter: Organism Value: A. thaliana
  misc_feature: MA Experiment 20001558 PARAMETER Experiment Name: At_Drought_Soil_Dry_P Parameter: Plant Line Value: WS
  misc_feature: MA Experiment 20001558 PARAMETER Experiment Name: At_Drought_Soil_Dry_P Parameter: Post Timepoint (hr) Value: 6
  misc_feature: MA Experiment 20001558 PARAMETER Experiment Name: At_Drought_Soil_Dry_P Parameter: Post-Treatment Value: Re-Water vs. No Drought
  misc_feature: MA Experiment 20001558 PARAMETER Experiment Name: At_Drought_Soil_Dry_P Parameter: Timepoint (day) Value: 13
  misc_feature: MA Experiment 20001558 PARAMETER Experiment Name: At_Drought_Soil_Dry_P Parameter: Treatment Value: Drought vs. No Drought
  misc_feature: MA Experiment ID: 20001560 Result: Up-regulated in Transcription
  misc_feature: MA Experiment 20001560 PARAMETER Experiment Name: At_Drought_Soil_Dry_P Parameter: Age (day) Value: 28
  misc_feature: MA Experiment 20001560 PARAMETER Experiment Name: At_Drought_Soil_Dry_P Parameter: Organism Value: A. thaliana
  misc_feature: MA Experiment 20001560 PARAMETER Experiment Name: At_Drought_Soil_Dry_P Parameter: Plant Line Value: WS
  misc_feature: MA Experiment 20001560 PARAMETER Experiment Name: At_Drought_Soil_Dry_P Parameter: Post Timepoint (hr) Value: None
  misc_feature: MA Experiment 20001560 PARAMETER Experiment Name: At_Drought_Soil_Dry_P Parameter: Post-Treatment Value: None
  misc_feature: MA Experiment 20001560 PARAMETER Experiment Name: At_Drought_Soil_Dry_P Parameter: Timepoint (day) Value: 14
  misc_feature: MA Experiment 20001560 PARAMETER Experiment Name: At_Drought_Soil_Dry_P Parameter: Treatment Value: Drought vs. No Drought

SEQ ID NO: 32936 - protein, 228 aa, Arabidopsis thaliana; identical to SEQ ID NO: 26502
  peptide (1)..(228): Ceres Seq. ID no. 12603176
  misc_feature (16)..(163): Pfam Name: Ribosomal protein L19e Pfam Description: Ribosomal protein L19e
  misc_feature (16)..(163): Pfam Name: Ribosomal protein L19e Pfam Description: Ribosomal protein L19e
  misc_feature (15)..(196): Homolog of NCBI NO: 28630352 NR Description: ribosomal protein L19 [Branchiostoma lanceolatum]
  misc_feature (15)..(196): Homolog of NCBI NO: 28200276 NR Description: ribosomal protein L19 [Branchiostoma belcheri
  misc_feature (15)..(199): Homolog of NCBI NO: 32401377 NR Description: ribosomal protein L19 [Triticum aestivum]
  misc_feature (15)..(227): Homolog of NCBI NO: 29837764 NR Description: putative ribosomal protein L19
  misc_feature (15)..(228): Homolog of NCBI NO: 15228314 NR Description: putative ribosomal protein
  misc_feature (15)..(196): Homolog of NCBI NO: 28630352 NR Description: ribosomal protein L19 [Branchiostoma lanceolatum]
  misc_feature (15)..(199): Homolog of NCBI NO: 32401377 NR Description: ribosomal protein L19 [Triticum aestivum]
  misc_feature (15)..(228): Homolog of NCBI NO: 15228314 NR Description: putative ribosomal protein
  misc_feature (15)..(228): Homolog of NCBI NO: 15218602 NR Description: ribosomal protein L19, putative
  misc_feature (15)..(228): Homolog of NCBI NO: 18087585 NR Description: At1g02780/T14P4_3 [Arabidopsis thaliana]
  misc_feature (15)..(228): Homolog of NCBI NO: 15235290 NR Description: putative ribosomal protein L19
  misc_feature (15)..(214): Homolog of NCBI NO: 7440943 NR Description: ribosomal protein L19.T2H3.3 - Arabidopsis
  misc_feature (15)..(225): Homolog of NCBI NO: 40287526 NR Description: 60S ribosomal protein L19 [Capsicum annuum]
  misc_feature (15)..(227): Homolog of NCBI NO: 29837764 NR Description: putative ribosomal protein L19
  misc_feature (15)..(196): Homolog of NCBI NO: 28200276 NR Description: ribosomal protein L19 [Branchiostoma belcheri
  misc_feature (15)..(225): Homolog of NCBI NO: 40287526 NR Description: 60S ribosomal protein L19 [Capsicum annuum]
  misc_feature (15)..(214): Homolog of NCBI NO: 7440943 NR Description: ribosomal protein L19.T2H3.3 - Arabidopsis
  misc_feature (15)..(228): Homolog of NCBI NO: 15235290 NR Description: putative ribosomal protein L19
  misc_feature (15)..(228): Homolog of NCBI NO: 18087585 NR Description: At1g02780/T14P4_3 [Arabidopsis thaliana]
  misc_feature (15)..(228): Homolog of NCBI NO: 15218602 NR Description: ribosomal protein L19, putative

SEQ ID NO: 32937 - protein, 214 aa, Arabidopsis thaliana [sequence omitted]

SEQ ID NO: 32938 - protein, 200 aa, Arabidopsis thaliana; identical to SEQ ID NO: 26504
  peptide (1)..(200): Ceres Seq. ID no. 12603178
  misc_feature (1)..(135): Pfam Name: Ribosomal protein L19e Pfam Description: Ribosomal protein L19e
  misc_feature (1)..(135): Pfam Name: Ribosomal protein L19e Pfam Description: Ribosomal protein L19e
  misc_feature (1)..(168): Homolog of NCBI NO: 28630352 NR Description: ribosomal protein L19 [Branchiostoma lanceolatum]
  misc_feature (1)..(168): Homolog of NCBI NO: 28200276 NR Description: ribosomal protein L19 [Branchiostoma belcheri
  misc_feature (1)..(171): Homolog of NCBI NO: 32401377 NR Description: ribosomal protein L19 [Triticum aestivum]
  misc_feature (1)..(199): Homolog of NCBI NO: 29837764 NR Description: putative ribosomal protein L19
  misc_feature (1)..(200): Homolog of NCBI NO: 15228314 NR Description: putative ribosomal protein
  misc_feature (1)..(168): Homolog of NCBI NO: 28630352 NR Description: ribosomal protein L19 [Branchiostoma lanceolatum]
  misc_feature (1)..(171): Homolog of NCBI NO: 32401377 NR Description: ribosomal protein L19 [Triticum aestivum]
  misc_feature (1)..(200): Homolog of NCBI NO: 15228314 NR Description: putative ribosomal protein
  misc_feature (1)..(200): Homolog of NCBI NO: 15218602 NR Description: ribosomal protein L19, putative
  misc_feature (1)..(200): Homolog of NCBI NO: 18087585 NR Description: At1g02780/T14P4_3 [Arabidopsis thaliana]
  misc_feature (1)..(200): Homolog of NCBI NO: 15235290 NR Description: putative ribosomal protein L19
  misc_feature (1)..(186): Homolog of NCBI NO: 7440943 NR Description: ribosomal protein L19.T2H3.3 - Arabidopsis
  misc_feature (1)..(197): Homolog of NCBI NO: 40287526 NR Description: 60S ribosomal protein L19 [Capsicum annuum]
  misc_feature (1)..(199): Homolog of NCBI NO: 29837764 NR Description: putative ribosomal protein L19
  misc_feature (1)..(168): Homolog of NCBI NO: 28200276 NR Description: ribosomal protein L19 [Branchiostoma belcheri
  misc_feature (1)..(197): Homolog of NCBI NO: 40287526 NR Description: 60S ribosomal protein L19 [Capsicum annuum]
  misc_feature (1)..(186): Homolog of NCBI NO: 7440943 NR Description: ribosomal protein L19.T2H3.3 - Arabidopsis
  misc_feature (1)..(200): Homolog of NCBI NO: 15235290 NR Description: putative ribosomal protein L19
  misc_feature (1)..(200): Homolog of NCBI NO: 18087585 NR Description: At1g02780/T14P4_3 [Arabidopsis thaliana]
  misc_feature (1)..(200): Homolog of NCBI NO: 15218602 NR Description: ribosomal protein L19, putative

SEQ ID NO: 32939 - DNA, 648 bp, Arabidopsis thaliana; identical to SEQ ID NO: 29349
  misc_feature (1)..(648): Ceres Seq. ID no. 13491518
  misc_feature: MA Experiment ID: 108434 Result: Down-regulated in Transcription
  misc_feature: MA Experiment 108434 PARAMETER Experiment Name: At_Root_Tips_cDNA_P Parameter: Tissue Value: Root Tips
  misc_feature: MA Experiment ID: 108464 Result: Up-regulated in Transcription
  misc_feature: MA Experiment 108464 PARAMETER Experiment Name: At_Germinating_Seeds_cDNA_P Parameter: Age (day) Value: 4 vs. 0
  misc_feature: MA Experiment 108464 PARAMETER Experiment Name: At_Germinating_Seeds_cDNA_P Parameter: Tissue Value: Germinating Seeds
  misc_feature: MA Experiment ID: 108585 Result: Up-regulated in Transcription
  misc_feature: MA Experiment 108585 PARAMETER Experiment Name: At_5mM_NaNP_cDNA_P Parameter: Timepoint (hr) Value: 6
  misc_feature: MA Experiment 108585 PARAMETER Experiment Name: At_5mM_NaNP_cDNA_P Parameter: Tissue Value: Aerial
  misc_feature: MA Experiment 108585 PARAMETER Experiment Name: At_5mM_NaNP_cDNA_P Parameter: Treatment Value: null
  misc_feature: MA Experiment ID: 108607 Result: Up-regulated in Transcription
  misc_feature: MA Experiment 108607 PARAMETER Experiment Name: At_100uM_ABA_cDNA_P Parameter: Timepoint (hr) Value: 4
  misc_feature: MA Experiment 108607 PARAMETER Experiment Name: At_100uM_ABA_cDNA_P Parameter: Tissue Value: Aerial
  misc_feature: MA Experiment 108607 PARAMETER Experiment Name: At_100uM_ABA_cDNA_P Parameter: Treatment Value: 100uM ABA vs. No Treatment
  misc_feature: MA Experiment ID: 108668 Result: Up-regulated in Transcription
  misc_feature: MA Experiment 108668 PARAMETER Experiment Name: At_2mM_SA_cDNA_P Parameter: Plant Line Value: WS
  misc_feature: MA Experiment 108668 PARAMETER Experiment Name: At_2mM_SA_cDNA_P Parameter: Timepoint (hr) Value: 6
  misc_feature: MA Experiment 108668 PARAMETER Experiment Name: At_2mM_SA_cDNA_P Parameter: Treatment Value: 2mM SA vs. No Treatment
  misc_feature: MA Experiment ID: 20000069 Result: Up-regulated in Transcription
  misc_feature: MA Experiment 20000069 PARAMETER Experiment Name: At_100uM_ABA_Mutants_cDNA_P Parameter: Plant Line Value: CS23
  misc_feature: MA Experiment 20000069 PARAMETER Experiment Name: At_100uM_ABA_Mutants_cDNA_P Parameter: Timepoint (hr) Value: 6
  misc_feature: MA Experiment 20000069 PARAMETER Experiment Name: At_100uM_ABA_Mutants_cDNA_P Parameter: Tissue Value: Aerial
  misc_feature: MA Experiment 20000069 PARAMETER Experiment Name: At_100uM_ABA_Mutants_cDNA_P Parameter: Treatment Value: 100uM ABA vs. No Treatment
  misc_feature: MA Experiment ID: 20000070 Result: Up-regulated in Transcription
  misc_feature: MA Experiment 20000070 PARAMETER Experiment Name: At_100uM_ABA_Mutants_cDNA_P Parameter: Plant Line Value: CS24
  misc_feature: MA Experiment 20000070 PARAMETER Experiment Name: At_100uM_ABA_Mutants_cDNA_P Parameter: Timepoint (hr) Value: 6
  misc_feature: MA Experiment 20000070 PARAMETER Experiment Name: At_100uM_ABA_Mutants_cDNA_P Parameter: Tissue Value: Aerial
  misc_feature: MA Experiment 20000070 PARAMETER Experiment Name: At_100uM_ABA_Mutants_cDNA_P Parameter: Treatment Value: 100uM ABA vs. No Treatment
  misc_feature: MA Experiment ID: 20000087 Result: Up-regulated in Transcription
  misc_feature: MA Experiment 20000087 PARAMETER Experiment Name: At_100uM_ABA_Mutants_cDNA_P Parameter: Plant Line Value: WS
  misc_feature: MA Experiment 20000087 PARAMETER Experiment Name: At_100uM_ABA_Mutants_cDNA_P Parameter: Timepoint (hr) Value: 6
  misc_feature: MA Experiment 20000087 PARAMETER Experiment Name: At_100uM_ABA_Mutants_cDNA_P Parameter: Tissue Value: Aerial
  misc_feature: MA Experiment 20000087 PARAMETER Experiment Name: At_100uM_ABA_Mutants_cDNA_P Parameter: Treatment Value: 100uM ABA vs. No Treatment
  misc_feature: MA Experiment ID: 20000089 Result: Up-regulated in Transcription
  misc_feature: MA Experiment ID: 20000111 Result: Down-regulated in Transcription
  misc_feature: MA Experiment 20000111 PARAMETER Experiment Name: At_42deg_Heat_cDNA_P Parameter: Temperature (deg C) Value: 42 vs. 22
  misc_feature: MA Experiment 20000111 PARAMETER Experiment Name: At_42deg_Heat_cDNA_P Parameter: Timepoint (hr) Value: 6
  misc_feature: MA Experiment 20000111 PARAMETER Experiment Name: At_42deg_Heat_cDNA_P Parameter: Tissue Value: Aerial
  misc_feature: MA Experiment ID: 20000113 Result: Down-regulated in Transcription
  misc_feature: MA Experiment 20000113 PARAMETER Experiment Name: At_42deg_Heat_cDNA_P Parameter: Temperature (deg C) Value: 42 vs. 22
  misc_feature: MA Experiment 20000113 PARAMETER Experiment Name: At_42deg_Heat_cDNA_P Parameter: Timepoint (hr) Value: 8
  misc_feature: MA Experiment 20000113 PARAMETER Experiment Name: At_42deg_Heat_cDNA_P Parameter: Tissue Value: Aerial
  misc_feature: MA Experiment ID: 20000117 Result: Up-regulated in Transcription
  misc_feature: MA Experiment 20000117 PARAMETER Experiment Name: At_100uM_ABA_Mutants_cDNA_P Parameter: Plant Line Value: Columbia
  misc_feature: MA Experiment 20000117 PARAMETER Experiment Name: At_100uM_ABA_Mutants_cDNA_P Parameter: Timepoint (hr) Value: 6
  misc_feature: MA Experiment 20000117 PARAMETER Experiment Name: At_100uM_ABA_Mutants_cDNA_P Parameter: Tissue Value: Aerial
  misc_feature: MA Experiment 20000117 PARAMETER Experiment Name: At_100uM_ABA_Mutants_cDNA_P Parameter: Treatment Value: 100uM ABA vs. No Treatment
  misc_feature: MA Experiment ID: 20000307 Result: Up-regulated in Transcription
  misc_feature: MA Experiment 20000307 PARAMETER Experiment Name: At_Germinating_Seeds_Sub_P Parameter: Age (hr) Value: 24 vs. 0
  misc_feature: MA Experiment 20000307 PARAMETER Experiment Name: At_Germinating_Seeds_Sub_P Parameter: Organism Value: A. thaliana
  misc_feature: MA Experiment 20000307 PARAMETER Experiment Name: At_Germinating_Seeds_Sub_P Parameter: Plant Line Value: WS
  misc_feature: MA Experiment 20000307 PARAMETER Experiment Name: At_Germinating_Seeds_Sub_P Parameter: Tissue Value: Germinating Seeds
  misc_feature: MA Experiment ID: 20000315 Result: Down-regulated in Transcription
  misc_feature: MA Experiment 20000315 PARAMETER Experiment Name: At_14day_Shoots-Roots_Sub_P Parameter: Age (day) Value: 14
  misc_feature: MA Experiment 20000315 PARAMETER Experiment Name: At_14day_Shoots-Roots_Sub_P Parameter: Organism Value: A. thaliana
  misc_feature: MA Experiment 20000315 PARAMETER Experiment Name: At_14day_Shoots-Roots_Sub_P Parameter: Plant Line Value: WS
  misc_feature: MA Experiment 20000315 PARAMETER Experiment Name: At_14day_Shoots-Roots_Sub_P Parameter: Tissue Value: Shoots vs. Whole Plant
  misc_feature: MA Experiment ID: 20000328 Result: Down-regulated in Transcription
  misc_feature: MA Experiment 20000328 PARAMETER Experiment Name: At_42deg_Heat_Sub_P Parameter: Age (day) Value: 14
  misc_feature: MA Experiment 20000328 PARAMETER Experiment Name: At_42deg_Heat_Sub_P Parameter: Organism Value: A. thaliana
  misc_feature: MA Experiment 20000328 PARAMETER Experiment Name: At_42deg_Heat_Sub_P Parameter: Plant Line Value: WS
  misc_feature: MA Experiment 20000328 PARAMETER Experiment Name: At_42deg_Heat_Sub_P Parameter: Temperature (deg C) Value: 42 vs. 22
  misc_feature: MA Experiment 20000328 PARAMETER Experiment Name: At_42deg_Heat_Sub_P Parameter: Timepoint (hr) Value: 6
  misc_feature: MA Experiment 20000328 PARAMETER Experiment Name: At_42deg_Heat_Sub_P Parameter: Tissue Value: Aerial
  misc_feature: MA Experiment ID: 20000347 Result: Up-regulated in Transcription
  misc_feature: MA Experiment 20000347 PARAMETER Experiment Name: At_2mM_SA_Sub_P Parameter: Age (day) Value: 14
  misc_feature: MA Experiment 20000347 PARAMETER Experiment Name: At_2mM_SA_Sub_P Parameter: Organism Value: A. thaliana
  misc_feature: MA Experiment 20000347 PARAMETER Experiment Name: At_2mM_SA_Sub_P Parameter: Plant Line Value: WS
  misc_feature: MA Experiment 20000347 PARAMETER Experiment Name: At_2mM_SA_Sub_P Parameter: Timepoint (hr) Value: 6
  misc_feature: MA Experiment 20000347 PARAMETER Experiment Name: At_2mM_SA_Sub_P Parameter: Tissue Value: Aerial
  misc_feature: MA Experiment 20000347 PARAMETER Experiment Name: At_2mM_SA_Sub_P Parameter: Treatment Value: 2mM SA vs. No Treatment

SEQ ID NO: 32940 - protein, 166 aa, Arabidopsis thaliana; identical to SEQ ID NO: 29350
  peptide (1)..(166): Ceres Seq. ID no. 13491519
  misc_feature (2)..(159): Pfam Name: Demethylmenaquinone methyltransferase Pfam Description: Demethylmenaquinone methyltransferase
  misc_feature (1)..(160): Homolog of NCBI NO: 23103535 NR Description: hypothetical protein [Azotobacter vinelandii]
  misc_feature (1)..(160): Homolog of NCBI NO: 34497095 NR Description: S-adenosylmethionine:2-demethylmenaquinone
  misc_feature (4)..(164): Homolog of NCBI NO: 17546073 NR Description: PROBABLE
  misc_feature (1)..(164): Homolog of NCBI NO: 22978085 NR Description: hypothetical protein [Ralstonia metallidurans]
  misc_feature (1)..(164): Homolog of NCBI NO: 22982141 NR Description: hypothetical protein [Burkholderia fungorum]
  misc_feature (1)..(166): Homolog of NCBI NO: 15241161 NR Description: dimethylmenaquinone methyltransferase family
  misc_feature (4)..(166): Homolog of NCBI NO: 34910724 NR Description: S-adenosylmethionine:2-demethylmenaquinone
  misc_feature (1)..(166): Homolog of NCBI NO: 15232963 NR Description: dimethylmenaquinone methyltransferase family
  misc_feature (1)..(166): Homolog of NCBI NO: 21537415 NR Description: S-adenosylmethionine:2-demethylmenaquinone
  misc_feature (1)..(166): Homolog of NCBI NO: 15237348 NR Description: dimethylmenaquinone methyltransferase family

SEQ ID NO: 32941 - DNA, 857 bp, Arabidopsis thaliana; identical to SEQ ID NO: 29351
  misc_feature (1)..(857): Ceres Seq. ID no. 12323707
  misc_feature: MA Experiment ID: 108434 Result: Down-regulated in Transcription
  misc_feature: MA Experiment 108434 PARAMETER Experiment Name: At_Root_Tips_cDNA_P Parameter: Tissue Value: Root Tips
  misc_feature: MA Experiment ID: 108488 Result: Down-regulated in Transcription
  misc_feature: MA Experiment ID: 108561 Result: Up-regulated in Transcription
  misc_feature: MA Experiment 108561 PARAMETER Experiment Name: At_100uM_ABA_cDNA_P Parameter: Timepoint (hr) Value: 6
  misc_feature: MA Experiment 108561 PARAMETER Experiment Name: At_100uM_ABA_cDNA_P Parameter: Tissue Value: Aerial
  misc_feature: MA Experiment 108561 PARAMETER Experiment Name: At_100uM_ABA_cDNA_P Parameter: Treatment Value: 100uM ABA vs. No Treatment
  misc_feature: MA Experiment ID: 108572 Result: Up-regulated in Transcription
  misc_feature: MA Experiment 108572 PARAMETER Experiment Name: At_Drought_cDNA_P Parameter: Timepoint (hr) Value: 1
  misc_feature: MA Experiment 108572 PARAMETER Experiment Name: At_Drought_cDNA_P Parameter: Tissue Value: Aerial
  misc_feature: MA Experiment 108572 PARAMETER Experiment Name: At_Drought_cDNA_P Parameter: Treatment Value: Drought vs. No Drought
  misc_feature: MA Experiment ID: 108573 Result: Up-regulated in Transcription
  misc_feature: MA Experiment 108573 PARAMETER Experiment Name: At_Drought_cDNA_P Parameter: Timepoint (hr) Value: 6
  misc_feature: MA Experiment 108573 PARAMETER Experiment Name: At_Drought_cDNA_P Parameter: Tissue Value: Aerial
  misc_feature: MA Experiment 108573 PARAMETER Experiment Name: At_Drought_cDNA_P Parameter: Treatment Value: Drought vs. No Drought
  misc_feature: MA Experiment ID: 108585 Result: Up-regulated in Transcription
  misc_feature: MA Experiment 108585 PARAMETER Experiment Name: At_5mM_NaNP_cDNA_P Parameter: Timepoint (hr) Value: 6
  misc_feature: MA Experiment 108585 PARAMETER Experiment Name: At_5mM_NaNP_cDNA_P Parameter: Tissue Value: Aerial
  misc_feature: MA Experiment 108585 PARAMETER Experiment Name: At_5mM_NaNP_cDNA_P Parameter: Treatment Value: null
  misc_feature: MA Experiment ID: 108605 Result: Up-regulated in Transcription
  misc_feature: MA Experiment 108605 PARAMETER Experiment Name: At_100uM_ABA_cDNA_P Parameter: Timepoint (hr) Value: 6
  misc_feature: MA Experiment 108605 PARAMETER Experiment Name: At_100uM_ABA_cDNA_P Parameter: Tissue Value: Aerial
  misc_feature: MA Experiment 108605 PARAMETER Experiment Name: At_100uM_ABA_cDNA_P Parameter: Treatment Value: 100uM ABA vs. No Treatment
  misc_feature: MA Experiment ID: 108607 Result: Up-regulated in Transcription
  misc_feature: MA Experiment 108607 PARAMETER Experiment Name: At_100uM_ABA_cDNA_P Parameter: Timepoint (hr) Value: 4
  misc_feature: MA Experiment 108607 PARAMETER Experiment Name: At_100uM_ABA_cDNA_P Parameter: Tissue Value: Aerial
  misc_feature: MA Experiment 108607 PARAMETER Experiment Name: At_100uM_ABA_cDNA_P Parameter: Treatment Value: 100uM ABA vs. No Treatment
  misc_feature: MA Experiment ID: 108608 Result: Up-regulated in Transcription
  misc_feature: MA Experiment 108608 PARAMETER Experiment Name: At_100uM_ABA_cDNA_P Parameter: Timepoint (hr) Value: 1
  misc_feature: MA Experiment 108608 PARAMETER Experiment Name: At_100uM_ABA_cDNA_P Parameter: Tissue Value: Aerial
  misc_feature: MA Experiment 108608 PARAMETER Experiment Name: At_100uM_ABA_cDNA_P Parameter: Treatment Value: 100uM ABA vs. No Treatment
  misc_feature: MA Experiment ID: 108609 Result: Up-regulated in Transcription
  misc_feature: MA Experiment 108609 PARAMETER Experiment Name: At_100uM_ABA_cDNA_P Parameter: Timepoint (hr) Value: 24
  misc_feature: MA Experiment 108609 PARAMETER Experiment Name: At_100uM_ABA_cDNA_P Parameter: Tissue Value: Aerial
  misc_feature: MA Experiment 108609 PARAMETER Experiment Name: At_100uM_ABA_cDNA_P Parameter: Treatment Value: 100uM ABA vs. No Treatment
  misc_feature: MA Experiment ID: 108668 Result: Up-regulated in Transcription
  misc_feature: MA Experiment 108668 PARAMETER Experiment Name: At_2mM_SA_cDNA_P Parameter: Plant Line Value: WS
  misc_feature: MA Experiment 108668 PARAMETER Experiment Name: At_2mM_SA_cDNA_P Parameter: Timepoint (hr) Value: 6
  misc_feature: MA Experiment 108668 PARAMETER Experiment Name: At_2mM_SA_cDNA_P Parameter: Treatment Value: 2mM SA vs. No Treatment
  misc_feature: MA Experiment ID: 20000069 Result: Up-regulated in Transcription
  misc_feature: MA Experiment 20000069 PARAMETER Experiment Name: At_100uM_ABA_Mutants_cDNA_P Parameter: Plant Line Value: CS23
  misc_feature: MA Experiment 20000069 PARAMETER Experiment Name: At_100uM_ABA_Mutants_cDNA_P Parameter: Timepoint (hr) Value: 6
  misc_feature: MA Experiment 20000069 PARAMETER Experiment Name: At_100uM_ABA_Mutants_cDNA_P Parameter: Tissue Value: Aerial
  misc_feature: MA Experiment 20000069 PARAMETER Experiment Name: At_100uM_ABA_Mutants_cDNA_P Parameter: Treatment Value: 100uM ABA vs. No Treatment
  misc_feature: MA Experiment ID: 20000070 Result: Up-regulated in Transcription
  misc_feature: MA Experiment 20000070 PARAMETER Experiment Name: At_100uM_ABA_Mutants_cDNA_P Parameter: Plant Line Value: CS24
  misc_feature: MA Experiment 20000070 PARAMETER Experiment Name: At_100uM_ABA_Mutants_cDNA_P Parameter: Timepoint (hr) Value: 6
  misc_feature: MA Experiment 20000070 PARAMETER Experiment Name: At_100uM_ABA_Mutants_cDNA_P Parameter: Tissue Value: Aerial
  misc_feature: MA Experiment 20000070 PARAMETER Experiment Name: At_100uM_ABA_Mutants_cDNA_P Parameter: Treatment Value: 100uM ABA vs. No Treatment
  misc_feature: MA Experiment ID: 20000071 Result: Up-regulated in Transcription
  misc_feature: MA Experiment 20000071 PARAMETER Experiment Name: At_100uM_ABA_Mutants_cDNA_P Parameter: Plant Line Value: CS8104
  misc_feature: MA Experiment 20000071 PARAMETER Experiment Name: At_100uM_ABA_Mutants_cDNA_P Parameter: Timepoint (hr) Value: 6
  misc_feature: MA Experiment 20000071 PARAMETER Experiment Name: At_100uM_ABA_Mutants_cDNA_P Parameter: Tissue Value: Aerial
  misc_feature: MA Experiment 20000071 PARAMETER Experiment Name: At_100uM_ABA_Mutants_cDNA_P Parameter: Treatment Value: 100uM ABA vs. No Treatment
  misc_feature: MA Experiment ID: 20000072 Result: Up-regulated in Transcription
  misc_feature: MA Experiment 20000072 PARAMETER Experiment Name: At_100uM_ABA_Mutants_cDNA_P Parameter: Plant Line Value: CS8105
  misc_feature: MA Experiment 20000072 PARAMETER Experiment Name: At_100uM_ABA_Mutants_cDNA_P Parameter: Timepoint (hr) Value: 6
  misc_feature: MA Experiment 20000072 PARAMETER Experiment Name: At_100uM_ABA_Mutants_cDNA_P Parameter: Tissue Value: Aerial
  misc_feature: MA Experiment 20000072 PARAMETER Experiment Name: At_100uM_ABA_Mutants_cDNA_P Parameter: Treatment Value: 100uM ABA vs. No Treatment
  misc_feature: MA Experiment ID: 20000086 Result: Up-regulated in Transcription
  misc_feature: MA Experiment 20000086 PARAMETER Experiment Name: At_100uM_ABA_Mutants_cDNA_P Parameter: Plant Line Value: CS22
  misc_feature: MA Experiment 20000086 PARAMETER Experiment Name: At_100uM_ABA_Mutants_cDNA_P Parameter: Timepoint (hr) Value: 6
  misc_feature: MA Experiment 20000086 PARAMETER Experiment Name: At_100uM_ABA_Mutants_cDNA_P Parameter: Tissue Value: Aerial
  misc_feature: MA Experiment 20000086 PARAMETER Experiment Name: At_100uM_ABA_Mutants_cDNA_P Parameter: Treatment Value: 100uM ABA vs. No Treatment
  misc_feature: MA Experiment ID: 20000088 Result: Up-regulated in Transcription
  misc_feature: MA Experiment 20000088 PARAMETER Experiment Name: At_100uM_ABA_Mutants_cDNA_P Parameter: Plant Line Value: Landsberg
  misc_feature: MA Experiment 20000088 PARAMETER Experiment Name: At_100uM_ABA_Mutants_cDNA_P Parameter: Timepoint (hr) Value: 6
  misc_feature: MA Experiment 20000088 PARAMETER Experiment Name: At_100uM_ABA_Mutants_cDNA_P Parameter: Tissue Value: Aerial
  misc_feature: MA Experiment 20000088 PARAMETER Experiment Name: At_100uM_ABA_Mutants_cDNA_P Parameter: Treatment Value: 100uM ABA vs. No Treatment
  misc_feature: MA Experiment ID: 20000111 Result: Down-regulated in Transcription
  misc_feature: MA Experiment 20000111 PARAMETER Experiment Name: At_42deg_Heat_cDNA_P Parameter: Temperature (deg C) Value: 42 vs. 22
  misc_feature: MA Experiment 20000111 PARAMETER Experiment Name: At_42deg_Heat_cDNA_P Parameter: Timepoint (hr) Value: 6
  misc_feature: MA Experiment 20000111 PARAMETER Experiment Name: At_42deg_Heat_cDNA_P Parameter: Tissue Value: Aerial
  misc_feature: MA Experiment ID: 20000117 Result: Up-regulated in Transcription
  misc_feature: MA Experiment 20000117 PARAMETER Experiment Name: At_100uM_ABA_Mutants_cDNA_P Parameter: Plant Line Value: Columbia
  misc_feature: MA Experiment 20000117 PARAMETER Experiment Name: At_100uM_ABA_Mutants_cDNA_P Parameter: Timepoint (hr) Value: 6
  misc_feature: MA Experiment 20000117 PARAMETER Experiment Name: At_100uM_ABA_Mutants_cDNA_P Parameter: Tissue Value: Aerial
  misc_feature: MA Experiment 20000117 PARAMETER Experiment Name: At_100uM_ABA_Mutants_cDNA_P Parameter: Treatment Value: 100uM ABA vs. No Treatment
  misc_feature: MA Experiment ID: 20000166 Result: Up-regulated in Transcription
  misc_feature: MA Experiment 20000166 PARAMETER Experiment Name: At_100uM_ABA_P Parameter: Age (day) Value: 14
  misc_feature: MA Experiment 20000166 PARAMETER Experiment Name: At_100uM_ABA_P Parameter: Organism Value: A. thaliana
  misc_feature: MA Experiment 20000166 PARAMETER Experiment Name: At_100uM_ABA_P Parameter: Plant Line Value: WS
  misc_feature: MA Experiment 20000166 PARAMETER Experiment Name: At_100uM_ABA_P Parameter: Timepoint (hr) Value: 1
  misc_feature: MA Experiment 20000166 PARAMETER Experiment Name: At_100uM_ABA_P Parameter: Tissue Value: Aerial
  misc_feature: MA Experiment 20000166 PARAMETER Experiment Name: At_100uM_ABA_P Parameter: Treatment Value: 100uM ABA vs. No Treatment
  misc_feature: MA Experiment ID: 20000169 Result: Up-regulated in Transcription
  misc_feature: MA Experiment 20000169 PARAMETER Experiment Name: At_100uM_ABA_P Parameter: Age (day) Value: 14
  misc_feature: MA Experiment 20000169 PARAMETER Experiment Name: At_100uM_ABA_P Parameter: Organism Value: A. thaliana
  misc_feature: MA Experiment 20000169 PARAMETER Experiment Name: At_100uM_ABA_P Parameter: Plant Line Value: WS
  misc_feature: MA Experiment 20000169 PARAMETER Experiment Name: At_100uM_ABA_P Parameter: Timepoint (hr) Value: 6
  misc_feature: MA Experiment 20000169 PARAMETER Experiment Name: At_100uM_ABA_P Parameter: Tissue Value: Aerial
  misc_feature: MA Experiment 20000169 PARAMETER Experiment Name: At_100uM_ABA_P Parameter: Treatment Value: 100uM ABA vs. No Treatment
  misc_feature: MA Experiment ID: 20000179 Result: Up-regulated in Transcription
  misc_feature: MA Experiment 20000179 PARAMETER Experiment Name: At_Germinating_Seeds_P Parameter: Age (hr) Value: 6 vs. 0
  misc_feature: MA Experiment 20000179 PARAMETER Experiment Name: At_Germinating_Seeds_P Parameter: Tissue Value: Germinating Seeds
  misc_feature: MA Experiment ID: 20000182 Result: Up-regulated in Transcription
  misc_feature: MA Experiment 20000182 PARAMETER Experiment Name: At_2mM_SA_P Parameter: Age (day) Value: 14
  misc_feature: MA Experiment 20000182 PARAMETER Experiment Name: At_2mM_SA_P Parameter: Organism Value: A. thaliana
  misc_feature: MA Experiment 20000182 PARAMETER Experiment Name: At_2mM_SA_P Parameter: Plant Line Value: WS
  misc_feature: MA Experiment 20000182 PARAMETER Experiment Name: At_2mM_SA_P Parameter: Timepoint (hr) Value: 6
  misc_feature: MA Experiment 20000182 PARAMETER Experiment Name: At_2mM_SA_P Parameter: Tissue Value: Aerial
  misc_feature: MA Experiment 20000182 PARAMETER Experiment Name: At_2mM_SA_P Parameter: Treatment Value: 2mM SA vs. No Treatment
  misc_feature: MA Experiment ID: 20000224 Result: Down-regulated in Transcription
  misc_feature: MA Experiment ID: 20000265 Result: Down-regulated in Transcription
  misc_feature: MA Experiment 20000265 PARAMETER Experiment Name: At_Open_Flower_P Parameter: Age (day) Value: 21
  misc_feature: MA Experiment 20000265 PARAMETER Experiment Name: At_Open_Flower_P Parameter: Plant Line Value: WS
  misc_feature: MA Experiment 20000265 PARAMETER Experiment Name: At_Open_Flower_P Parameter: Tissue Value: Closed Flower vs. Whole Plant
  misc_feature: MA Experiment ID: 20000267 Result: Up-regulated in Transcription
  misc_feature: MA Experiment 20000267 PARAMETER Experiment Name: At_Drought_P Parameter: Age (day) Value: 7
  misc_feature: MA Experiment 20000267 PARAMETER Experiment Name: At_Drought_P Parameter: Organism Value: A. thaliana
  misc_feature: MA Experiment 20000267 PARAMETER Experiment Name: At_Drought_P Parameter: Plant Line Value: WS
  misc_feature: MA Experiment 20000267 PARAMETER Experiment Name: At_Drought_P Parameter: Timepoint (hr) Value: 6
  misc_feature: MA Experiment 20000267 PARAMETER Experiment Name: At_Drought_P Parameter: Tissue Value: Whole Plant
  misc_feature: MA Experiment 20000267 PARAMETER Experiment Name: At_Drought_P Parameter: Treatment Value: Drought vs. No Drought
  misc_feature: MA Experiment ID: 20000436 Result: Up-regulated in Transcription
  misc_feature: MA Experiment 20000436 PARAMETER Experiment Name: At_Drought_P Parameter: Age (day) Value: 7
  misc_feature: MA Experiment 20000436 PARAMETER Experiment Name: At_Drought_P Parameter: Organism Value: A. thaliana
  misc_feature: MA Experiment 20000436 PARAMETER Experiment Name: At_Drought_P Parameter: Plant Line Value: WS
  misc_feature: MA Experiment 20000436 PARAMETER Experiment Name: At_Drought_P Parameter: Timepoint (hr) Value: 12
  misc_feature: MA Experiment 20000436 PARAMETER Experiment Name: At_Drought_P Parameter: Tissue Value: Whole Plant
  misc_feature: MA Experiment 20000436 PARAMETER Experiment Name: At_Drought_P Parameter: Treatment Value: Drought vs. No Drought
  misc_feature: MA Experiment ID: 20000437 Result: Up-regulated in Transcription
  misc_feature: MA Experiment 20000437 PARAMETER Experiment Name: At_Drought_P Parameter: Age (day) Value: 8
  misc_feature: MA Experiment 20000437 PARAMETER Experiment Name: At_Drought_P Parameter: Organism Value: A. thaliana
  misc_feature: MA Experiment 20000437 PARAMETER Experiment Name: At_Drought_P Parameter: Plant Line Value: WS
  misc_feature: MA Experiment 20000437 PARAMETER Experiment Name: At_Drought_P Parameter: Timepoint (hr) Value: 24
  misc_feature: MA Experiment 20000437 PARAMETER Experiment Name: At_Drought_P Parameter: Tissue Value: Whole Plant
  misc_feature: MA Experiment 20000437 PARAMETER Experiment Name: At_Drought_P Parameter: Treatment Value: Drought vs. No Drought
  misc_feature: MA Experiment ID: 20000453 Result: Up-regulated in Transcription
  misc_feature: MA Experiment 20000453 PARAMETER Experiment Name: At_100uM_ABA_P Parameter: Age (day) Value: 15
  misc_feature: MA Experiment 20000453 PARAMETER Experiment Name: At_100uM_ABA_P Parameter: Organism Value: A. thaliana
  misc_feature: MA Experiment 20000453 PARAMETER Experiment Name: At_100uM_ABA_P Parameter: Plant Line Value: WS
  misc_feature: MA Experiment 20000453 PARAMETER Experiment Name: At_100uM_ABA_P Parameter: Timepoint (hr) Value: 24
  misc_feature: MA Experiment 20000453 PARAMETER Experiment Name: At_100uM_ABA_P Parameter: Tissue Value: Aerial
  misc_feature: MA Experiment 20000453 PARAMETER Experiment Name: At_100uM_ABA_P Parameter: Treatment Value: 100uM ABA vs. No Treatment
  misc_feature: MA Experiment ID: 20001554 Result: Up-regulated in Transcription
  misc_feature: MA Experiment 20001554 PARAMETER Experiment Name: At_Drought_Soil_Dry_P Parameter: Age (day) Value: 21
  misc_feature: MA Experiment 20001554 PARAMETER Experiment Name: At_Drought_Soil_Dry_P Parameter: Organism Value: A. thaliana
  misc_feature: MA Experiment 20001554 PARAMETER Experiment Name: At_Drought_Soil_Dry_P Parameter: Plant Line Value: WS
  misc_feature: MA Experiment 20001554 PARAMETER Experiment Name: At_Drought_Soil_Dry_P Parameter: Post Timepoint (hr) Value: None
  misc_feature: MA Experiment 20001554 PARAMETER Experiment Name: At_Drought_Soil_Dry_P Parameter: Post-Treatment Value: None
  misc_feature: MA Experiment 20001554 PARAMETER Experiment Name: At_Drought_Soil_Dry_P Parameter: Timepoint (day) Value: 7
  misc_feature: MA Experiment 20001554 PARAMETER Experiment Name: At_Drought_Soil_Dry_P Parameter: Treatment Value: Drought vs. No Drought
  misc_feature: MA Experiment ID: 20001555 Result: Up-regulated in Transcription
  misc_feature: MA Experiment 20001555 PARAMETER Experiment Name: At_Drought_Soil_Dry_P Parameter: Age (day) Value: 24
  misc_feature: MA Experiment 20001555 PARAMETER Experiment Name: At_Drought_Soil_Dry_P Parameter: Organism Value: A. thaliana
  misc_feature: MA Experiment 20001555 PARAMETER Experiment Name: At_Drought_Soil_Dry_P Parameter: Plant Line Value: WS
  misc_feature: MA Experiment 20001555 PARAMETER Experiment Name: At_Drought_Soil_Dry_P Parameter: Post Timepoint (hr) Value: None
  misc_feature: MA Experiment 20001555 PARAMETER Experiment Name: At_Drought_Soil_Dry_P Parameter: Post-Treatment Value: None
  misc_feature: MA Experiment 20001555 PARAMETER Experiment Name: At_Drought_Soil_Dry_P Parameter: Timepoint (day) Value: 10
  misc_feature: MA Experiment 20001555 PARAMETER Experiment Name: At_Drought_Soil_Dry_P Parameter: Treatment Value: Drought vs. No Drought
  misc_feature: MA Experiment ID: 20001904 Result: Up-regulated in Transcription
  misc_feature: MA Experiment 20001904 PARAMETER Experiment Name: At_Drought_Reproduction_P Parameter: Age (day) Value: 37
  misc_feature: MA Experiment 20001904 PARAMETER Experiment Name: At_Drought_Reproduction_P Parameter: Organism Value: A. thaliana
  misc_feature: MA Experiment 20001904 PARAMETER Experiment Name: At_Drought_Reproduction_P Parameter: Plant Line Value: WS
  misc_feature: MA Experiment 20001904 PARAMETER Experiment Name: At_Drought_Reproduction_P Parameter: Timepoint (day) Value: 7
  misc_feature: MA Experiment 20001904 PARAMETER Experiment Name: At_Drought_Reproduction_P Parameter: Tissue Value: Rosettes
  misc_feature: MA Experiment 20001904 PARAMETER Experiment Name: At_Drought_Reproduction_P Parameter: Treatment Value: Drought vs. No Drought
  misc_feature: MA Experiment ID: 20001905 Result: Up-regulated in Transcription
  misc_feature: MA Experiment 20001905 PARAMETER Experiment Name: At_Drought_Reproduction_P Parameter: Age (day) Value: 40
  misc_feature: MA Experiment 20001905 PARAMETER Experiment Name: At_Drought_Reproduction_P Parameter: Organism Value: A. thaliana
  misc_feature: MA Experiment 20001905 PARAMETER Experiment Name: At_Drought_Reproduction_P Parameter: Plant Line Value: WS
  misc_feature: MA Experiment 20001905 PARAMETER Experiment Name: At_Drought_Reproduction_P Parameter: Timepoint (day) Value: 10
  misc_feature: MA Experiment 20001905 PARAMETER Experiment Name: At_Drought_Reproduction_P Parameter: Tissue Value: Rosettes
  misc_feature: MA Experiment 20001905 PARAMETER Experiment Name: At_Drought_Reproduction_P Parameter: Treatment Value: Drought vs. No Drought
  misc_feature: MA Experiment ID: 20001911 Result: Up-regulated in Transcription
  misc_feature: MA Experiment 20001911 PARAMETER Experiment Name: At_Drought_Reproduction_P Parameter: Age (day) Value: 40
  misc_feature: MA Experiment 20001911 PARAMETER Experiment Name: At_Drought_Reproduction_P Parameter: Organism Value: A. thaliana
  misc_feature: MA Experiment 20001911 PARAMETER Experiment Name: At_Drought_Reproduction_P Parameter: Plant Line Value: WS
  misc_feature: MA Experiment 20001911 PARAMETER Experiment Name: At_Drought_Reproduction_P Parameter: Timepoint (day) Value: 10
  misc_feature: MA Experiment 20001911 PARAMETER Experiment Name: At_Drought_Reproduction_P Parameter: Tissue Value: Flowers
  misc_feature: MA Experiment 20001911 PARAMETER Experiment Name: At_Drought_Reproduction_P Parameter: Treatment Value: Drought vs. No Drought

SEQ ID NO: 32942 - protein, 176 aa, Arabidopsis thaliana; identical to SEQ ID NO: 29352
  peptide (1)..(176): Ceres Seq. ID no. 12323708
  misc_feature (117)..(157): Pfam Name: AN1-like Zinc finger Pfam Description: AN1-like Zinc finger
  misc_feature (6)..(175): Homolog of NCBI NO: 25082726 NR Description: expressed protein [Arabidopsis thaliana]
  misc_feature (6)..(175): Homolog of NCBI NO: 18403408 NR Description: expressed protein
  misc_feature (20)..(175): Homolog of NCBI NO: 14596167 NR Description: zinc finger-like protein [Arabidopsis thaliana]
  misc_feature (20)..(175): Homolog of NCBI NO: 18404102 NR Description: expressed protein
  misc_feature (13)..(175): Homolog of NCBI NO: 15225894 NR Description: putative zinc finger protein
  misc_feature (20)..(175): Homolog of NCBI NO: 15231686 NR Description: zinc finger - like protein
  misc_feature (1)..(175): Homolog of NCBI NO: 15221329 NR Description: hypothetical protein; protein id: At1g12440.1
  misc_feature (1)..(175): Homolog of NCBI NO: 8778645 NR Description: F5O11.17 [Arabidopsis thaliana]
  misc_feature (1)..(175): Homolog of NCBI NO: 15234402 NR Description: putative protein
  misc_feature (1)..(176): Homolog of NCBI NO: 15235819 NR Description: similar to zinc finger - like protein

SEQ ID NO: 32943 - protein, 142 aa, Arabidopsis thaliana; identical to SEQ ID NO: 29353
  peptide (1)..(142): Ceres Seq. ID no. 12323709
  misc_feature (83)..(123): Pfam Name: AN1-like Zinc finger Pfam Description: AN1-like Zinc finger
  misc_feature (1)..(141): Homolog of NCBI NO: 25082726 NR Description: expressed protein [Arabidopsis thaliana]
  misc_feature (1)..(141): Homolog of NCBI NO: 18403408 NR Description: expressed protein
  misc_feature (1)..(141): Homolog of NCBI NO: 14596167 NR Description: zinc finger-like protein [Arabidopsis thaliana]
  misc_feature (1)..(141): Homolog of NCBI NO: 18404102 NR Description: expressed protein
  misc_feature (1)..(141): Homolog of NCBI NO: 15225894 NR Description: putative zinc finger protein
  misc_feature (1)..(141): Homolog of NCBI NO: 15231686 NR Description: zinc finger - like protein
  misc_feature (1)..(141): Homolog of NCBI NO: 15221329 NR Description: hypothetical protein; protein id: At1g12440.1
  misc_feature (1)..(141): Homolog of NCBI NO: 8778645 NR Description: F5O11.17 [Arabidopsis thaliana]
  misc_feature (1)..(141): Homolog of NCBI NO: 15234402 NR Description: putative protein
  misc_feature (1)..(142): Homolog of NCBI NO: 15235819 NR Description: similar to zinc finger - like protein

SEQ ID NO: 32944 - DNA, 1154 bp, Arabidopsis thaliana; identical to SEQ ID NO: 26919
  misc_feature (1)..(1154): Ceres Seq. ID no. 12385275
  misc_feature: MA Experiment ID: 108435 Result: Up-regulated in Transcription
  misc_feature: MA Experiment 108435 PARAMETER Experiment Name: At_stm_Mutants_cDNA_P Parameter: Plant Line Value: wt Landsburg vs stm
  misc_feature: MA Experiment 108435 PARAMETER Experiment Name: At_stm_Mutants_cDNA_P Parameter: Tissue Value: Shoot Apical Meristem Region
  misc_feature: MA Experiment ID: 108461 Result: Up-regulated in Transcription
  misc_feature: MA Experiment 108461 PARAMETER Experiment Name: At_Germinating_Seeds_cDNA_P Parameter: Age (day) Value: 1 vs. 0
  misc_feature: MA Experiment 108461 PARAMETER Experiment Name: At_Germinating_Seeds_cDNA_P Parameter: Tissue Value: Germinating Seeds
  misc_feature: MA Experiment ID: 108462 Result: Up-regulated in Transcription
  misc_feature: MA Experiment 108462 PARAMETER Experiment Name: At_Germinating_Seeds_cDNA_P Parameter: Age (day) Value: 2 vs. 0
  misc_feature: MA Experiment 108462 PARAMETER Experiment Name: At_Germinating_Seeds_cDNA_P Parameter: Tissue Value: Germinating Seeds
  misc_feature: MA Experiment ID: 108473 Result: Down-regulated in Transcription
  misc_feature: MA Experiment 108473 PARAMETER Experiment Name: At_Drought_Flowers_cDNA_P Parameter: Timepoint (hr) Value: 7 d
  misc_feature: MA Experiment 108473 PARAMETER Experiment Name: At_Drought_Flowers_cDNA_P Parameter: Tissue Value: Flower
  misc_feature: MA Experiment 108473 PARAMETER Experiment Name: At_Drought_Flowers_cDNA_P Parameter: Treatment Value: Drought vs. No Drought
  misc_feature: MA Experiment ID: 20000069 Result: Down-regulated in Transcription
  misc_feature: MA Experiment 20000069 PARAMETER Experiment Name: At_100uM_ABA_Mutants_cDNA_P Parameter: Plant Line Value: CS23
  misc_feature: MA Experiment 20000069 PARAMETER Experiment Name: At_100uM_ABA_Mutants_cDNA_P Parameter: Timepoint (hr) Value: 6
  misc_feature: MA Experiment 20000069 PARAMETER Experiment Name: At_100uM_ABA_Mutants_cDNA_P Parameter: Tissue Value: Aerial
  misc_feature: MA Experiment 20000069 PARAMETER Experiment Name: At_100uM_ABA_Mutants_cDNA_P Parameter: Treatment Value: 100uM ABA vs. No Treatment
  misc_feature: MA Experiment ID: 20000111 Result: Down-regulated in Transcription
  misc_feature: MA Experiment 20000111 PARAMETER Experiment Name: At_42deg_Heat_cDNA_P Parameter: Temperature (deg C) Value: 42 vs. 22
  misc_feature: MA Experiment 20000111 PARAMETER Experiment Name: At_42deg_Heat_cDNA_P Parameter: Timepoint (hr) Value: 6
  misc_feature: MA Experiment 20000111 PARAMETER Experiment Name: At_42deg_Heat_cDNA_P Parameter: Tissue Value: Aerial
  misc_feature: MA Experiment ID: 20000144 Result: Down-regulated in Transcription
  misc_feature: MA Experiment 20000144 PARAMETER Experiment Name: At_42deg_Heat_cDNA_P Parameter: Temperature (deg C) Value: 42 vs. 22
  misc_feature: MA Experiment 20000144 PARAMETER Experiment Name: At_42deg_Heat_cDNA_P Parameter: Timepoint (hr) Value: 1
  misc_feature: MA Experiment 20000144 PARAMETER Experiment Name: At_42deg_Heat_cDNA_P Parameter: Tissue Value: Aerial
  misc_feature: MA Experiment ID: 20000180 Result: Up-regulated in Transcription
  misc_feature: MA Experiment 20000180 PARAMETER Experiment Name: At_Germinating_Seeds_P Parameter: Age (hr) Value: 24 vs. 0
  misc_feature: MA Experiment 20000180 PARAMETER Experiment Name: At_Germinating_Seeds_P Parameter: Tissue Value: Germinating Seeds
  misc_feature: MA Experiment ID: 20000185 Result: Down-regulated in Transcription
  misc_feature: MA Experiment 20000185 PARAMETER Experiment Name: At_Roots__P Parameter: Age (day) Value: 7 vs. 21
  misc_feature: MA Experiment 20000185 PARAMETER Experiment Name: At_Roots__P Parameter: Organism Value: A. thaliana
  misc_feature: MA Experiment 20000185 PARAMETER Experiment Name: At_Roots__P Parameter: Tissue Value: Roots vs. Whole Plant
  misc_feature: MA Experiment ID: 20000224 Result: Up-regulated in Transcription
  misc_feature: MA Experiment ID: 20000234 Result: Up-regulated in Transcription
  misc_feature: MA Experiment 20000234 PARAMETER Experiment Name: At_Siliques_P Parameter: Age (day) Value: 21
  misc_feature: MA Experiment 20000234 PARAMETER Experiment Name: At_Siliques_P Parameter: Organism Value: A. thaliana
  misc_feature: MA Experiment 20000234 PARAMETER Experiment Name: At_Siliques_P Parameter: Plant Line Value: WS
  misc_feature: MA Experiment 20000234 PARAMETER Experiment Name: At_Siliques_P Parameter: Tissue Value: Less Than 5mm Siliques vs. Whole Plant
  misc_feature: MA Experiment ID: 20000265 Result: Up-regulated in Transcription
  misc_feature: MA Experiment 20000265 PARAMETER Experiment Name: At_Open_Flower_P Parameter: Age (day) Value: 21
  misc_feature: MA Experiment 20000265 PARAMETER Experiment Name: At_Open_Flower_P Parameter: Plant Line Value: WS
  misc_feature: MA Experiment 20000265 PARAMETER Experiment Name: At_Open_Flower_P Parameter: Tissue Value: Closed Flower vs. Whole Plant
  misc_feature: MA Experiment ID: 20000286 Result: Up-regulated in Transcription
  misc_feature: MA Experiment 20000286 PARAMETER Experiment Name: At_Open_Flower_P Parameter: Age (day) Value: 21
  misc_feature: MA Experiment 20000286 PARAMETER Experiment Name: At_Open_Flower_P Parameter: Plant Line Value: WS
  misc_feature: MA Experiment 20000286 PARAMETER Experiment Name: At_Open_Flower_P Parameter: Tissue Value: Half Open vs. Whole Plant
  misc_feature: MA Experiment ID: 20000437 Result: Down-regulated in Transcription
  misc_feature: MA Experiment 20000437 PARAMETER Experiment Name: At_Drought_P Parameter: Age (day) Value: 8
  misc_feature: MA Experiment 20000437 PARAMETER Experiment Name: At_Drought_P Parameter: Organism Value: A. thaliana
  misc_feature: MA Experiment 20000437 PARAMETER Experiment Name: At_Drought_P Parameter: Plant Line Value: WS
  misc_feature: MA Experiment 20000437 PARAMETER Experiment Name: At_Drought_P Parameter: Timepoint (hr) Value: 24
  misc_feature: MA Experiment 20000437 PARAMETER Experiment Name: At_Drought_P Parameter: Tissue Value: Whole Plant
  misc_feature: MA Experiment 20000437 PARAMETER Experiment Name: At_Drought_P Parameter: Treatment Value: Drought vs. No Drought
  misc_feature: MA Experiment ID: 20000439 Result: Down-regulated in Transcription
  misc_feature: MA Experiment 20000439 PARAMETER Experiment Name: At_Roots__P Parameter: Age (day) Value: 14 vs. 21
  misc_feature: MA Experiment 20000439 PARAMETER Experiment Name: At_Roots__P Parameter: Organism Value: A. thaliana
  misc_feature: MA Experiment 20000439 PARAMETER Experiment Name: At_Roots__P Parameter: Tissue Value: Roots vs. Whole Plant
  misc_feature: MA Experiment ID: 20000495 Result: Up-regulated in Transcription
  misc_feature: MA Experiment 20000495 PARAMETER Experiment Name: At_Guard_Cells_P Parameter: Harvest Date Value: 8/2/2002
  misc_feature: MA Experiment 20000495 PARAMETER Experiment Name: At_Guard_Cells_P Parameter: Organism Value: A. thaliana
  misc_feature: MA Experiment 20000495 PARAMETER Experiment Name: At_Guard_Cells_P Parameter: Tissue Value: Guard Cells vs. Leaves
  misc_feature: MA Experiment ID: 20001248 Result: Down-regulated in Transcription
  misc_feature: MA Experiment 20001248 PARAMETER Experiment Name: At_Far-red-induction_P Parameter: Age (day) Value: 7
  misc_feature: MA Experiment 20001248 PARAMETER Experiment Name: At_Far-red-induction_P Parameter: Light Value: Far-red vs. White
  misc_feature: MA Experiment 20001248 PARAMETER Experiment Name: At_Far-red-induction_P Parameter: Organism Value: A. thaliana
  misc_feature: MA Experiment 20001248 PARAMETER Experiment Name: At_Far-red-induction_P Parameter: Plant Line Value: Columbia
  misc_feature: MA Experiment 20001248 PARAMETER Experiment Name: At_Far-red-induction_P Parameter: Timepoint (hr) Value: 4
  misc_feature: MA Experiment 20001248 PARAMETER Experiment Name: At_Far-red-induction_P Parameter: Tissue Value: Whole Plant
  misc_feature: MA Experiment ID: 20001555 Result: Down-regulated in Transcription
  misc_feature: MA Experiment 20001555 PARAMETER Experiment Name: At_Drought_Soil_Dry_P Parameter: Age (day) Value: 24
  misc_feature: MA Experiment 20001555 PARAMETER Experiment Name: At_Drought_Soil_Dry_P Parameter: Organism Value: A. thaliana
  misc_feature: MA Experiment 20001555 PARAMETER Experiment Name: At_Drought_Soil_Dry_P Parameter: Plant Line Value: WS
  misc_feature: MA Experiment 20001555 PARAMETER Experiment Name: At_Drought_Soil_Dry_P Parameter: Post Timepoint (hr) Value: None
  misc_feature: MA Experiment 20001555 PARAMETER Experiment Name: At_Drought_Soil_Dry_P Parameter: Post-Treatment Value: None
  misc_feature: MA Experiment 20001555 PARAMETER Experiment Name: At_Drought_Soil_Dry_P Parameter: Timepoint (day) Value: 10
  misc_feature: MA Experiment 20001555 PARAMETER Experiment Name: At_Drought_Soil_Dry_P Parameter: Treatment Value: Drought vs. No Drought

SEQ ID NO: 32945 - protein, 350 aa, Arabidopsis thaliana; identical to SEQ ID NO: 26920
  peptide (1)..(350): Ceres Seq. ID no. 12385276
  misc_feature (73)..(338): Pfam Name: alpha/beta hydrolase fold Pfam Description: alpha/beta hydrolase fold
  misc_feature (73)..(338): Pfam Name: alpha/beta hydrolase fold Pfam Description: alpha/beta hydrolase fold
  misc_feature (73)..(338): Pfam Name: alpha/beta hydrolase fold Pfam Description: alpha/beta hydrolase fold
  misc_feature (20)..(350): Homolog of NCBI NO: 15230018 NR Description: putative epoxide hydrolase
  misc_feature (20)..(350): Homolog of NCBI NO: 15230018 NR Description: putative epoxide hydrolase
  misc_feature (20)..(350): Homolog of NCBI NO: 15230018 NR Description: putative epoxide hydrolase

SEQ ID NO: 32946 - protein, 331 aa, Arabidopsis thaliana; identical to SEQ ID NO: 21476
  peptide (1)..(331): Ceres Seq. ID no. 12385277
  misc_feature (54)..(319): Pfam Name: alpha/beta hydrolase fold Pfam Description: alpha/beta hydrolase fold
  misc_feature (54)..(319): Pfam Name: alpha/beta hydrolase fold Pfam Description: alpha/beta hydrolase fold
  misc_feature (54)..(319): Pfam Name: alpha/beta hydrolase fold Pfam Description: alpha/beta hydrolase fold
  misc_feature (1)..(331): Homolog of NCBI NO: 15230018 NR Description: putative epoxide hydrolase
  misc_feature (1)..(331): Homolog of NCBI NO: 15230018 NR Description: putative epoxide hydrolase
  misc_feature (1)..(331): Homolog of NCBI NO: 15230018 NR Description: putative epoxide hydrolase

SEQ ID NO: 32947 - protein, 324 aa, Arabidopsis thaliana; identical to SEQ ID NO: 21477
  peptide (1)..(324): Ceres Seq. ID no. 12385278
  misc_feature (47)..(312): Pfam Name: alpha/beta hydrolase fold Pfam Description: alpha/beta hydrolase fold
  misc_feature (47)..(312): Pfam Name: alpha/beta hydrolase fold Pfam Description: alpha/beta hydrolase fold
  misc_feature (47)..(312): Pfam Name: alpha/beta hydrolase fold Pfam Description: alpha/beta hydrolase fold
  misc_feature (1)..(324): Homolog of NCBI NO: 15230018 NR Description: putative epoxide hydrolase
  misc_feature (1)..(324): Homolog of NCBI NO: 15230018 NR Description: putative epoxide hydrolase
  misc_feature (1)..(324): Homolog of NCBI NO: 15230018 NR Description: putative epoxide hydrolase

SEQ ID NO: 32948 - DNA, 1200 bp, Arabidopsis thaliana; identical to SEQ ID NO: 29358
  misc_feature (1)..(1200): Ceres Seq. ID no. 12334308
  misc_feature: MA Experiment ID: 108433 Result: Down-regulated in Transcription
  misc_feature: MA Experiment 108433 PARAMETER Experiment Name: At_rhl_Mutant2_cDNA_P Parameter: Age (day) Value: 7
  misc_feature: MA Experiment 108433 PARAMETER Experiment Name: At_rhl_Mutant2_cDNA_P Parameter: Organism Value: A. thaliana
  misc_feature: MA Experiment 108433 PARAMETER Experiment Name: At_rhl_Mutant2_cDNA_P Parameter: Plant Line Value: rhl Mutant vs. wt landsburg
  misc_feature: MA Experiment 108433 PARAMETER Experiment Name: At_rhl_Mutant2_cDNA_P Parameter: Tissue Value: Roots
  misc_feature: MA Experiment ID: 108461 Result: Up-regulated in Transcription
  misc_feature: MA Experiment 108461 PARAMETER Experiment Name: At_Germinating_Seeds_cDNA_P Parameter: Age (day) Value: 1 vs. 0
  misc_feature: MA Experiment 108461 PARAMETER Experiment Name: At_Germinating_Seeds_cDNA_P Parameter: Tissue Value: Germinating Seeds
  misc_feature: MA Experiment ID: 108462 Result: Up-regulated in Transcription
  misc_feature: MA Experiment 108462 PARAMETER Experiment Name: At_Germinating_Seeds_cDNA_P Parameter: Age (day) Value: 2 vs. 0
  misc_feature: MA Experiment 108462 PARAMETER Experiment Name: At_Germinating_Seeds_cDNA_P Parameter: Tissue Value: Germinating Seeds
  misc_feature: MA Experiment ID: 108463 Result: Up-regulated in Transcription
  misc_feature: MA Experiment 108463 PARAMETER Experiment Name: At_Germinating_Seeds_cDNA_P Parameter: Age (day) Value: 3 vs. 0
  misc_feature: MA Experiment 108463 PARAMETER Experiment Name: At_Germinating_Seeds_cDNA_P Parameter: Tissue Value: Germinating Seeds
  misc_feature: MA Experiment ID: 108473 Result: Down-regulated in Transcription
  misc_feature: MA Experiment 108473 PARAMETER Experiment Name: At_Drought_Flowers_cDNA_P Parameter: Timepoint (hr) Value: 7 d
  misc_feature: MA Experiment 108473 PARAMETER Experiment Name: At_Drought_Flowers_cDNA_P Parameter: Tissue Value: Flower
  misc_feature: MA Experiment 108473 PARAMETER Experiment Name: At_Drought_Flowers_cDNA_P Parameter: Treatment Value: Drought vs. No Drought
  misc_feature: MA Experiment ID: 108488 Result: Up-regulated in Transcription
  misc_feature: MA Experiment ID: 108501 Result: Down-regulated in Transcription
  misc_feature: MA Experiment 108501 PARAMETER Experiment Name: At_ap2_floral_buds_cDNA_P Parameter: Plant Line Value: ap2 (Ler.)
  misc_feature: MA Experiment 108501 PARAMETER Experiment Name: At_ap2_floral_buds_cDNA_P Parameter: Tissue Value: Closed Flower
  misc_feature: MA Experiment ID: 108574 Result: Up-regulated in Transcription
  misc_feature: MA Experiment 108574 PARAMETER Experiment Name: At_Wounding__cDNA_P Parameter: Timepoint (hr) Value: 1
  misc_feature: MA Experiment 108574 PARAMETER Experiment Name: At_Wounding__cDNA_P Parameter: Tissue Value: Aerial
  misc_feature: MA Experiment 108574 PARAMETER Experiment Name: At_Wounding__cDNA_P Parameter: Treatment Value: Wounding vs. No Wounding
  misc_feature: MA Experiment ID: 108579 Result: Up-regulated in Transcription
  misc_feature: MA Experiment 108579 PARAMETER Experiment Name: At_4deg_Cold_cDNA_P Parameter: Temperature (deg C) Value: 4 vs. 22
  misc_feature: MA Experiment 108579 PARAMETER Experiment Name: At_4deg_Cold_cDNA_P Parameter: Timepoint (hr) Value: 6
  misc_feature: MA Experiment 108579 PARAMETER Experiment Name: At_4deg_Cold_cDNA_P Parameter: Tissue Value: Aerial
  misc_feature: MA Experiment ID: 108595 Result: Down-regulated in Transcription
  misc_feature: MA Experiment 108595 PARAMETER Experiment Name: At_Ler-pi_Ovule_cDNA_P Parameter: Plant Line Value: null
  misc_feature: MA Experiment ID: 20000069 Result: Down-regulated in Transcription
  misc_feature: MA Experiment 20000069 PARAMETER Experiment Name: At_100uM_ABA_Mutants_cDNA_P Parameter: Plant Line Value: CS23
  misc_feature: MA Experiment 20000069 PARAMETER Experiment Name: At_100uM_ABA_Mutants_cDNA_P Parameter: Timepoint (hr) Value: 6
  misc_feature: MA Experiment 20000069 PARAMETER Experiment Name: At_100uM_ABA_Mutants_cDNA_P Parameter: Tissue Value: Aerial
  misc_feature: MA Experiment 20000069 PARAMETER Experiment Name: At_100uM_ABA_Mutants_cDNA_P Parameter: Treatment Value: 100uM ABA vs. No Treatment
  misc_feature: MA Experiment ID: 20000070 Result: Down-regulated in Transcription
  misc_feature: MA Experiment 20000070 PARAMETER Experiment Name: At_100uM_ABA_Mutants_cDNA_P Parameter: Plant Line Value: CS24
  misc_feature: MA Experiment 20000070 PARAMETER Experiment Name: At_100uM_ABA_Mutants_cDNA_P Parameter: Timepoint (hr) Value: 6
  misc_feature: MA Experiment 20000070 PARAMETER Experiment Name: At_100uM_ABA_Mutants_cDNA_P Parameter: Tissue Value: Aerial
  misc_feature: MA Experiment 20000070 PARAMETER Experiment Name: At_100uM_ABA_Mutants_cDNA_P Parameter: Treatment Value: 100uM ABA vs. No Treatment
  misc_feature: MA Experiment ID: 20000086 Result: Down-regulated in Transcription
  misc_feature: MA Experiment 20000086 PARAMETER Experiment Name: At_100uM_ABA_Mutants_cDNA_P Parameter: Plant Line Value: CS22
  misc_feature: MA Experiment 20000086 PARAMETER Experiment Name: At_100uM_ABA_Mutants_cDNA_P Parameter: Timepoint (hr) Value: 6
  misc_feature: MA Experiment 20000086 PARAMETER Experiment Name: At_100uM_ABA_Mutants_cDNA_P Parameter: Tissue Value: Aerial
  misc_feature: MA Experiment 20000086 PARAMETER Experiment Name: At_100uM_ABA_Mutants_cDNA_P Parameter: Treatment Value: 100uM ABA vs. No Treatment
  misc_feature: MA Experiment ID: 20000087 Result: Down-regulated in Transcription
  misc_feature: MA Experiment 20000087 PARAMETER Experiment Name: At_100uM_ABA_Mutants_cDNA_P Parameter: Plant Line Value: WS
  misc_feature: MA Experiment 20000087 PARAMETER Experiment Name: At_100uM_ABA_Mutants_cDNA_P Parameter: Timepoint (hr) Value: 6
  misc_feature: MA Experiment 20000087 PARAMETER Experiment Name: At_100uM_ABA_Mutants_cDNA_P Parameter: Tissue Value: Aerial
  misc_feature: MA Experiment 20000087 PARAMETER Experiment Name: At_100uM_ABA_Mutants_cDNA_P Parameter: Treatment Value: 100uM ABA vs. No Treatment
  misc_feature: MA Experiment ID: 20000088 Result: Down-regulated in Transcription
  misc_feature: MA Experiment 20000088 PARAMETER Experiment Name: At_100uM_ABA_Mutants_cDNA_P Parameter: Plant Line Value: Landsberg
  misc_feature: MA Experiment 20000088 PARAMETER Experiment Name: At_100uM_ABA_Mutants_cDNA_P Parameter: Timepoint (hr) Value: 6
  misc_feature: MA Experiment 20000088 PARAMETER Experiment Name: At_100uM_ABA_Mutants_cDNA_P Parameter: Tissue Value: Aerial
  misc_feature: MA Experiment 20000088 PARAMETER Experiment Name: At_100uM_ABA_Mutants_cDNA_P Parameter: Treatment Value: 100uM ABA vs. No Treatment
  misc_feature: MA Experiment ID: 20000089 Result: Down-regulated in Transcription
  misc_feature: MA Experiment ID: 20000090 Result: Down-regulated in Transcription
  misc_feature: MA Experiment ID: 20000111 Result: Up-regulated in Transcription
  misc_feature: MA Experiment 20000111 PARAMETER Experiment Name: At_42deg_Heat_cDNA_P Parameter: Temperature (deg C) Value: 42 vs. 22
  misc_feature: MA Experiment 20000111 PARAMETER Experiment Name: At_42deg_Heat_cDNA_P Parameter: Timepoint (hr) Value: 6
  misc_feature: MA Experiment 20000111 PARAMETER Experiment Name: At_42deg_Heat_cDNA_P Parameter: Tissue Value: Aerial
  misc_feature: MA Experiment ID: 20000113 Result: Up-regulated in Transcription
  misc_feature: MA Experiment 20000113 PARAMETER Experiment Name: At_42deg_Heat_cDNA_P Parameter: Temperature (deg C) Value: 42 vs. 22
  misc_feature: MA Experiment 20000113 PARAMETER Experiment Name: At_42deg_Heat_cDNA_P Parameter: Timepoint (hr) Value: 8
  misc_feature: MA Experiment 20000113 PARAMETER Experiment Name: At_42deg_Heat_cDNA_P Parameter: Tissue Value: Aerial
  misc_feature: MA Experiment ID: 20000117 Result: Down-regulated in Transcription
  misc_feature: MA Experiment 20000117 PARAMETER Experiment Name: At_100uM_ABA_Mutants_cDNA_P Parameter: Plant Line Value: Columbia
  misc_feature: MA Experiment 20000117 PARAMETER Experiment Name: At_100uM_ABA_Mutants_cDNA_P Parameter: Timepoint (hr) Value: 6
  misc_feature: MA Experiment 20000117 PARAMETER Experiment Name: At_100uM_ABA_Mutants_cDNA_P Parameter: Tissue Value: Aerial
  misc_feature: MA Experiment 20000117 PARAMETER Experiment Name: At_100uM_ABA_Mutants_cDNA_P Parameter: Treatment Value: 100uM ABA vs. No Treatment
  misc_feature: MA Experiment ID: 20000179 Result: Up-regulated in Transcription
  misc_feature: MA Experiment 20000179 PARAMETER Experiment Name: At_Germinating_Seeds_P Parameter: Age (hr) Value: 6 vs. 0
  misc_feature: MA Experiment 20000179 PARAMETER Experiment Name: At_Germinating_Seeds_P Parameter: Tissue Value: Germinating Seeds
  misc_feature: MA Experiment ID: 20000180 Result: Up-regulated in Transcription
  misc_feature: MA Experiment 20000180 PARAMETER Experiment Name: At_Germinating_Seeds_P Parameter: Age (hr) Value: 24 vs. 0
  misc_feature: MA Experiment 20000180 PARAMETER Experiment Name: At_Germinating_Seeds_P Parameter: Tissue Value: Germinating Seeds
  misc_feature: MA Experiment ID: 20000184 Result: Up-regulated in Transcription
  misc_feature: MA Experiment 20000184 PARAMETER Experiment Name: At_Shoots__P Parameter: Age (day) Value: 7
  misc_feature: MA Experiment 20000184 PARAMETER Experiment Name: At_Shoots__P Parameter: Tissue Value: Shoots vs. Whole Plant
  misc_feature: MA Experiment ID: 20000185 Result: Down-regulated in Transcription
  misc_feature: MA Experiment 20000185 PARAMETER Experiment Name: At_Roots__P Parameter: Age (day) Value: 7 vs. 21
  misc_feature: MA Experiment 20000185 PARAMETER Experiment Name: At_Roots__P Parameter: Organism Value: A. thaliana
  misc_feature: MA Experiment 20000185 PARAMETER Experiment Name: At_Roots__P Parameter: Tissue Value: Roots vs. Whole Plant
  misc_feature: MA Experiment ID: 20000224 Result: Up-regulated in Transcription
  misc_feature: MA Experiment ID: 20000234 Result: Up-regulated in Transcription
  misc_feature: MA Experiment 20000234 PARAMETER Experiment Name: At_Siliques_P Parameter: Age (day) Value: 21
  misc_feature: MA Experiment 20000234 PARAMETER Experiment Name: At_Siliques_P Parameter: Organism Value: A. thaliana
  misc_feature: MA Experiment 20000234 PARAMETER Experiment Name: At_Siliques_P Parameter: Plant Line Value: WS
  misc_feature: MA Experiment 20000234 PARAMETER Experiment Name: At_Siliques_P Parameter: Tissue Value: Less Than 5mm Siliques vs. Whole Plant
  misc_feature: MA Experiment ID: 20000235 Result: Up-regulated in Transcription
  misc_feature: MA Experiment 20000235 PARAMETER Experiment Name: At_Siliques_P Parameter: Age (day) Value: 21
  misc_feature: MA Experiment 20000235 PARAMETER Experiment Name: At_Siliques_P Parameter: Organism Value: A. thaliana
  misc_feature: MA Experiment 20000235 PARAMETER Experiment Name: At_Siliques_P Parameter: Plant Line Value: WS
  misc_feature: MA Experiment 20000235 PARAMETER Experiment Name: At_Siliques_P Parameter: Tissue Value: 5-10mm Siliques vs. Whole Plant
  misc_feature: MA Experiment ID: 20000265 Result: Up-regulated in Transcription
  misc_feature: MA Experiment 20000265 PARAMETER Experiment Name: At_Open_Flower_P Parameter: Age (day) Value: 21
  misc_feature: MA Experiment 20000265 PARAMETER Experiment Name: At_Open_Flower_P Parameter: Plant Line Value: WS
  misc_feature: MA Experiment 20000265 PARAMETER Experiment Name: At_Open_Flower_P Parameter: Tissue Value: Closed Flower vs. Whole Plant
  misc_feature: MA Experiment ID: 20000267 Result: Up-regulated in Transcription
  misc_feature: MA Experiment 20000267 PARAMETER Experiment Name: At_Drought_P Parameter: Age (day) Value: 7
  misc_feature: MA Experiment 20000267 PARAMETER Experiment Name: At_Drought_P Parameter: Organism Value: A. thaliana
  misc_feature: MA Experiment 20000267 PARAMETER Experiment Name: At_Drought_P Parameter: Plant Line Value: WS
  misc_feature: MA Experiment 20000267 PARAMETER Experiment Name: At_Drought_P Parameter: Timepoint (hr) Value: 6
  misc_feature: MA Experiment 20000267 PARAMETER Experiment Name: At_Drought_P Parameter: Tissue Value: Whole Plant
  misc_feature: MA Experiment 20000267 PARAMETER Experiment Name: At_Drought_P Parameter: Treatment Value: Drought vs. No Drought
  misc_feature: MA Experiment ID: 20000268 Result: Up-regulated in Transcription
  misc_feature: MA Experiment 20000268 PARAMETER Experiment Name: At_100mM_NaCl__P Parameter: Age (day) Value: 14
  misc_feature: MA Experiment 20000268 PARAMETER Experiment Name: At_100mM_NaCl__P Parameter: Organism Value: A. thaliana
  misc_feature: MA Experiment 20000268 PARAMETER Experiment Name: At_100mM_NaCl__P Parameter: Plant Line Value: WS
  misc_feature: MA Experiment 20000268 PARAMETER Experiment Name: At_100mM_NaCl__P Parameter: Timepoint (hr) Value: 6
  misc_feature: MA Experiment 20000268 PARAMETER Experiment Name: At_100mM_NaCl__P Parameter: Tissue Value: Whole Plant
  misc_feature: MA Experiment 20000268 PARAMETER Experiment Name: At_100mM_NaCl__P Parameter: Treatment Value: 100mM NaCl vs. No Treatment
  misc_feature: MA Experiment ID: 20000286 Result: Up-regulated in Transcription
  misc_feature: MA Experiment 20000286 PARAMETER Experiment Name: At_Open_Flower_P Parameter: Age (day) Value: 21
  misc_feature: MA Experiment 20000286 PARAMETER Experiment Name: At_Open_Flower_P Parameter: Plant Line Value: WS
  misc_feature: MA Experiment 20000286 PARAMETER Experiment Name: At_Open_Flower_P Parameter: Tissue Value: Half Open vs. Whole Plant
  misc_feature: MA Experiment ID: 20000436 Result: Up-regulated in Transcription
  misc_feature: MA Experiment 20000436 PARAMETER Experiment Name: At_Drought_P Parameter: Age (day) Value: 7
  misc_feature: MA Experiment 20000436 PARAMETER Experiment Name: At_Drought_P Parameter: Organism Value: A. thaliana
  misc_feature: MA Experiment 20000436 PARAMETER Experiment Name: At_Drought_P Parameter: Plant Line Value: WS
  misc_feature: MA Experiment 20000436 PARAMETER Experiment Name: At_Drought_P Parameter: Timepoint (hr) Value: 12
  misc_feature: MA Experiment 20000436 PARAMETER Experiment Name: At_Drought_P Parameter: Tissue Value: Whole Plant
  misc_feature: MA Experiment 20000436 PARAMETER Experiment Name: At_Drought_P Parameter: Treatment Value: Drought vs. No Drought
  misc_feature: MA Experiment ID: 20000438 Result: Up-regulated in Transcription
  misc_feature: MA Experiment 20000438 PARAMETER Experiment Name: At_Shoots__P Parameter: Age (day) Value: 14
  misc_feature: MA Experiment 20000438 PARAMETER Experiment Name: At_Shoots__P Parameter: Tissue Value: Shoots vs. Whole Plant
  misc_feature: MA Experiment ID: 20000439 Result: Down-regulated in Transcription
  misc_feature: MA Experiment 20000439 PARAMETER Experiment Name: At_Roots__P Parameter: Age (day) Value: 14 vs. 21
  misc_feature: MA Experiment 20000439 PARAMETER Experiment Name: At_Roots__P Parameter: Organism Value: A. thaliana
  misc_feature: MA Experiment 20000439 PARAMETER Experiment Name: At_Roots__P Parameter: Tissue Value: Roots vs. Whole Plant
  misc_feature: MA Experiment ID: 20000527 Result: Up-regulated in Transcription
  misc_feature: MA Experiment 20000527 PARAMETER Experiment Name: At_10percent_PEG_P Parameter: Age (day) Value: 20
  misc_feature: MA Experiment 20000527 PARAMETER Experiment Name: At_10percent_PEG_P Parameter: Organism Value: A. thaliana
  misc_feature: MA Experiment 20000527 PARAMETER Experiment Name: At_10percent_PEG_P Parameter: Plant Line Value: WS
  misc_feature: MA Experiment 20000527 PARAMETER Experiment Name: At_10percent_PEG_P Parameter: Timepoint (day) Value: 20
  misc_feature: MA Experiment 20000527 PARAMETER Experiment Name: At_10percent_PEG_P Parameter: Tissue Value: Whole Plant
  misc_feature: MA Experiment 20000527 PARAMETER Experiment Name: At_10percent_PEG_P Parameter: Treatment Value: 10percent PEG vs. No Treatment
  misc_feature: MA Experiment ID: 20000573 Result: Down-regulated in Transcription
  misc_feature: MA Experiment 20000573 PARAMETER Experiment Name: At_100uM_ABA_Mutants__P Parameter: Organism Value: A. thaliana
  misc_feature: MA Experiment 20000573 PARAMETER Experiment Name: At_100uM_ABA_Mutants__P Parameter: Plant Line Value: CS22 vs. Ler wt
  misc_feature: MA Experiment 20000573 PARAMETER Experiment Name: At_100uM_ABA_Mutants__P Parameter: Timepoint (hr) Value: N/A
  misc_feature: MA Experiment 20000573 PARAMETER Experiment Name: At_100uM_ABA_Mutants__P Parameter: Tissue Value: Whole Plant
  misc_feature: MA Experiment 20000573 PARAMETER Experiment Name: At_100uM_ABA_Mutants__P Parameter: Treatment Value: None
  misc_feature: MA Experiment ID: 20000574 Result: Down-regulated in Transcription
  misc_feature: MA Experiment 20000574 PARAMETER Experiment Name: At_100uM_ABA_Mutants__P Parameter: Organism Value: A. thaliana
  misc_feature: MA Experiment 20000574 PARAMETER Experiment Name: At_100uM_ABA_Mutants__P Parameter: Plant Line Value: CS23 vs. Ler wt
  misc_feature: MA Experiment 20000574 PARAMETER Experiment Name: At_100uM_ABA_Mutants__P Parameter: Timepoint (hr) Value: N/A
  misc_feature: MA Experiment 20000574 PARAMETER Experiment Name: At_100uM_ABA_Mutants__P Parameter: Tissue Value: Whole Plant
  misc_feature: MA Experiment 20000574 PARAMETER Experiment Name: At_100uM_ABA_Mutants__P Parameter: Treatment Value: None
  misc_feature: MA Experiment ID: 20001248 Result: Down-regulated in Transcription
  misc_feature: MA Experiment 20001248 PARAMETER Experiment Name: At_Far-red-induction_P Parameter: Age (day) Value: 7
  misc_feature: MA Experiment 20001248 PARAMETER Experiment Name: At_Far-red-induction_P Parameter: Light Value: Far-red vs. White
  misc_feature: MA Experiment 20001248 PARAMETER Experiment Name: At_Far-red-induction_P Parameter: Organism Value: A. thaliana
  misc_feature: MA Experiment 20001248 PARAMETER Experiment Name: At_Far-red-induction_P Parameter: Plant Line Value: Columbia
  misc_feature: MA Experiment 20001248 PARAMETER Experiment Name: At_Far-red-induction_P Parameter: Timepoint (hr) Value: 4
  misc_feature: MA Experiment 20001248 PARAMETER Experiment Name: At_Far-red-induction_P Parameter: Tissue Value: Whole Plant
  misc_feature: MA Experiment ID: 20001450 Result: Down-regulated in Transcription
  misc_feature: MA Experiment 20001450 PARAMETER Experiment Name: At_Far-red-induction_P Parameter: Age (day) Value: 7
  misc_feature: MA Experiment 20001450 PARAMETER Experiment Name: At_Far-red-induction_P Parameter: Light Value: Far-red vs. White
  misc_feature: MA Experiment 20001450 PARAMETER Experiment Name: At_Far-red-induction_P Parameter: Organism Value: A. thaliana
  misc_feature: MA Experiment 20001450 PARAMETER Experiment Name: At_Far-red-induction_P Parameter: Plant Line Value: Columbia
  misc_feature: MA Experiment 20001450 PARAMETER Experiment Name: At_Far-red-induction_P Parameter: Timepoint (hr) Value: 8
  misc_feature: MA Experiment 20001450 PARAMETER Experiment Name: At_Far-red-induction_P Parameter: Tissue Value: Whole Plant
  misc_feature: MA Experiment ID: 20001558 Result: Up-regulated in Transcription
  misc_feature: MA Experiment 20001558 PARAMETER Experiment Name: At_Drought_Soil_Dry_P Parameter: Age (day) Value: 27
  misc_feature: MA Experiment 20001558 PARAMETER Experiment Name: At_Drought_Soil_Dry_P Parameter: Organism Value: A. thaliana
  misc_feature: MA Experiment 20001558 PARAMETER Experiment Name: At_Drought_Soil_Dry_P Parameter: Plant Line Value: WS
  misc_feature: MA Experiment 20001558 PARAMETER Experiment Name: At_Drought_Soil_Dry_P Parameter: Post Timepoint (hr) Value: 6
  misc_feature: MA Experiment 20001558 PARAMETER Experiment Name: At_Drought_Soil_Dry_P Parameter: Post-Treatment Value: Re-Water vs. No Drought
  misc_feature: MA Experiment 20001558 PARAMETER Experiment Name: At_Drought_Soil_Dry_P Parameter: Timepoint (day) Value: 13
  misc_feature: MA Experiment 20001558 PARAMETER Experiment Name: At_Drought_Soil_Dry_P Parameter: Treatment Value: Drought vs. No Drought
  misc_feature: MA Experiment ID: 20001911 Result: Down-regulated in Transcription
  misc_feature: MA Experiment 20001911 PARAMETER Experiment Name: At_Drought_Reproduction_P Parameter: Age (day) Value: 40
  misc_feature: MA Experiment 20001911 PARAMETER Experiment Name: At_Drought_Reproduction_P Parameter: Organism Value: A. thaliana
  misc_feature: MA Experiment 20001911 PARAMETER Experiment Name: At_Drought_Reproduction_P Parameter: Plant Line Value: WS
  misc_feature: MA Experiment 20001911 PARAMETER Experiment Name: At_Drought_Reproduction_P Parameter: Timepoint (day) Value: 10
  misc_feature: MA Experiment 20001911 PARAMETER Experiment Name: At_Drought_Reproduction_P Parameter: Tissue Value: Flowers
  misc_feature: MA Experiment 20001911 PARAMETER Experiment Name: At_Drought_Reproduction_P Parameter: Treatment Value: Drought vs. No Drought

SEQ ID NO: 32949 - protein, 390 aa, Arabidopsis thaliana; identical to SEQ ID NO: 29359
  peptide (1)..(390): Ceres Seq. ID no. 12334309
  misc_feature (48)..(369): Pfam Name: GDSL-like Lipase/Acylhydrolase Pfam Description: GDSL-like Lipase/Acylhydrolase
  misc_feature (10)..(379): Homolog of NCBI NO: 15218756 NR Description: lipase; protein id: At1g28670.1, supported by
  misc_feature (10)..(379): Homolog of NCBI NO: 15218751 NR Description: lipase, putative; protein id: At1g28640.1
  misc_feature (10)..(377): Homolog of NCBI NO: 34903994 NR Description: unnamed protein product [Oryza sativa (japonica
  misc_feature (15)..(379): Homolog of NCBI NO: 15218725 NR Description: lipase, putative
  misc_feature (14)..(379): Homolog of NCBI NO: 21593234 NR Description: lipase, putative [Arabidopsis thaliana]
  misc_feature (14)..(379): Homolog of NCBI NO: 15218731 NR Description: lipase, putative
  misc_feature (14)..(379): Homolog of NCBI NO: 10764858 NR Description: F1K23.17 [Arabidopsis thaliana]
  misc_feature (45)..(378): Homolog of NCBI NO: 34903978 NR Description: unnamed protein product [Oryza sativa (japonica
  misc_feature (17)..(379): Homolog of NCBI NO: 15218753 NR Description: lipase, putative; protein id: At1g28650.1
  misc_feature (10)..(390): Homolog of NCBI NO: 15228381 NR Description: lipase - like protein

SEQ ID NO: 32950 - protein, 381 aa, Arabidopsis thaliana; identical to SEQ ID NO: 29360
  peptide (1)..(381): Ceres Seq. ID no. 12334310
  misc_feature (39)..(360): Pfam Name: GDSL-like Lipase/Acylhydrolase Pfam Description: GDSL-like Lipase/Acylhydrolase
  misc_feature (1)..(370): Homolog of NCBI NO: 15218756 NR Description: lipase; protein id: At1g28670.1, supported by
  misc_feature (1)..(370): Homolog of NCBI NO: 15218751 NR Description: lipase, putative; protein id: At1g28640.1
  misc_feature (1)..(368): Homolog of NCBI NO: 34903994 NR Description: unnamed protein product [Oryza sativa (japonica
  misc_feature (6)..(370): Homolog of NCBI NO: 15218725 NR Description: lipase, putative
  misc_feature (5)..(370): Homolog of NCBI NO: 21593234 NR Description: lipase, putative [Arabidopsis thaliana]
  misc_feature (5)..(370): Homolog of NCBI NO: 15218731 NR Description: lipase, putative
  misc_feature (5)..(370): Homolog of NCBI NO: 10764858 NR Description: F1K23.17 [Arabidopsis thaliana]
  misc_feature (36)..(369): Homolog of NCBI NO: 34903978 NR Description: unnamed protein product [Oryza sativa (japonica
  misc_feature (8)..(370): Homolog of NCBI NO: 15218753 NR Description: lipase, putative; protein id: At1g28650.1
  misc_feature (1)..(381): Homolog of NCBI NO: 15228381 NR Description: lipase - like protein

SEQ ID NO: 32951 - protein, 311 aa, Arabidopsis thaliana; identical to SEQ ID NO: 29361
  peptide (1)..(311): Ceres Seq. ID no. 12334311
  misc_feature (1)..(290): Pfam Name: GDSL-like Lipase/Acylhydrolase Pfam Description: GDSL-like Lipase/Acylhydrolase
  misc_feature (1)..(300): Homolog of NCBI NO: 15218756 NR Description: lipase; protein id: At1g28670.1, supported by
  misc_feature (1)..(300): Homolog of NCBI NO: 15218751 NR Description: lipase, putative; protein id: At1g28640.1
  misc_feature (1)..(298): Homolog of NCBI NO: 34903994 NR Description: unnamed protein product [Oryza sativa (japonica
  misc_feature (1)..(300): Homolog of NCBI NO: 15218725 NR Description: lipase, putative
  misc_feature (1)..(300): Homolog of NCBI NO: 21593234 NR Description: lipase, putative [Arabidopsis thaliana]
  misc_feature (1)..(300): Homolog of NCBI NO: 15218731 NR Description: lipase, putative
  misc_feature (1)..(300): Homolog of NCBI NO: 10764858 NR Description: F1K23.17 [Arabidopsis thaliana]
  misc_feature (1)..(299): Homolog of NCBI NO: 34903978 NR Description: unnamed protein product [Oryza sativa (japonica
  misc_feature (1)..(300): Homolog of NCBI NO: 15218753 NR Description: lipase, putative; protein id: At1g28650.1
  misc_feature (1)..(311): Homolog of NCBI NO: 15228381 NR Description: lipase - like protein

SEQ ID NO: 32952 - DNA, 813 bp, Arabidopsis thaliana; identical to SEQ ID NO: 29362
  misc_feature (1)..(813): Ceres Seq. ID no. 12580234
  misc_feature: MA Experiment ID: 20000111 Result: Down-regulated in Transcription
  misc_feature: MA Experiment 20000111 PARAMETER Experiment Name: At_42deg_Heat_cDNA_P Parameter: Temperature (deg C) Value: 42 vs. 22
  misc_feature: MA Experiment 20000111 PARAMETER Experiment Name: At_42deg_Heat_cDNA_P Parameter: Timepoint (hr) Value: 6
  misc_feature: MA Experiment 20000111 PARAMETER Experiment Name: At_42deg_Heat_cDNA_P Parameter: Tissue Value: Aerial
  misc_feature: MA Experiment ID: 20000112 Result: Down-regulated in Transcription
  misc_feature: MA Experiment 20000112 PARAMETER Experiment Name: At_42deg_Heat_cDNA_P Parameter: Temperature (deg C) Value: 42 vs. 22
  misc_feature: MA Experiment 20000112 PARAMETER Experiment Name: At_42deg_Heat_cDNA_P Parameter: Timepoint (hr) Value: 2
  misc_feature: MA Experiment 20000112 PARAMETER Experiment Name: At_42deg_Heat_cDNA_P Parameter: Tissue Value: Aerial
  misc_feature: MA Experiment ID: 20000113 Result: Down-regulated in Transcription
  misc_feature: MA Experiment 20000113 PARAMETER Experiment Name: At_42deg_Heat_cDNA_P Parameter: Temperature (deg C) Value: 42 vs. 22
  misc_feature: MA Experiment 20000113 PARAMETER Experiment Name: At_42deg_Heat_cDNA_P Parameter: Timepoint (hr) Value: 8
  misc_feature: MA Experiment 20000113 PARAMETER Experiment Name: At_42deg_Heat_cDNA_P Parameter: Tissue Value: Aerial
  misc_feature: MA Experiment ID: 20000224 Result: Down-regulated in Transcription

SEQ ID NO: 32953 - protein, 157 aa, Arabidopsis thaliana; identical to SEQ ID NO: 29363
  peptide (1)..(157): Ceres Seq. ID no. 12580235
  misc_feature (14)..(156): Pfam Name: ORMDL family Pfam Description: ORMDL family
  misc_feature (13)..(154): Homolog of NCBI NO: 26352536 NR Description: unnamed protein product [Mus musculus]
  misc_feature (15)..(153): Homolog of NCBI NO: 19112082 NR Description: hypothetical protein
  misc_feature (13)..(154): Homolog of NCBI NO: 13385128 NR Description: ORM1-like 3; expressed sequence AI315223 [Mus
  misc_feature (56)..(156): Homolog of NCBI NO: 18419644 NR Description: unknown [Narcissus pseudonarcissus]
  misc_feature (5)..(147): Homolog of NCBI NO: 34901370 NR Description: OSJNBb0062P14.15 [Oryza sativa (japonica
  misc_feature (5)..(156): Homolog of NCBI NO: 34394897 NR Description: putative ORMDL2 [Oryza sativa (japonica
  misc_feature (4)..(157): Homolog of NCBI NO: 15238262 NR Description: putative protein; protein id: At5g42000.1
  misc_feature (1)..(154): Homolog of NCBI NO: 38344271 NR Description: OSJNBa0005N02.9 [Oryza sativa (japonica
  misc_feature (1)..(147): Homolog of NCBI NO: 25513580 NR Description: F6F3.4 protein - Arabidopsis thaliana
  misc_feature (1)..(157): Homolog of NCBI NO: 18378814 NR Description: expressed protein

SEQ ID NO: 32954 - protein, 144 aa, Arabidopsis thaliana; identical to SEQ ID NO: 29364
  peptide (1)..(144): Ceres Seq. ID no. 12580236
  misc_feature (1)..(143): Pfam Name: ORMDL family Pfam Description: ORMDL family
  misc_feature (1)..(141): Homolog of NCBI NO: 26352536 NR Description: unnamed protein product [Mus musculus]
  misc_feature (2)..(140): Homolog of NCBI NO: 19112082 NR Description: hypothetical protein
  misc_feature (1)..(141): Homolog of NCBI NO: 13385128 NR Description: ORM1-like 3; expressed sequence AI315223 [Mus
  misc_feature (43)..(143): Homolog of NCBI NO: 18419644 NR Description: unknown [Narcissus pseudonarcissus]
  misc_feature (1)..(134): Homolog of NCBI NO: 34901370 NR Description: OSJNBb0062P14.15 [Oryza sativa (japonica
  misc_feature (1)..(143): Homolog of NCBI NO: 34394897 NR Description: putative ORMDL2 [Oryza sativa (japonica
  misc_feature (1)..(144): Homolog of NCBI NO: 15238262 NR Description: putative protein; protein id: At5g42000.1
  misc_feature (1)..(141): Homolog of NCBI NO: 38344271 NR Description: OSJNBa0005N02.9 [Oryza sativa (japonica
  misc_feature (1)..(134): Homolog of NCBI NO: 25513580 NR Description: F6F3.4 protein - Arabidopsis thaliana
  misc_feature (1)..(144): Homolog of NCBI NO: 18378814 NR Description: expressed protein

SEQ ID NO: 32955 - protein, 136 aa, Arabidopsis thaliana; identical to SEQ ID NO: 29365
  peptide (1)..(136): Ceres Seq. ID no. 12580237
  misc_feature (1)..(135): Pfam Name: ORMDL family Pfam Description: ORMDL family
  misc_feature (1)..(133): Homolog of NCBI NO: 26352536 NR Description: unnamed protein product [Mus musculus]
  misc_feature (1)..(132): Homolog of NCBI NO: 19112082 NR Description: hypothetical protein
  misc_feature (1)..(133): Homolog of NCBI NO: 13385128 NR Description: ORM1-like 3; expressed sequence AI315223 [Mus
  misc_feature (35)..(135): Homolog of NCBI NO: 18419644 NR Description: unknown [Narcissus pseudonarcissus]
  misc_feature (1)..(126): Homolog of NCBI NO: 34901370 NR Description: OSJNBb0062P14.15 [Oryza sativa (japonica
  misc_feature (1)..(135): Homolog of NCBI NO: 34394897 NR Description: putative ORMDL2 [Oryza sativa (japonica
  misc_feature (1)..(136): Homolog of NCBI NO: 15238262 NR Description: putative protein; protein id: At5g42000.1
  misc_feature (1)..(133): Homolog of NCBI NO: 38344271 NR Description: OSJNBa0005N02.9 [Oryza sativa (japonica
  misc_feature (1)..(126): Homolog of NCBI NO: 25513580 NR Description: F6F3.4 protein - Arabidopsis thaliana
  misc_feature (1)..(136): Homolog of NCBI NO: 18378814 NR Description: expressed protein

SEQ ID NO: 32956 - DNA, 1288 bp, Arabidopsis thaliana; identical to SEQ ID NO: 29366
  misc_feature (1)..(1288): Ceres Seq. ID no. 12334788
  misc_feature: MA Experiment ID: 108473 Result: Down-regulated in Transcription
  misc_feature: MA Experiment 108473 PARAMETER Experiment Name: At_Drought_Flowers_cDNA_P Parameter: Timepoint (hr) Value: 7 d
  misc_feature: MA Experiment 108473 PARAMETER Experiment Name: At_Drought_Flowers_cDNA_P Parameter: Tissue Value: Flower
  misc_feature: MA Experiment 108473 PARAMETER Experiment Name: At_Drought_Flowers_cDNA_P Parameter: Treatment Value: Drought vs. No Drought
  misc_feature: MA Experiment ID: 108501 Result: Down-regulated in Transcription
  misc_feature: MA Experiment 108501 PARAMETER Experiment Name: At_ap2_floral_buds_cDNA_P Parameter: Plant Line Value: ap2 (Ler.)
  misc_feature: MA Experiment 108501 PARAMETER Experiment Name: At_ap2_floral_buds_cDNA_P Parameter: Tissue Value: Closed Flower
  misc_feature: MA Experiment ID: 20000087 Result: Up-regulated in Transcription
  misc_feature: MA Experiment 20000087 PARAMETER Experiment Name: At_100uM_ABA_Mutants_cDNA_P Parameter: Plant Line Value: WS
  misc_feature: MA Experiment 20000087 PARAMETER Experiment Name: At_100uM_ABA_Mutants_cDNA_P Parameter: Timepoint (hr) Value: 6
  misc_feature: MA Experiment 20000087 PARAMETER Experiment Name: At_100uM_ABA_Mutants_cDNA_P Parameter: Tissue Value: Aerial
  misc_feature: MA Experiment 20000087 PARAMETER Experiment Name: At_100uM_ABA_Mutants_cDNA_P Parameter: Treatment Value: 100uM ABA vs. No Treatment
  misc_feature: MA Experiment ID: 20000113 Result: Down-regulated in Transcription
  misc_feature: MA Experiment 20000113 PARAMETER Experiment Name: At_42deg_Heat_cDNA_P Parameter: Temperature (deg C) Value: 42 vs. 22
  misc_feature: MA Experiment 20000113 PARAMETER Experiment Name: At_42deg_Heat_cDNA_P Parameter: Timepoint (hr) Value: 8
  misc_feature: MA Experiment 20000113 PARAMETER Experiment Name: At_42deg_Heat_cDNA_P Parameter: Tissue Value: Aerial
  misc_feature: MA Experiment ID: 20000234 Result: Down-regulated in Transcription
  misc_feature: MA Experiment 20000234 PARAMETER Experiment Name: At_Siliques_P Parameter: Age (day) Value: 21
  misc_feature: MA Experiment 20000234 PARAMETER Experiment Name: At_Siliques_P Parameter: Organism Value: A. thaliana
  misc_feature: MA Experiment 20000234 PARAMETER Experiment Name: At_Siliques_P Parameter: Plant Line Value: WS
  misc_feature: MA Experiment 20000234 PARAMETER Experiment Name: At_Siliques_P Parameter: Tissue Value: Less Than 5mm Siliques vs. Whole Plant
  misc_feature: MA Experiment ID: 20000235 Result: Down-regulated in Transcription
  misc_feature: MA Experiment 20000235 PARAMETER Experiment Name: At_Siliques_P Parameter: Age (day) Value: 21
  misc_feature: MA Experiment 20000235 PARAMETER Experiment Name: At_Siliques_P Parameter: Organism Value: A. thaliana
  misc_feature: MA Experiment 20000235 PARAMETER Experiment Name: At_Siliques_P Parameter: Plant Line Value: WS
  misc_feature: MA Experiment 20000235 PARAMETER Experiment Name: At_Siliques_P Parameter: Tissue Value: 5-10mm Siliques vs. Whole Plant
  misc_feature: MA Experiment ID: 20000265 Result: Up-regulated in Transcription
  misc_feature: MA Experiment 20000265 PARAMETER Experiment Name: At_Open_Flower_P Parameter: Age (day) Value: 21
  misc_feature: MA Experiment 20000265 PARAMETER Experiment Name: At_Open_Flower_P Parameter: Plant Line Value: WS
  misc_feature: MA Experiment 20000265 PARAMETER Experiment Name: At_Open_Flower_P Parameter: Tissue Value: Closed Flower vs. Whole Plant
  misc_feature: MA Experiment ID: 20000286 Result: Up-regulated in Transcription
  misc_feature: MA Experiment 20000286 PARAMETER Experiment Name: At_Open_Flower_P Parameter: Age (day) Value: 21
  misc_feature: MA Experiment 20000286 PARAMETER Experiment Name: At_Open_Flower_P Parameter: Plant Line Value: WS
  misc_feature: MA Experiment 20000286 PARAMETER Experiment Name: At_Open_Flower_P Parameter: Tissue Value: Half Open vs. Whole Plant
  misc_feature: MA Experiment ID: 20001768 Result: Up-regulated in Transcription
  misc_feature: MA Experiment 20001768 PARAMETER Experiment Name: At_Far-red-enriched-adult_P Parameter: Age (day) Value: 28
  misc_feature: MA Experiment 20001768 PARAMETER Experiment Name: At_Far-red-enriched-adult_P Parameter: Light Value: Far-red enriched vs. White
  misc_feature: MA Experiment 20001768 PARAMETER Experiment Name: At_Far-red-enriched-adult_P Parameter: Organism Value: A. thaliana
  misc_feature: MA Experiment 20001768 PARAMETER Experiment Name: At_Far-red-enriched-adult_P Parameter: Plant Line Value: Columbia
  misc_feature: MA Experiment 20001768 PARAMETER Experiment Name: At_Far-red-enriched-adult_P Parameter: Timepoint (hr) Value: 1
  misc_feature: MA Experiment 20001768 PARAMETER Experiment Name: At_Far-red-enriched-adult_P Parameter: Tissue Value: Aerial
  misc_feature: MA Experiment ID: 20001771 Result: Up-regulated in Transcription
  misc_feature: MA Experiment 20001771 PARAMETER Experiment Name: At_Far-red-enriched-adult_P Parameter: Age (day) Value: 28
  misc_feature: MA Experiment 20001771 PARAMETER Experiment Name: At_Far-red-enriched-adult_P Parameter: Light Value: Far-red enriched vs. White
  misc_feature: MA Experiment 20001771 PARAMETER Experiment Name: At_Far-red-enriched-adult_P Parameter: Organism Value: A. thaliana
  misc_feature: MA Experiment 20001771 PARAMETER Experiment Name: At_Far-red-enriched-adult_P Parameter: Plant Line Value: Columbia
  misc_feature: MA Experiment 20001771 PARAMETER Experiment Name: At_Far-red-enriched-adult_P Parameter: Timepoint (hr) Value: 16
  misc_feature: MA Experiment 20001771 PARAMETER Experiment Name: At_Far-red-enriched-adult_P Parameter: Tissue Value: Aerial
  misc_feature: MA Experiment ID: 20001773 Result: Up-regulated in Transcription
  misc_feature: MA Experiment 20001773 PARAMETER Experiment Name: At_Far-red-enriched-adult_P Parameter: Age (day) Value: 30
  misc_feature: MA Experiment 20001773 PARAMETER Experiment Name: At_Far-red-enriched-adult_P Parameter: Light Value: Far-red enriched vs. White
  misc_feature: MA Experiment 20001773 PARAMETER Experiment Name: At_Far-red-enriched-adult_P Parameter: Organism Value: A. thaliana
  misc_feature: MA Experiment 20001773 PARAMETER Experiment Name: At_Far-red-enriched-adult_P Parameter: Plant Line Value: Columbia
  misc_feature: MA Experiment 20001773 PARAMETER Experiment Name: At_Far-red-enriched-adult_P Parameter: Timepoint (hr) Value: 48
  misc_feature: MA Experiment 20001773 PARAMETER Experiment Name: At_Far-red-enriched-adult_P Parameter: Tissue Value: Aerial
  misc_feature: MA Experiment ID: 20001910 Result: Down-regulated in Transcription
  misc_feature: MA Experiment 20001910 PARAMETER Experiment Name: At_Drought_Reproduction_P Parameter: Age (day) Value: 37
  misc_feature: MA Experiment 20001910 PARAMETER Experiment Name: At_Drought_Reproduction_P Parameter: Organism Value: A. thaliana
  misc_feature: MA Experiment 20001910 PARAMETER Experiment Name: At_Drought_Reproduction_P Parameter: Plant Line Value: WS
  misc_feature: MA Experiment 20001910 PARAMETER Experiment Name: At_Drought_Reproduction_P Parameter: Timepoint (day) Value: 7
  misc_feature: MA Experiment 20001910 PARAMETER Experiment Name: At_Drought_Reproduction_P Parameter: Tissue Value: Flowers
  misc_feature: MA Experiment 20001910 PARAMETER Experiment Name: At_Drought_Reproduction_P Parameter: Treatment Value: Drought vs. No Drought

SEQ ID NO: 32957 - protein, 343 aa, Arabidopsis thaliana; identical to SEQ ID NO: 29367
  peptide (1)..(343): Ceres Seq. ID no. 12334789
  misc_feature (29)..(334): Pfam Name: GDSL-like Lipase/Acylhydrolase Pfam Description: GDSL-like Lipase/Acylhydrolase
  misc_feature (1)..(343): Homolog of NCBI NO: 15220775 NR Description: hypothetical protein; protein id: At1g23500.1
  misc_feature (1)..(343): Homolog of NCBI NO: 15219505 NR Description: putative lipase/acylhydrolase; protein id:
  misc_feature (3)..(343): Homolog of NCBI NO: 15242657 NR Description: lipase/acylhydrolase-like protein; protein id:
  misc_feature (8)..(327): Homolog of NCBI NO: 25404995 NR Description: protein T4O12.15 [imported] - Arabidopsis
  misc_feature (8)..(343): Homolog of NCBI NO: 15222904 NR Description: family II extracellular lipase 6 (EXL6)
  misc_feature (7)..(343): Homolog of NCBI NO: 18410967 NR Description: family II extracellular lipase 5 (EXL5)
  misc_feature (1)..(343): Homolog of NCBI NO: 8778809 NR Description: T4O12.14 [Arabidopsis thaliana]
  misc_feature (21)..(343): Homolog of NCBI NO: 25404994 NR Description: protein T4O12.13 [imported] - Arabidopsis
  misc_feature (1)..(343): Homolog of NCBI NO: 15054388 NR Description: family II lipase EXL4 [Arabidopsis thaliana]
  misc_feature (1)..(343): Homolog of NCBI NO: 15222902 NR Description: family II extracellular lipase 4 (EXL4)

SEQ ID NO: 32958 - protein, 295 aa, Arabidopsis thaliana; identical to SEQ ID NO: 29368
  peptide (1)..(295): Ceres Seq. ID no. 12334790
  misc_feature (1)..(286): Pfam Name: GDSL-like Lipase/Acylhydrolase Pfam Description: GDSL-like Lipase/Acylhydrolase
  misc_feature (1)..(295): Homolog of NCBI NO: 15220775 NR Description: hypothetical protein; protein id: At1g23500.1
  misc_feature (1)..(295): Homolog of NCBI NO: 15219505 NR Description: putative lipase/acylhydrolase; protein id:
  misc_feature (1)..(295): Homolog of NCBI NO: 15242657 NR Description: lipase/acylhydrolase-like protein; protein id:
  misc_feature (1)..(279): Homolog of NCBI NO: 25404995 NR Description: protein T4O12.15 [imported] - Arabidopsis
  misc_feature (1)..(295): Homolog of NCBI NO: 15222904 NR Description: family II extracellular lipase 6 (EXL6)
  misc_feature (1)..(295): Homolog of NCBI NO: 18410967 NR Description: family II extracellular lipase 5 (EXL5)
  misc_feature (1)..(295): Homolog of NCBI NO: 8778809 NR Description: T4O12.14 [Arabidopsis thaliana]
  misc_feature (1)..(295): Homolog of NCBI NO: 25404994 NR Description: protein T4O12.13 [imported] - Arabidopsis
  misc_feature (1)..(295): Homolog of NCBI NO: 15054388 NR Description: family II lipase EXL4 [Arabidopsis thaliana]
  misc_feature (1)..(295): Homolog of NCBI NO: 15222902 NR Description: family II extracellular lipase 4 (EXL4)

SEQ ID NO: 32959 - protein, 282 aa, Arabidopsis thaliana; identical to SEQ ID NO: 29369
  peptide (1)..(282): Ceres Seq. ID no. 12334791
  misc_feature (1)..(273): Pfam Name: GDSL-like Lipase/Acylhydrolase Pfam Description: GDSL-like Lipase/Acylhydrolase
  misc_feature (1)..(282): Homolog of NCBI NO: 15220775 NR Description: hypothetical protein; protein id: At1g23500.1
  misc_feature (1)..(282): Homolog of NCBI NO: 15219505 NR Description: putative lipase/acylhydrolase; protein id:
  misc_feature (1)..(282): Homolog of NCBI NO: 15242657 NR Description: lipase/acylhydrolase-like protein; protein id:
  misc_feature (1)..(266): Homolog of NCBI NO: 25404995 NR Description: protein T4O12.15 [imported] - Arabidopsis
  misc_feature (1)..(282): Homolog of NCBI NO: 15222904 NR Description: family II extracellular lipase 6 (EXL6)
  misc_feature (1)..(282): Homolog of NCBI NO: 18410967 NR Description: family II extracellular lipase 5 (EXL5)
  misc_feature (1)..(282): Homolog of NCBI NO: 8778809 NR Description: T4O12.14 [Arabidopsis thaliana]
  misc_feature (1)..(282): Homolog of NCBI NO: 25404994 NR Description: protein T4O12.13 [imported] - Arabidopsis
  misc_feature (1)..(282): Homolog of NCBI NO: 15054388 NR Description: family II lipase EXL4 [Arabidopsis thaliana]
  misc_feature (1)..(282): Homolog of NCBI NO: 15222902 NR Description: family II extracellular lipase 4 (EXL4)

SEQ ID NO: 32960 - DNA, 1304 bp, Arabidopsis thaliana; identical to SEQ ID NO: 29370
  misc_feature (1)..(1304): Ceres Seq. ID no. 13487643
  misc_feature: MA Experiment ID: 108573 Result: Up-regulated in Transcription
  misc_feature: MA Experiment 108573 PARAMETER Experiment Name: At_Drought_cDNA_P Parameter: Timepoint (hr) Value: 6
  misc_feature: MA Experiment 108573 PARAMETER Experiment Name: At_Drought_cDNA_P Parameter: Tissue Value: Aerial
  misc_feature: MA Experiment 108573 PARAMETER Experiment Name: At_Drought_cDNA_P Parameter: Treatment Value: Drought vs. No Drought
  misc_feature: MA Experiment ID: 108595 Result: Down-regulated in Transcription
  misc_feature: MA Experiment 108595 PARAMETER Experiment Name: At_Ler-pi_Ovule_cDNA_P Parameter: Plant Line Value: null
  misc_feature: MA Experiment ID: 20000185 Result: Up-regulated in Transcription
  misc_feature: MA Experiment 20000185 PARAMETER Experiment Name: At_Roots__P Parameter: Age (day) Value: 7 vs. 21
  misc_feature: MA Experiment 20000185 PARAMETER Experiment Name: At_Roots__P Parameter: Organism Value: A. thaliana
  misc_feature: MA Experiment 20000185 PARAMETER Experiment Name: At_Roots__P Parameter: Tissue Value: Roots vs. Whole Plant
  misc_feature: MA Experiment ID: 20000439 Result: Up-regulated in Transcription
  misc_feature: MA Experiment 20000439 PARAMETER Experiment Name: At_Roots__P Parameter: Age (day) Value: 14 vs. 21
  misc_feature: MA Experiment 20000439 PARAMETER Experiment Name: At_Roots__P Parameter: Organism Value: A. thaliana
  misc_feature: MA Experiment 20000439 PARAMETER Experiment Name: At_Roots__P Parameter: Tissue Value: Roots vs. Whole Plant
  misc_feature: MA Experiment ID: 20000794 Result: Up-regulated in Transcription
  misc_feature: MA Experiment 20000794 PARAMETER Experiment Name: At_Petals_P Parameter: Age (day) Value: 23-25 days
  misc_feature: MA Experiment 20000794 PARAMETER Experiment Name: At_Petals_P Parameter: Plant Line Value: WS
  misc_feature: MA Experiment 20000794 PARAMETER Experiment Name: At_Petals_P Parameter: Tissue Value: Petals vs. Whole plant

SEQ ID NO: 32961 - protein, 361 aa, Arabidopsis thaliana; identical to SEQ ID NO: 29371
  peptide (1)..(361): Ceres Seq. ID no. 13487644
  misc_feature (81)..(190): Homolog of NCBI NO: 40739433 NR Description: hypothetical protein AN6239.2 [Aspergillus
  misc_feature (72)..(192): Homolog of NCBI NO: 40739421 NR Description: hypothetical protein AN6793.2 [Aspergillus
  misc_feature (76)..(351): Homolog of NCBI NO: 19173345 NR Description: hypothetical protein [Encephalitozoon cuniculi]
  misc_feature (79)..(190): Homolog of NCBI NO: 40741836 NR Description: hypothetical protein AN4948.2 [Aspergillus
  misc_feature (124)..(306): Homolog of NCBI NO: 32403674 NR Description: hypothetical protein [Neurospora crassa]
  misc_feature (80)..(285): Homolog of NCBI NO: 19114904 NR Description: hypothetical protein; sequence orphan
  misc_feature (263)..(361): Homolog of NCBI NO: 34900044 NR Description: hypothetical protein~predicted by GeneMark.hmm
  misc_feature (4)..(268): Homolog of NCBI NO: 34900046 NR Description: contains EST C72879(E2411)~similar to Arabidopsis
  misc_feature (4)..(361): Homolog of NCBI NO: 34393295 NR Description: unknown protein [Oryza sativa (japonica
  misc_feature (1)..(361): Homolog of NCBI NO: 15239639 NR Description: expressed protein [Arabidopsis thaliana]

SEQ ID NO: 32962 - protein, 303 aa, Arabidopsis thaliana; identical to SEQ ID NO: 29372
  peptide (1)..(303): Ceres Seq. ID no. 13487645
  misc_feature (23)..(132): Homolog of NCBI NO: 40739433 NR Description: hypothetical protein AN6239.2 [Aspergillus
  misc_feature (14)..(134): Homolog of NCBI NO: 40739421 NR Description: hypothetical protein AN6793.2 [Aspergillus
  misc_feature (18)..(293): Homolog of NCBI NO: 19173345 NR Description: hypothetical protein [Encephalitozoon cuniculi]
  misc_feature (21)..(132): Homolog of NCBI NO: 40741836 NR Description: hypothetical protein AN4948.2 [Aspergillus
  misc_feature (66)..(248): Homolog of NCBI NO: 32403674 NR Description: hypothetical protein [Neurospora crassa]
  misc_feature (22)..(227): Homolog of NCBI NO: 19114904 NR Description: hypothetical protein; sequence orphan
  misc_feature (205)..(303): Homolog of NCBI NO: 34900044 NR Description: hypothetical protein~predicted by GeneMark.hmm
  misc_feature (1)..(210): Homolog of NCBI NO: 34900046 NR Description: contains EST C72879(E2411)~similar to Arabidopsis
  misc_feature (1)..(303): Homolog of NCBI NO: 34393295 NR Description: unknown protein [Oryza sativa (japonica
  misc_feature (1)..(303): Homolog of NCBI NO: 15239639 NR Description: expressed protein [Arabidopsis thaliana]

SEQ ID NO: 32963 - protein, 223 aa, Arabidopsis thaliana; identical to SEQ ID NO: 29373
  peptide (1)..(223): Ceres Seq. ID no. 13487646
  misc_feature (1)..(52): Homolog of NCBI NO: 40739433 NR Description: hypothetical protein AN6239.2 [Aspergillus
  misc_feature (1)..(54): Homolog of NCBI NO: 40739421 NR Description: hypothetical protein AN6793.2 [Aspergillus
  misc_feature (1)..(213): Homolog of NCBI NO: 19173345 NR Description: hypothetical protein [Encephalitozoon cuniculi]
  misc_feature (1)..(52): Homolog of NCBI NO: 40741836 NR Description: hypothetical protein AN4948.2 [Aspergillus
  misc_feature (1)..(168): Homolog of NCBI NO: 32403674 NR Description: hypothetical protein [Neurospora crassa]
  misc_feature (1)..(147): Homolog of NCBI NO: 19114904 NR Description: hypothetical protein; sequence orphan
  misc_feature (125)..(223): Homolog of NCBI NO: 34900044 NR Description: hypothetical protein~predicted by GeneMark.hmm
  misc_feature (1)..(130): Homolog of NCBI NO: 34900046 NR Description: contains EST C72879(E2411)~similar to Arabidopsis
  misc_feature (1)..(223): Homolog of NCBI NO: 34393295 NR Description: unknown protein [Oryza sativa (japonica
  misc_feature (1)..(223): Homolog of NCBI NO: 15239639 NR Description: expressed protein [Arabidopsis thaliana]

SEQ ID NO: 32964 - DNA, 810 bp, Arabidopsis thaliana; identical to SEQ ID NO: 29374
  misc_feature (1)..(810): Ceres Seq. ID no. 13653785
  misc_feature: MA Experiment ID: 108434 Result: Up-regulated in Transcription
  misc_feature: MA Experiment 108434 PARAMETER Experiment Name: At_Root_Tips_cDNA_P Parameter: Tissue Value: Root Tips
  misc_feature: MA Experiment ID: 108462 Result: Down-regulated in Transcription
  misc_feature: MA Experiment 108462 PARAMETER Experiment Name: At_Germinating_Seeds_cDNA_P Parameter: Age (day) Value: 2 vs. 0
  misc_feature: MA Experiment 108462 PARAMETER Experiment Name: At_Germinating_Seeds_cDNA_P Parameter: Tissue Value: Germinating Seeds
  misc_feature: MA Experiment ID: 108463 Result: Down-regulated in Transcription
  misc_feature: MA Experiment 108463 PARAMETER Experiment Name: At_Germinating_Seeds_cDNA_P Parameter: Age (day) Value: 3 vs. 0
  misc_feature: MA Experiment 108463 PARAMETER Experiment Name: At_Germinating_Seeds_cDNA_P Parameter: Tissue Value: Germinating Seeds
  misc_feature: MA Experiment ID: 108464 Result: Down-regulated in Transcription
  misc_feature: MA Experiment 108464 PARAMETER Experiment Name: At_Germinating_Seeds_cDNA_P Parameter: Age (day) Value: 4 vs. 0
  misc_feature: MA Experiment 108464 PARAMETER Experiment Name: At_Germinating_Seeds_cDNA_P Parameter: Tissue Value: Germinating Seeds
  misc_feature: MA Experiment ID: 108488 Result: Down-regulated in Transcription
  misc_feature: MA Experiment ID: 108577 Result: Down-regulated in Transcription
  misc_feature: MA Experiment 108577 PARAMETER Experiment Name: At_42deg_Heat_cDNA_P Parameter: Temperature (deg C) Value: 42 vs. 22
  misc_feature: MA Experiment 108577 PARAMETER Experiment Name: At_42deg_Heat_cDNA_P Parameter: Timepoint (hr) Value: 6
  misc_feature: MA Experiment 108577 PARAMETER Experiment Name: At_42deg_Heat_cDNA_P Parameter: Tissue Value: Aerial
  misc_feature: MA Experiment ID: 108607 Result: Down-regulated in Transcription
  misc_feature: MA Experiment 108607 PARAMETER Experiment Name: At_100uM_ABA_cDNA_P Parameter: Timepoint (hr) Value: 4
  misc_feature: MA Experiment 108607 PARAMETER Experiment Name: At_100uM_ABA_cDNA_P Parameter: Tissue Value: Aerial
  misc_feature: MA Experiment 108607 PARAMETER Experiment Name: At_100uM_ABA_cDNA_P Parameter: Treatment Value: 100uM ABA vs. No Treatment
  misc_feature: MA Experiment ID: 20000069 Result: Up-regulated in Transcription
  misc_feature: MA Experiment 20000069 PARAMETER Experiment Name: At_100uM_ABA_Mutants_cDNA_P Parameter: Plant Line Value: CS23
  misc_feature: MA Experiment 20000069 PARAMETER Experiment Name: At_100uM_ABA_Mutants_cDNA_P Parameter: Timepoint (hr) Value: 6
  misc_feature: MA Experiment 20000069 PARAMETER Experiment Name: At_100uM_ABA_Mutants_cDNA_P Parameter: Tissue Value: Aerial
  misc_feature: MA Experiment 20000069 PARAMETER Experiment Name: At_100uM_ABA_Mutants_cDNA_P Parameter: Treatment Value: 100uM ABA vs. No Treatment
  misc_feature: MA Experiment ID: 20000070 Result: Up-regulated in Transcription
  misc_feature: MA Experiment 20000070 PARAMETER Experiment Name: At_100uM_ABA_Mutants_cDNA_P Parameter: Plant Line Value: CS24
  misc_feature: MA Experiment 20000070 PARAMETER Experiment Name: At_100uM_ABA_Mutants_cDNA_P Parameter: Timepoint (hr) Value: 6
  misc_feature: MA Experiment 20000070 PARAMETER Experiment Name: At_100uM_ABA_Mutants_cDNA_P Parameter: Tissue Value: Aerial
  misc_feature: MA Experiment 20000070 PARAMETER Experiment Name: At_100uM_ABA_Mutants_cDNA_P Parameter: Treatment Value: 100uM ABA vs. No Treatment
  misc_feature: MA Experiment ID: 20000071 Result: Up-regulated in Transcription
  misc_feature: MA Experiment 20000071 PARAMETER Experiment Name: At_100uM_ABA_Mutants_cDNA_P Parameter: Plant Line Value: CS8104
  misc_feature: MA Experiment 20000071 PARAMETER Experiment Name: At_100uM_ABA_Mutants_cDNA_P Parameter: Timepoint (hr) Value: 6
  misc_feature: MA Experiment 20000071 PARAMETER Experiment Name: At_100uM_ABA_Mutants_cDNA_P Parameter: Tissue Value: Aerial
  misc_feature: MA Experiment 20000071 PARAMETER Experiment Name: At_100uM_ABA_Mutants_cDNA_P Parameter: Treatment Value: 100uM ABA vs. No Treatment
  misc_feature: MA Experiment ID: 20000072 Result: Up-regulated in Transcription
  misc_feature: MA Experiment 20000072 PARAMETER Experiment Name: At_100uM_ABA_Mutants_cDNA_P Parameter: Plant Line Value: CS8105
  misc_feature: MA Experiment 20000072 PARAMETER Experiment Name: At_100uM_ABA_Mutants_cDNA_P Parameter: Timepoint (hr) Value: 6
  misc_feature: MA Experiment 20000072 PARAMETER Experiment Name: At_100uM_ABA_Mutants_cDNA_P Parameter: Tissue Value: Aerial
  misc_feature: MA Experiment 20000072 PARAMETER Experiment Name: At_100uM_ABA_Mutants_cDNA_P Parameter: Treatment Value: 100uM ABA vs. No Treatment
  misc_feature: MA Experiment ID: 20000086 Result: Up-regulated in Transcription
  misc_feature: MA Experiment 20000086 PARAMETER Experiment Name: At_100uM_ABA_Mutants_cDNA_P Parameter: Plant Line Value: CS22
  misc_feature: MA Experiment 20000086 PARAMETER Experiment Name: At_100uM_ABA_Mutants_cDNA_P Parameter: Timepoint (hr) Value: 6
  misc_feature: MA Experiment 20000086 PARAMETER Experiment Name: At_100uM_ABA_Mutants_cDNA_P Parameter: Tissue Value: Aerial
  misc_feature: MA Experiment 20000086 PARAMETER Experiment Name: At_100uM_ABA_Mutants_cDNA_P Parameter: Treatment Value: 100uM ABA vs. No Treatment
  misc_feature: MA Experiment ID: 20000087 Result: Up-regulated in Transcription
  misc_feature: MA Experiment 20000087 PARAMETER Experiment Name: At_100uM_ABA_Mutants_cDNA_P Parameter: Plant Line Value: WS
  misc_feature: MA Experiment 20000087 PARAMETER Experiment Name: At_100uM_ABA_Mutants_cDNA_P Parameter: Timepoint (hr) Value: 6
  misc_feature: MA Experiment 20000087 PARAMETER Experiment Name: At_100uM_ABA_Mutants_cDNA_P Parameter: Tissue Value: Aerial
  misc_feature: MA Experiment 20000087 PARAMETER Experiment Name: At_100uM_ABA_Mutants_cDNA_P Parameter: Treatment Value: 100uM ABA vs. No Treatment
  misc_feature: MA Experiment ID: 20000088 Result: Up-regulated in Transcription
  misc_feature: MA Experiment 20000088 PARAMETER Experiment Name: At_100uM_ABA_Mutants_cDNA_P Parameter: Plant Line Value: Landsberg
  misc_feature: MA Experiment 20000088 PARAMETER Experiment Name: At_100uM_ABA_Mutants_cDNA_P Parameter: Timepoint (hr) Value: 6
  misc_feature: MA Experiment 20000088 PARAMETER Experiment Name: At_100uM_ABA_Mutants_cDNA_P Parameter: Tissue Value: Aerial
  misc_feature: MA Experiment 20000088 PARAMETER Experiment Name: At_100uM_ABA_Mutants_cDNA_P Parameter: Treatment Value: 100uM ABA vs. No Treatment
  misc_feature: MA Experiment ID: 20000089 Result: Up-regulated in Transcription
  misc_feature: MA Experiment ID: 20000090 Result: Up-regulated in Transcription
  misc_feature: MA Experiment ID: 20000111 Result: Down-regulated in Transcription
  misc_feature: MA Experiment 20000111 PARAMETER Experiment Name: At_42deg_Heat_cDNA_P Parameter: Temperature (deg C) Value: 42 vs. 22
  misc_feature: MA Experiment 20000111 PARAMETER Experiment Name: At_42deg_Heat_cDNA_P Parameter: Timepoint (hr) Value: 6
  misc_feature: MA Experiment 20000111 PARAMETER Experiment Name: At_42deg_Heat_cDNA_P Parameter: Tissue Value: Aerial
  misc_feature: MA Experiment ID: 20000117 Result: Up-regulated in Transcription
  misc_feature: MA Experiment 20000117 PARAMETER Experiment Name: At_100uM_ABA_Mutants_cDNA_P Parameter: Plant Line Value: Columbia
  misc_feature: MA Experiment 20000117 PARAMETER Experiment Name: At_100uM_ABA_Mutants_cDNA_P Parameter: Timepoint (hr) Value: 6
  misc_feature: MA Experiment 20000117 PARAMETER Experiment Name: At_100uM_ABA_Mutants_cDNA_P Parameter: Tissue Value: Aerial
  misc_feature: MA Experiment 20000117 PARAMETER Experiment Name: At_100uM_ABA_Mutants_cDNA_P Parameter: Treatment Value: 100uM ABA vs. No Treatment
  misc_feature: MA Experiment ID: 20000213 Result: Up-regulated in Transcription
  misc_feature: MA Experiment 20000213 PARAMETER Experiment Name: At_4deg_Cold_P Parameter: Timepoint (hr) Value: 2
  misc_feature: MA Experiment ID: 20000224 Result: Down-regulated in Transcription
  misc_feature: MA Experiment ID: 20000437 Result: Up-regulated in Transcription
  misc_feature: MA Experiment 20000437 PARAMETER Experiment Name: At_Drought_P Parameter: Age (day) Value: 8
  misc_feature: MA Experiment 20000437 PARAMETER Experiment Name: At_Drought_P Parameter: Organism Value: A. thaliana
  misc_feature: MA Experiment 20000437 PARAMETER Experiment Name: At_Drought_P Parameter: Plant Line Value: WS
  misc_feature: MA Experiment 20000437 PARAMETER Experiment Name: At_Drought_P Parameter: Timepoint (hr) Value: 24
  misc_feature: MA Experiment 20000437 PARAMETER Experiment Name: At_Drought_P Parameter: Tissue Value: Whole Plant
  misc_feature: MA Experiment 20000437 PARAMETER Experiment Name: At_Drought_P Parameter: Treatment Value: Drought vs. No Drought
  misc_feature: MA Experiment ID: 20000438 Result: Down-regulated in Transcription
  misc_feature: MA Experiment 20000438 PARAMETER Experiment Name: At_Shoots__P Parameter: Age (day) Value: 14
  misc_feature: MA Experiment 20000438 PARAMETER Experiment Name: At_Shoots__P Parameter: Tissue Value: Shoots vs. Whole Plant
  misc_feature: MA Experiment ID: 20001451 Result: Up-regulated in Transcription
  misc_feature: MA Experiment 20001451 PARAMETER Experiment Name: At_Far-red-induction_P Parameter: Age (day) Value: 7
  misc_feature: MA Experiment 20001451 PARAMETER Experiment Name: At_Far-red-induction_P Parameter: Light Value: Far-red vs. White
  misc_feature: MA Experiment 20001451 PARAMETER Experiment Name: At_Far-red-induction_P Parameter: Organism Value: A. thaliana
  misc_feature: MA Experiment 20001451 PARAMETER Experiment Name: At_Far-red-induction_P Parameter: Plant Line Value: Columbia
  misc_feature: MA Experiment 20001451 PARAMETER Experiment Name: At_Far-red-induction_P Parameter: Timepoint (hr) Value: 24
  misc_feature: MA Experiment 20001451 PARAMETER Experiment Name: At_Far-red-induction_P Parameter: Tissue Value: Whole Plant
  misc_feature: MA Experiment ID: 20001557 Result: Up-regulated in Transcription
  misc_feature: MA Experiment 20001557 PARAMETER Experiment Name: At_Drought_Soil_Dry_P Parameter: Age (day) Value: 27
  misc_feature: MA Experiment 20001557 PARAMETER Experiment Name: At_Drought_Soil_Dry_P Parameter: Organism Value: A. thaliana
  misc_feature: MA Experiment 20001557 PARAMETER Experiment Name: At_Drought_Soil_Dry_P Parameter: Plant Line Value: WS
  misc_feature: MA Experiment 20001557 PARAMETER Experiment Name: At_Drought_Soil_Dry_P Parameter: Post Timepoint (hr) Value: 3
  misc_feature: MA Experiment 20001557 PARAMETER Experiment Name: At_Drought_Soil_Dry_P Parameter: Post-Treatment Value: Re-Water vs. No Drought
  misc_feature: MA Experiment 20001557 PARAMETER Experiment Name: At_Drought_Soil_Dry_P Parameter: Timepoint (day) Value: 13
  misc_feature: MA Experiment 20001557 PARAMETER Experiment Name: At_Drought_Soil_Dry_P Parameter: Treatment Value: Drought vs. No Drought

SEQ ID NO: 32965 - protein, 175 aa, Arabidopsis thaliana; identical to SEQ ID NO: 27778
  peptide (1)..(175): Ceres Seq. ID no. 13653786
  misc_feature (10)..(81): Pfam Name: RNA recognition motif. (a.k.a. RRM, RBD, or RNP domain) Pfam Description: RNA recognition motif. (a.k.a. RRM, RBD, or RNP
  misc_feature (1)..(175): Homolog of NCBI NO: 10799202 NR Description: glycine-rich RNA-binding protein [Sorghum bicolor]
  misc_feature (1)..(175): Homolog of NCBI NO: 544423 NR Description: Glycine-rich RNA-binding protein 2
  misc_feature (5)..(175): Homolog of NCBI NO: 544416 NR Description: Glycine-rich RNA-binding protein 10
  misc_feature (1)..(175): Homolog of NCBI NO: 34851124 NR Description: putative glycine-rich RNA-binding protein [Prunus
  misc_feature (5)..(175): Homolog of NCBI NO: 15235002 NR Description: glycine-rich RNA-binding protein 8 (GRP8) (CCR1)
  misc_feature (1)..(175): Homolog of NCBI NO: 30681492 NR Description: glycine-rich RNA-binding protein (AtGRP7)
  misc_feature (1)..(175): Homolog of NCBI NO: 1346180 NR Description: Glycine-rich RNA-binding protein GRP1A
  misc_feature (1)..(175): Homolog of NCBI NO: 1346181 NR Description: Glycine-rich RNA-binding protein GRP2A
  misc_feature (1)..(175): Homolog of NCBI NO: 15226605 NR Description: glycine-rich RNA-binding protein (AtGRP7)
  misc_feature (1)..(175): Homolog of NCBI NO: 21553354 NR Description: glycine-rich RNA binding protein 7 [Arabidopsis

SEQ ID NO: 32966 - protein, 114 aa, Arabidopsis thaliana; identical to SEQ ID NO: 27779
  peptide (1)..(114): Ceres Seq. ID no. 13653787
  misc_feature (27)..(112): Pfam Name: Herpesvirus large structural phosphoprotein UL32 Pfam Description: Herpesvirus large structural phosphoprotein UL32
  misc_feature (1)..(114): Homolog of NCBI NO: 10799202 NR Description: glycine-rich RNA-binding protein [Sorghum bicolor]
  misc_feature (1)..(114): Homolog of NCBI NO: 544423 NR Description: Glycine-rich RNA-binding protein 2
  misc_feature (1)..(114): Homolog of NCBI NO: 544416 NR Description: Glycine-rich RNA-binding protein 10
  misc_feature (1)..(114): Homolog of NCBI NO: 34851124 NR Description: putative glycine-rich RNA-binding protein [Prunus
  misc_feature (1)..(114): Homolog of NCBI NO: 15235002 NR Description: glycine-rich RNA-binding protein 8 (GRP8) (CCR1)
  misc_feature (1)..(114): Homolog of NCBI NO: 30681492 NR Description: glycine-rich RNA-binding protein (AtGRP7)
  misc_feature (1)..(114): Homolog of NCBI NO: 1346180 NR Description: Glycine-rich RNA-binding protein GRP1A
  misc_feature (1)..(114): Homolog of NCBI NO: 1346181 NR Description: Glycine-rich RNA-binding protein GRP2A
  misc_feature (1)..(114): Homolog of NCBI NO: 15226605 NR Description: glycine-rich RNA-binding protein (AtGRP7)
  misc_feature (1)..(114): Homolog of NCBI NO: 21553354 NR Description: glycine-rich RNA binding protein 7 [Arabidopsis

SEQ ID NO: 32967 - protein, 107 aa, Arabidopsis thaliana; identical to SEQ ID NO: 27780
  peptide (1)..(107): Ceres Seq. ID no. 13653788
  misc_feature (20)..(105): Pfam Name: Herpesvirus large structural phosphoprotein UL32 Pfam Description: Herpesvirus large structural phosphoprotein UL32
  misc_feature (1)..(107): Homolog of NCBI NO: 10799202 NR Description: glycine-rich RNA-binding protein [Sorghum bicolor]
  misc_feature (1)..(107): Homolog of NCBI NO: 544423 NR Description: Glycine-rich RNA-binding protein 2
  misc_feature (1)..(107): Homolog of NCBI NO: 544416 NR Description: Glycine-rich RNA-binding protein 10
  misc_feature (1)..(107): Homolog of NCBI NO: 34851124 NR Description: putative glycine-rich RNA-binding protein [Prunus
  misc_feature (1)..(107): Homolog of NCBI NO: 15235002 NR Description: glycine-rich RNA-binding protein 8 (GRP8) (CCR1)
  misc_feature (1)..(107): Homolog of NCBI NO: 30681492 NR Description: glycine-rich RNA-binding protein (AtGRP7)
  misc_feature (1)..(107): Homolog of NCBI NO: 1346180 NR Description: Glycine-rich RNA-binding protein GRP1A
  misc_feature (1)..(107): Homolog of NCBI NO: 1346181 NR Description: Glycine-rich RNA-binding protein GRP2A
  misc_feature (1)..(107): Homolog of NCBI NO: 15226605 NR Description: glycine-rich RNA-binding protein (AtGRP7)
  misc_feature (1)..(107): Homolog of NCBI NO: 21553354 NR Description: glycine-rich RNA binding protein 7 [Arabidopsis

SEQ ID NO: 32968 - DNA, 1231 bp, Arabidopsis thaliana; identical to SEQ ID NO: 29378
  misc_feature (1)..(1231): Ceres Seq. ID no. 12391651
  misc_feature: MA Experiment ID: 108461 Result: Down-regulated in Transcription
  misc_feature: MA Experiment 108461 PARAMETER Experiment Name: At_Germinating_Seeds_cDNA_P Parameter: Age (day) Value: 1 vs. 0
  misc_feature: MA Experiment 108461 PARAMETER Experiment Name: At_Germinating_Seeds_cDNA_P Parameter: Tissue Value: Germinating Seeds
  misc_feature: MA Experiment ID: 108462 Result: Down-regulated in Transcription
  misc_feature: MA Experiment 108462 PARAMETER Experiment Name: At_Germinating_Seeds_cDNA_P Parameter: Age (day) Value: 2 vs. 0
  misc_feature: MA Experiment 108462 PARAMETER Experiment Name: At_Germinating_Seeds_cDNA_P Parameter: Tissue Value: Germinating Seeds
  misc_feature: MA Experiment ID: 108464 Result: Down-regulated in Transcription
  misc_feature: MA Experiment 108464 PARAMETER Experiment Name: At_Germinating_Seeds_cDNA_P Parameter: Age (day) Value: 4 vs. 0
  misc_feature: MA Experiment 108464 PARAMETER Experiment Name: At_Germinating_Seeds_cDNA_P Parameter: Tissue Value: Germinating Seeds
  misc_feature: MA Experiment ID: 108585 Result: Up-regulated in Transcription
  misc_feature: MA Experiment 108585 PARAMETER Experiment Name: At_5mM_NaNP_cDNA_P Parameter: Timepoint (hr) Value: 6
  misc_feature: MA Experiment 108585 PARAMETER Experiment Name: At_5mM_NaNP_cDNA_P Parameter: Tissue Value: Aerial
  misc_feature: MA Experiment 108585 PARAMETER Experiment Name: At_5mM_NaNP_cDNA_P Parameter: Treatment Value: null
  misc_feature: MA Experiment ID: 20000111 Result: Up-regulated in Transcription
  misc_feature: MA Experiment 20000111 PARAMETER Experiment Name: At_42deg_Heat_cDNA_P Parameter: Temperature (deg C) Value: 42 vs. 22
  misc_feature: MA Experiment 20000111 PARAMETER Experiment Name: At_42deg_Heat_cDNA_P Parameter: Timepoint (hr) Value: 6
  misc_feature: MA Experiment 20000111 PARAMETER Experiment Name: At_42deg_Heat_cDNA_P Parameter: Tissue Value: Aerial
  misc_feature: MA Experiment ID: 20000112 Result: Up-regulated in Transcription
  misc_feature: MA Experiment 20000112 PARAMETER Experiment Name: At_42deg_Heat_cDNA_P Parameter: Temperature (deg C) Value: 42 vs. 22
  misc_feature: MA Experiment 20000112 PARAMETER Experiment Name: At_42deg_Heat_cDNA_P Parameter: Timepoint (hr) Value: 2
  misc_feature: MA Experiment 20000112 PARAMETER Experiment Name: At_42deg_Heat_cDNA_P Parameter: Tissue Value: Aerial
  misc_feature: MA Experiment ID: 20000144 Result: Up-regulated in Transcription
  misc_feature: MA Experiment 20000144 PARAMETER Experiment Name: At_42deg_Heat_cDNA_P Parameter: Temperature (deg C) Value: 42 vs. 22
  misc_feature: MA Experiment 20000144 PARAMETER Experiment Name: At_42deg_Heat_cDNA_P Parameter: Timepoint (hr) Value: 1
  misc_feature: MA Experiment 20000144 PARAMETER Experiment Name: At_42deg_Heat_cDNA_P Parameter: Tissue Value: Aerial
  misc_feature: MA Experiment ID: 20000173 Result: Up-regulated in Transcription
  misc_feature: MA Experiment 20000173 PARAMETER Experiment Name: At_42deg_Heat_P Parameter: Age (day) Value: 14
  misc_feature: MA Experiment 20000173 PARAMETER Experiment Name: At_42deg_Heat_P Parameter: Organism Value: A. thaliana
  misc_feature: MA Experiment 20000173 PARAMETER Experiment Name: At_42deg_Heat_P Parameter: Plant Line Value: WS
  misc_feature: MA Experiment 20000173 PARAMETER Experiment Name: At_42deg_Heat_P Parameter: Temperature (deg C) Value: 42 vs. 22
  misc_feature: MA Experiment 20000173 PARAMETER Experiment Name: At_42deg_Heat_P Parameter: Timepoint (hr) Value: 6
  misc_feature: MA Experiment 20000173 PARAMETER Experiment Name: At_42deg_Heat_P Parameter: Tissue Value: Aerial
  misc_feature: MA Experiment ID: 20000437 Result: Up-regulated in Transcription
  misc_feature: MA Experiment 20000437 PARAMETER Experiment Name: At_Drought_P Parameter: Age (day) Value: 8
  misc_feature: MA Experiment 20000437 PARAMETER Experiment Name: At_Drought_P Parameter: Organism Value: A. thaliana
  misc_feature: MA Experiment 20000437 PARAMETER Experiment Name: At_Drought_P Parameter: Plant Line Value: WS
  misc_feature: MA Experiment 20000437 PARAMETER Experiment Name: At_Drought_P Parameter: Timepoint (hr) Value: 24
  misc_feature: MA Experiment 20000437 PARAMETER Experiment Name: At_Drought_P Parameter: Tissue Value: Whole Plant
  misc_feature: MA Experiment 20000437 PARAMETER Experiment Name: At_Drought_P Parameter: Treatment Value: Drought vs. No Drought
  misc_feature: MA Experiment ID: 20001911 Result: Up-regulated in Transcription
  misc_feature: MA Experiment 20001911 PARAMETER Experiment Name: At_Drought_Reproduction_P Parameter: Age (day) Value: 40
  misc_feature: MA Experiment 20001911 PARAMETER Experiment Name: At_Drought_Reproduction_P Parameter: Organism Value: A. thaliana
  misc_feature: MA Experiment 20001911 PARAMETER Experiment Name: At_Drought_Reproduction_P Parameter: Plant Line Value: WS
  misc_feature: MA Experiment 20001911 PARAMETER Experiment Name: At_Drought_Reproduction_P Parameter: Timepoint (day) Value: 10
  misc_feature: MA Experiment 20001911 PARAMETER Experiment Name: At_Drought_Reproduction_P Parameter: Tissue Value: Flowers
  misc_feature: MA Experiment 20001911 PARAMETER Experiment Name: At_Drought_Reproduction_P Parameter: Treatment Value: Drought vs. No Drought

SEQ ID NO: 32969 - protein, 370 aa, Arabidopsis thaliana; identical to SEQ ID NO: 29379
  peptide (1)..(370): Ceres Seq. ID no. 12391652
  misc_feature (102)..(302): Homolog of NCBI NO: 39850142 NR Description: Unknown (protein for MGC:76157) [Silurana
  misc_feature (45)..(316): Homolog of NCBI NO: 39584750 NR Description: Hypothetical protein CBG13204 [Caenorhabditis
  misc_feature (68)..(318): Homolog of NCBI NO: 24583433 NR Description: CG5198-PA [Drosophila melanogaster]
  misc_feature (68)..(318): Homolog of NCBI NO: 17861590 NR Description: GH13760p [Drosophila melanogaster]
  misc_feature (94)..(290): Homolog of NCBI NO: 17505208 NR Description: CD2 antigen (cytoplasmic tail) binding protein 2;
  misc_feature (44)..(290): Homolog of NCBI NO: 34859280 NR Description: similar to CD2 antigen (cytoplasmic tail) binding
  misc_feature (44)..(290): Homolog of NCBI NO: 5174409 NR Description: CD2 antigen (cytoplasmic tail) binding protein 2
  misc_feature (26)..(270): Homolog of NCBI NO: 3355658 NR Description: SMC2orf [Podocoryne carnea]
  misc_feature (20)..(370): Homolog of NCBI NO: 9955526 NR Description: putative protein [Arabidopsis thaliana]
  misc_feature (20)..(370): Homolog of NCBI NO: 18415962 NR Description: putative protein

SEQ ID NO: 32970 - protein, 351 aa, Arabidopsis thaliana; identical to SEQ ID NO: 29380
  peptide (1)..(351): Ceres Seq. ID no. 12391653
  misc_feature (83)..(283): Homolog of NCBI NO: 39850142 NR Description: Unknown (protein for MGC:76157) [Silurana
  misc_feature (26)..(297): Homolog of NCBI NO: 39584750 NR Description: Hypothetical protein CBG13204 [Caenorhabditis
  misc_feature (49)..(299): Homolog of NCBI NO: 24583433 NR Description: CG5198-PA [Drosophila melanogaster]
  misc_feature (49)..(299): Homolog of NCBI NO: 17861590 NR Description: GH13760p [Drosophila melanogaster]
  misc_feature (75)..(271): Homolog of NCBI NO: 17505208 NR Description: CD2 antigen (cytoplasmic tail) binding protein 2;
  misc_feature (25)..(271): Homolog of NCBI NO: 34859280 NR Description: similar to CD2 antigen (cytoplasmic tail) binding
  misc_feature (25)..(271): Homolog of NCBI NO: 5174409 NR Description: CD2 antigen (cytoplasmic tail) binding protein 2
  misc_feature (7)..(251): Homolog of NCBI NO: 3355658 NR Description: SMC2orf [Podocoryne carnea]
  misc_feature (1)..(351): Homolog of NCBI NO: 9955526 NR Description: putative protein [Arabidopsis thaliana]
  misc_feature (1)..(351): Homolog of NCBI NO: 18415962 NR Description: putative protein

SEQ ID NO: 32971 - protein, 210 aa, Arabidopsis thaliana; identical to SEQ ID NO: 29381
  peptide (1)..(210): Ceres Seq. ID no. 12391654
  misc_feature (1)..(142): Homolog of NCBI NO: 39850142 NR Description: Unknown (protein for MGC:76157) [Silurana
  misc_feature (1)..(156): Homolog of NCBI NO: 39584750 NR Description: Hypothetical protein CBG13204 [Caenorhabditis
  misc_feature (1)..(158): Homolog of NCBI NO: 24583433 NR Description: CG5198-PA [Drosophila melanogaster]
  misc_feature (1)..(158): Homolog of NCBI NO: 17861590 NR Description: GH13760p [Drosophila melanogaster]
  misc_feature (1)..(130): Homolog of NCBI NO: 17505208 NR Description: CD2 antigen (cytoplasmic tail) binding protein 2;
  misc_feature (1)..(130): Homolog of NCBI NO: 34859280 NR Description: similar to CD2 antigen (cytoplasmic tail) binding
  misc_feature (1)..(130): Homolog of NCBI NO: 5174409 NR Description: CD2 antigen (cytoplasmic tail) binding protein 2
  misc_feature (1)..(110): Homolog of NCBI NO: 3355658 NR Description: SMC2orf [Podocoryne carnea]
  misc_feature (1)..(210): Homolog of NCBI NO: 9955526 NR Description: putative protein [Arabidopsis thaliana]
  misc_feature (1)..(210): Homolog of NCBI NO: 18415962 NR Description: putative protein

SEQ ID NO: 32972 - DNA, 1350 bp, Arabidopsis thaliana; identical to SEQ ID NO: 29382
  misc_feature (1)..(1350): Ceres Seq. ID no. 13490555
  misc_feature: MA Experiment ID: 108489 Result: Up-regulated in Transcription
  misc_feature: MA Experiment ID: 20000234 Result: Up-regulated in Transcription
  misc_feature: MA Experiment 20000234 PARAMETER Experiment Name: At_Siliques_P Parameter: Age (day) Value: 21
  misc_feature: MA Experiment 20000234 PARAMETER Experiment Name: At_Siliques_P Parameter: Organism Value: A. thaliana
  misc_feature: MA Experiment 20000234 PARAMETER Experiment Name: At_Siliques_P Parameter: Plant Line Value: WS
  misc_feature: MA Experiment 20000234 PARAMETER Experiment Name: At_Siliques_P Parameter: Tissue Value: Less Than 5mm Siliques vs. Whole Plant
  misc_feature: MA Experiment ID: 20000264 Result: Up-regulated in Transcription
  misc_feature: MA Experiment 20000264 PARAMETER Experiment Name: At_Open_Flower_P Parameter: Age (day) Value: 21
  misc_feature: MA Experiment 20000264 PARAMETER Experiment Name: At_Open_Flower_P Parameter: Plant Line Value: WS
  misc_feature: MA Experiment 20000264 PARAMETER Experiment Name: At_Open_Flower_P Parameter: Tissue Value: Open Flower vs. Whole Plant
  misc_feature: MA Experiment ID: 20000265 Result: Up-regulated in Transcription
  misc_feature: MA Experiment 20000265 PARAMETER Experiment Name: At_Open_Flower_P Parameter: Age (day) Value: 21
  misc_feature: MA Experiment 20000265 PARAMETER Experiment Name: At_Open_Flower_P Parameter: Plant Line Value: WS
  misc_feature: MA Experiment 20000265 PARAMETER Experiment Name: At_Open_Flower_P Parameter: Tissue Value: Closed Flower vs. Whole Plant
  misc_feature: MA Experiment ID: 20000286 Result: Up-regulated in Transcription
  misc_feature: MA Experiment 20000286 PARAMETER Experiment Name: At_Open_Flower_P Parameter: Age (day) Value: 21
  misc_feature: MA Experiment 20000286 PARAMETER Experiment Name: At_Open_Flower_P Parameter: Plant Line Value: WS
  misc_feature: MA Experiment 20000286 PARAMETER Experiment Name: At_Open_Flower_P Parameter: Tissue Value: Half Open vs. Whole Plant
  misc_feature: MA Experiment ID: 20000794 Result: Up-regulated in Transcription
  misc_feature: MA Experiment 20000794 PARAMETER Experiment Name: At_Petals_P Parameter: Age (day) Value: 23-25 days
  misc_feature: MA Experiment 20000794 PARAMETER Experiment Name: At_Petals_P Parameter: Plant Line Value: WS
  misc_feature: MA Experiment 20000794 PARAMETER Experiment Name: At_Petals_P Parameter: Tissue Value: Petals vs. Whole plant
  misc_feature: MA Experiment ID: 20001757 Result: Down-regulated in Transcription
  misc_feature: MA Experiment 20001757 PARAMETER Experiment Name: At_50mM_NH4NO3_L-to-H_P Parameter: Timepoint (hr) Value: 6
  misc_feature: MA Experiment 20001757 PARAMETER Experiment Name: At_50mM_NH4NO3_L-to-H_P Parameter: Tissue Value: Leaf
  misc_feature: MA Experiment 20001757 PARAMETER Experiment Name: At_50mM_NH4NO3_L-to-H_P Parameter: Treatment Value: 50mM NH4NO3 vs 100mM Mannitol
  misc_feature: MA Experiment ID: 20001910 Result: Up-regulated in Transcription
  misc_feature: MA Experiment 20001910 PARAMETER Experiment Name: At_Drought_Reproduction_P Parameter: Age (day) Value: 37
  misc_feature: MA Experiment 20001910 PARAMETER Experiment Name: At_Drought_Reproduction_P Parameter: Organism Value: A. thaliana
  misc_feature: MA Experiment 20001910 PARAMETER Experiment Name: At_Drought_Reproduction_P Parameter: Plant Line Value: WS
  misc_feature: MA Experiment 20001910 PARAMETER Experiment Name: At_Drought_Reproduction_P Parameter: Timepoint (day) Value: 7
  misc_feature: MA Experiment 20001910 PARAMETER Experiment Name: At_Drought_Reproduction_P Parameter: Tissue Value: Flowers
  misc_feature: MA Experiment 20001910 PARAMETER Experiment Name: At_Drought_Reproduction_P Parameter: Treatment Value: Drought vs. No Drought

SEQ ID NO: 32973 - protein, 344 aa, Arabidopsis thaliana; identical to SEQ ID NO: 29383
  peptide (1)..(344): Ceres Seq. ID no. 13490556
  misc_feature (45)..(333): Pfam Name: Pectinesterase Pfam Description: Pectinesterase
  misc_feature (43)..(336): Homolog of NCBI NO: 15238111 NR Description: pectinesterase family [Arabidopsis thaliana]
  misc_feature (31)..(336): Homolog of NCBI NO: 15239623 NR Description: pectinesterase family [Arabidopsis thaliana]
  misc_feature (41)..(336): Homolog of NCBI NO: 15240544 NR Description: pectinesterase family [Arabidopsis thaliana]
  misc_feature (1)..(336): Homolog of NCBI NO: 15226598 NR Description: pectinesterase family [Arabidopsis thaliana]
  misc_feature (36)..(336): Homolog of NCBI NO: 27754550 NR Description: putative pectinesterase family protein
  misc_feature (36)..(336): Homolog of NCBI NO: 15228023 NR Description: pectinesterase family [Arabidopsis thaliana]
  misc_feature (45)..(336): Homolog of NCBI NO: 34909402 NR Description: putative pectin methylesterase
  misc_feature (53)..(336): Homolog of NCBI NO: 15241163 NR Description: pectinesterase family [Arabidopsis thaliana]
  misc_feature (4)..(339): Homolog of NCBI NO: 39653369 NR Description: putative pectinesterase [Oryza sativa (indica
  misc_feature (1)..(344): Homolog of NCBI NO: 15228955 NR Description: pectinesterase family [Arabidopsis thaliana]

SEQ ID NO: 32974 - protein, 338 aa, Arabidopsis thaliana; identical to SEQ ID NO: 29384
  peptide (1)..(338): Ceres Seq. ID no. 13490557
  misc_feature (39)..(327): Pfam Name: Pectinesterase Pfam Description: Pectinesterase
  misc_feature (37)..(330): Homolog of NCBI NO: 15238111 NR Description: pectinesterase family [Arabidopsis thaliana]
  misc_feature (25)..(330): Homolog of NCBI NO: 15239623 NR Description: pectinesterase family [Arabidopsis thaliana]
  misc_feature (35)..(330): Homolog of NCBI NO: 15240544 NR Description: pectinesterase family [Arabidopsis thaliana]
  misc_feature (1)..(330): Homolog of NCBI NO: 15226598 NR Description: pectinesterase family [Arabidopsis thaliana]
  misc_feature (30)..(330): Homolog of NCBI NO: 27754550 NR Description: putative pectinesterase family protein
  misc_feature (30)..(330): Homolog of NCBI NO: 15228023 NR Description: pectinesterase family [Arabidopsis thaliana]
  misc_feature (39)..(330): Homolog of NCBI NO: 34909402 NR Description: putative pectin methylesterase
  misc_feature (47)..(330): Homolog of NCBI NO: 15241163 NR Description: pectinesterase family [Arabidopsis thaliana]
  misc_feature (1)..(333): Homolog of NCBI NO: 39653369 NR Description: putative pectinesterase [Oryza sativa (indica
  misc_feature (1)..(338): Homolog of NCBI NO: 15228955 NR Description: pectinesterase family [Arabidopsis thaliana]

SEQ ID NO: 32975 - protein, 329 aa, Arabidopsis thaliana; identical to SEQ ID NO: 29385
  peptide (1)..(329): Ceres Seq. ID no. 13490558
  misc_feature (30)..(318): Pfam Name: Pectinesterase Pfam Description: Pectinesterase
  misc_feature (28)..(321): Homolog of NCBI NO: 15238111 NR Description: pectinesterase family [Arabidopsis thaliana]
  misc_feature (16)..(321): Homolog of NCBI NO: 15239623 NR Description: pectinesterase family [Arabidopsis thaliana]
  misc_feature (26)..(321): Homolog of NCBI NO: 15240544 NR Description: pectinesterase family [Arabidopsis thaliana]
  misc_feature (1)..(321): Homolog of NCBI NO: 15226598 NR Description: pectinesterase family [Arabidopsis thaliana]
  misc_feature (21)..(321): Homolog of NCBI NO: 27754550 NR Description: putative pectinesterase family protein
  misc_feature (21)..(321): Homolog of NCBI NO: 15228023 NR Description: pectinesterase family [Arabidopsis thaliana]
  misc_feature (30)..(321): Homolog of NCBI NO: 34909402 NR Description: putative pectin methylesterase
  misc_feature (38)..(321): Homolog of NCBI NO: 15241163 NR Description: pectinesterase family [Arabidopsis thaliana]
  misc_feature (1)..(324): Homolog of NCBI NO: 39653369 NR Description: putative pectinesterase [Oryza sativa (indica
  misc_feature (1)..(329): Homolog of NCBI NO: 15228955 NR Description: pectinesterase family [Arabidopsis thaliana]

SEQ ID NO: 32976 - DNA, 1135 bp, Arabidopsis thaliana; identical to SEQ ID NO: 29386
  misc_feature (1)..(1135): Ceres Seq. ID no. 12422074
  misc_feature: MA Experiment ID: 108462 Result: Down-regulated in Transcription
  misc_feature: MA Experiment 108462 PARAMETER Experiment Name: At_Germinating_Seeds_cDNA_P Parameter: Age (day) Value: 2 vs. 0
  misc_feature: MA Experiment 108462 PARAMETER Experiment Name: At_Germinating_Seeds_cDNA_P Parameter: Tissue Value: Germinating Seeds
  misc_feature: MA Experiment ID: 108463 Result: Down-regulated in Transcription
  misc_feature: MA Experiment 108463 PARAMETER Experiment Name: At_Germinating_Seeds_cDNA_P Parameter: Age (day) Value: 3 vs. 0
  misc_feature: MA Experiment 108463 PARAMETER Experiment Name: At_Germinating_Seeds_cDNA_P Parameter: Tissue Value: Germinating Seeds
  misc_feature: MA Experiment ID: 108464 Result: Down-regulated in Transcription
  misc_feature: MA Experiment 108464 PARAMETER Experiment Name: At_Germinating_Seeds_cDNA_P Parameter: Age (day) Value: 4 vs. 0
  misc_feature: MA Experiment 108464 PARAMETER Experiment Name: At_Germinating_Seeds_cDNA_P Parameter: Tissue Value: Germinating Seeds
  misc_feature: MA Experiment ID: 108488 Result: Down-regulated in Transcription
  misc_feature: MA Experiment ID: 108501 Result: Up-regulated in Transcription
  misc_feature: MA Experiment 108501 PARAMETER Experiment Name: At_ap2_floral_buds_cDNA_P Parameter: Plant Line Value: ap2 (Ler.)
  misc_feature: MA Experiment 108501 PARAMETER Experiment Name: At_ap2_floral_buds_cDNA_P Parameter: Tissue Value: Closed Flower
  misc_feature: MA Experiment ID: 108561 Result: Down-regulated in Transcription
  misc_feature: MA Experiment 108561 PARAMETER Experiment Name: At_100uM_ABA_cDNA_P Parameter: Timepoint (hr) Value: 6
  misc_feature: MA Experiment 108561 PARAMETER Experiment Name: At_100uM_ABA_cDNA_P Parameter: Tissue Value: Aerial
  misc_feature: MA Experiment 108561 PARAMETER Experiment Name: At_100uM_ABA_cDNA_P Parameter: Treatment Value: 100uM ABA vs. No Treatment
  misc_feature: MA Experiment ID: 108569 Result: Down-regulated in Transcription
  misc_feature: MA Experiment 108569 PARAMETER Experiment Name: At_0.001%_MeJA__cDNA_P Parameter: Timepoint (hr) Value: 6
  misc_feature: MA Experiment 108569 PARAMETER Experiment Name: At_0.001%_MeJA__cDNA_P Parameter: Tissue Value: Aerial
  misc_feature: MA Experiment 108569 PARAMETER Experiment Name: At_0.001%_MeJA__cDNA_P Parameter: Treatment Value: 0.001% MeJA vs. No Treatment
  misc_feature: MA Experiment ID: 108574 Result: Up-regulated in Transcription
  misc_feature: MA Experiment 108574 PARAMETER Experiment Name: At_Wounding__cDNA_P Parameter: Timepoint (hr) Value: 1
  misc_feature: MA Experiment 108574 PARAMETER Experiment Name: At_Wounding__cDNA_P Parameter: Tissue Value: Aerial
  misc_feature: MA Experiment 108574 PARAMETER Experiment Name: At_Wounding__cDNA_P Parameter: Treatment Value: Wounding vs. No Wounding
  misc_feature: MA Experiment ID: 108576 Result: Up-regulated in Transcription
  misc_feature: MA Experiment 108576 PARAMETER Experiment Name: At_42deg_Heat_cDNA_P Parameter: Temperature (deg C) Value: 42 vs. 22
  misc_feature: MA Experiment 108576 PARAMETER Experiment Name: At_42deg_Heat_cDNA_P Parameter: Timepoint (hr) Value: 1
  misc_feature: MA Experiment 108576 PARAMETER Experiment Name: At_42deg_Heat_cDNA_P Parameter: Tissue Value: Aerial
  misc_feature: MA Experiment ID: 108577 Result: Down-regulated in Transcription
  misc_feature: MA Experiment 108577 PARAMETER Experiment Name: At_42deg_Heat_cDNA_P Parameter: Temperature (deg C) Value: 42 vs. 22
  misc_feature: MA Experiment 108577 PARAMETER Experiment Name: At_42deg_Heat_cDNA_P Parameter: Timepoint (hr) Value: 6
  misc_feature: MA Experiment 108577 PARAMETER Experiment Name: At_42deg_Heat_cDNA_P Parameter: Tissue Value: Aerial
  misc_feature: MA Experiment ID: 108605 Result: Down-regulated in Transcription
  misc_feature: MA Experiment 108605 PARAMETER Experiment Name: At_100uM_ABA_cDNA_P Parameter: Timepoint (hr) Value: 6
  misc_feature: MA Experiment 108605 PARAMETER Experiment Name: At_100uM_ABA_cDNA_P Parameter: Tissue Value: Aerial
  misc_feature: MA Experiment 108605 PARAMETER Experiment Name: At_100uM_ABA_cDNA_P Parameter: Treatment Value: 100uM ABA vs. No Treatment
  misc_feature: MA Experiment ID: 108607 Result: Down-regulated in Transcription
  misc_feature: MA Experiment 108607 PARAMETER Experiment Name: At_100uM_ABA_cDNA_P Parameter: Timepoint (hr) Value: 4
  misc_feature: MA Experiment 108607 PARAMETER Experiment Name: At_100uM_ABA_cDNA_P Parameter: Tissue Value: Aerial
  misc_feature: MA Experiment 108607 PARAMETER Experiment Name: At_100uM_ABA_cDNA_P Parameter: Treatment Value: 100uM ABA vs. No Treatment
  misc_feature: MA Experiment ID: 108668 Result: Down-regulated in Transcription
  misc_feature: MA Experiment 108668 PARAMETER Experiment Name: At_2mM_SA_cDNA_P Parameter: Plant Line Value: WS
  misc_feature: MA Experiment 108668 PARAMETER Experiment Name: At_2mM_SA_cDNA_P Parameter: Timepoint (hr) Value: 6
  misc_feature: MA Experiment 108668 PARAMETER Experiment Name: At_2mM_SA_cDNA_P Parameter: Treatment Value: 2mM SA vs. No Treatment
  misc_feature: MA Experiment ID: 20000113 Result: Down-regulated in Transcription
  misc_feature: MA Experiment 20000113 PARAMETER Experiment Name: At_42deg_Heat_cDNA_P Parameter: Temperature (deg C) Value: 42 vs. 22
  misc_feature: MA Experiment 20000113 PARAMETER Experiment Name: At_42deg_Heat_cDNA_P Parameter: Timepoint (hr) Value: 8
  misc_feature: MA Experiment 20000113 PARAMETER Experiment Name: At_42deg_Heat_cDNA_P Parameter: Tissue Value: Aerial
  misc_feature: MA Experiment ID: 20000182 Result: Down-regulated in Transcription
  misc_feature: MA Experiment 20000182 PARAMETER Experiment Name: At_2mM_SA_P Parameter: Age (day) Value: 14
  misc_feature: MA Experiment 20000182 PARAMETER Experiment Name: At_2mM_SA_P Parameter: Organism Value: A. thaliana
  misc_feature: MA Experiment 20000182 PARAMETER Experiment Name: At_2mM_SA_P Parameter: Plant Line Value: WS
  misc_feature: MA Experiment 20000182 PARAMETER Experiment Name: At_2mM_SA_P Parameter: Timepoint (hr) Value: 6
  misc_feature: MA Experiment 20000182 PARAMETER Experiment Name: At_2mM_SA_P Parameter: Tissue Value: Aerial
  misc_feature: MA Experiment 20000182 PARAMETER Experiment Name: At_2mM_SA_P Parameter: Treatment Value: 2mM SA vs. No Treatment
  misc_feature: MA Experiment ID: 20000441 Result: Down-regulated in Transcription
  misc_feature: MA Experiment 20000441 PARAMETER Experiment Name: At_1uM_BR-BRZ__P Parameter: Tissue Value: Shoot Apices
  misc_feature: MA Experiment 20000441 PARAMETER Experiment Name: At_1uM_BR-BRZ__P Parameter: Treatment Value: 1uM BR vs. No Treatment
  misc_feature: MA Experiment ID: 20000443 Result: Down-regulated in Transcription
  misc_feature: MA Experiment 20000443 PARAMETER Experiment Name: At_1uM_BR-BRZ__P Parameter: Tissue Value: Shoot Apices
  misc_feature: MA Experiment 20000443 PARAMETER Experiment Name: At_1uM_BR-BRZ__P Parameter: Treatment Value: 1uM BRZ vs. No Treatment
  misc_feature: MA Experiment ID: 20000527 Result: Down-regulated in Transcription
  misc_feature: MA Experiment 20000527 PARAMETER Experiment Name: At_10percent_PEG_P Parameter: Age (day) Value: 20
  misc_feature: MA Experiment 20000527 PARAMETER Experiment Name: At_10percent_PEG_P Parameter: Organism Value: A. thaliana
  misc_feature: MA Experiment 20000527 PARAMETER Experiment Name: At_10percent_PEG_P Parameter: Plant Line Value: WS
  misc_feature: MA Experiment 20000527 PARAMETER Experiment Name: At_10percent_PEG_P Parameter: Timepoint (day) Value: 20
  misc_feature: MA Experiment 20000527 PARAMETER Experiment Name: At_10percent_PEG_P Parameter: Tissue Value: Whole Plant
  misc_feature: MA Experiment 20000527 PARAMETER Experiment Name: At_10percent_PEG_P Parameter: Treatment Value: 10percent PEG vs. No Treatment
  misc_feature: MA Experiment ID: 20000573 Result: Down-regulated in Transcription
  misc_feature: MA Experiment 20000573 PARAMETER Experiment Name: At_100uM_ABA_Mutants__P Parameter: Organism Value: A. thaliana
  misc_feature: MA Experiment 20000573 PARAMETER Experiment Name: At_100uM_ABA_Mutants__P Parameter: Plant Line Value: CS22 vs. Ler wt
  misc_feature: MA Experiment 20000573 PARAMETER Experiment Name: At_100uM_ABA_Mutants__P Parameter: Timepoint (hr) Value: N/A
  misc_feature: MA Experiment 20000573 PARAMETER Experiment Name: At_100uM_ABA_Mutants__P Parameter: Tissue Value: Whole Plant
  misc_feature: MA Experiment 20000573 PARAMETER Experiment Name: At_100uM_ABA_Mutants__P Parameter: Treatment Value: None
  misc_feature: MA Experiment ID: 20000574 Result: Down-regulated in Transcription
  misc_feature: MA Experiment 20000574 PARAMETER Experiment Name: At_100uM_ABA_Mutants__P Parameter: Organism Value: A. thaliana
  misc_feature: MA Experiment 20000574 PARAMETER Experiment Name: At_100uM_ABA_Mutants__P Parameter: Plant Line Value: CS23 vs. Ler wt
  misc_feature: MA Experiment 20000574 PARAMETER Experiment Name: At_100uM_ABA_Mutants__P Parameter: Timepoint (hr) Value: N/A
  misc_feature: MA Experiment 20000574 PARAMETER Experiment Name: At_100uM_ABA_Mutants__P Parameter: Tissue Value: Whole Plant
  misc_feature: MA Experiment 20000574 PARAMETER Experiment Name: At_100uM_ABA_Mutants__P Parameter: Treatment Value: None
  misc_feature: MA Experiment ID: 20001247 Result: Down-regulated in Transcription
  misc_feature: MA Experiment 20001247 PARAMETER Experiment Name: At_Far-red-induction_P Parameter: Age (day) Value: 7
  misc_feature: MA Experiment 20001247 PARAMETER Experiment Name: At_Far-red-induction_P Parameter: Light Value: Far-red vs. White
  misc_feature: MA Experiment 20001247 PARAMETER Experiment Name: At_Far-red-induction_P Parameter: Organism Value: A. thaliana
  misc_feature: MA Experiment 20001247 PARAMETER Experiment Name: At_Far-red-induction_P Parameter: Plant Line Value: Columbia
  misc_feature: MA Experiment 20001247 PARAMETER Experiment Name: At_Far-red-induction_P Parameter: Timepoint (hr) Value: 1
  misc_feature: MA Experiment 20001247 PARAMETER Experiment Name: At_Far-red-induction_P Parameter: Tissue Value: Whole Plant
  misc_feature: MA Experiment ID: 20001248 Result: Down-regulated in Transcription
  misc_feature: MA Experiment 20001248 PARAMETER Experiment Name: At_Far-red-induction_P Parameter: Age (day) Value: 7
  misc_feature: MA Experiment 20001248 PARAMETER Experiment Name: At_Far-red-induction_P Parameter: Light Value: Far-red vs. White
  misc_feature: MA Experiment 20001248 PARAMETER Experiment Name: At_Far-red-induction_P Parameter: Organism Value: A. thaliana
  misc_feature: MA Experiment 20001248 PARAMETER Experiment Name: At_Far-red-induction_P Parameter: Plant Line Value: Columbia
  misc_feature: MA Experiment 20001248 PARAMETER Experiment Name: At_Far-red-induction_P Parameter: Timepoint (hr) Value: 4
  misc_feature: MA Experiment 20001248 PARAMETER Experiment Name: At_Far-red-induction_P Parameter: Tissue Value: Whole Plant
  misc_feature: MA Experiment ID: 20001450 Result: Down-regulated in Transcription
  misc_feature: MA Experiment 20001450 PARAMETER Experiment Name: At_Far-red-induction_P Parameter: Age (day) Value: 7
  misc_feature: MA Experiment 20001450 PARAMETER Experiment Name: At_Far-red-induction_P Parameter: Light Value: Far-red vs. White
  misc_feature: MA Experiment 20001450 PARAMETER Experiment Name: At_Far-red-induction_P Parameter: Organism Value: A. thaliana
  misc_feature: MA Experiment 20001450 PARAMETER Experiment Name: At_Far-red-induction_P Parameter: Plant Line Value: Columbia
  misc_feature: MA Experiment 20001450 PARAMETER Experiment Name: At_Far-red-induction_P Parameter: Timepoint (hr) Value: 8
  misc_feature: MA Experiment 20001450 PARAMETER Experiment Name: At_Far-red-induction_P Parameter: Tissue Value: Whole Plant
  misc_feature: MA Experiment ID: 20001451 Result: Down-regulated in Transcription
  misc_feature: MA Experiment 20001451 PARAMETER Experiment Name: At_Far-red-induction_P Parameter: Age (day) Value: 7
  misc_feature: MA Experiment 20001451 PARAMETER Experiment Name: At_Far-red-induction_P Parameter: Light Value: Far-red vs. White
  misc_feature: MA Experiment 20001451 PARAMETER Experiment Name: At_Far-red-induction_P Parameter: Organism Value: A. thaliana
  misc_feature: MA Experiment 20001451 PARAMETER Experiment Name: At_Far-red-induction_P Parameter: Plant Line Value: Columbia
  misc_feature: MA Experiment 20001451 PARAMETER Experiment Name: At_Far-red-induction_P Parameter: Timepoint (hr) Value: 24
  misc_feature: MA Experiment 20001451 PARAMETER Experiment Name: At_Far-red-induction_P Parameter: Tissue Value: Whole Plant
  misc_feature: MA Experiment ID: 20001459 Result: Up-regulated in Transcription
  misc_feature: MA Experiment 20001459 PARAMETER Experiment Name: At_50mM_NH4NO3_L-to-H_P Parameter: Age (day) Value: Undefined
  misc_feature: MA Experiment 20001459 PARAMETER Experiment Name: At_50mM_NH4NO3_L-to-H_P Parameter: Organism Value: Undefined
  misc_feature: MA Experiment 20001459 PARAMETER Experiment Name: At_50mM_NH4NO3_L-to-H_P Parameter: Plant Line Value: Undefined
  misc_feature: MA Experiment 20001459 PARAMETER Experiment Name: At_50mM_NH4NO3_L-to-H_P Parameter: Timepoint (hr) Value: 4
  misc_feature: MA Experiment 20001459 PARAMETER Experiment Name: At_50mM_NH4NO3_L-to-H_P Parameter: Tissue Value: Siliques
  misc_feature: MA Experiment 20001459 PARAMETER Experiment Name: At_50mM_NH4NO3_L-to-H_P Parameter: Treatment Value: 50mM NH4NO3 vs. 100mM Manitol
  misc_feature: MA Experiment ID: 20001555 Result: Up-regulated in Transcription
  misc_feature: MA Experiment 20001555 PARAMETER Experiment Name: At_Drought_Soil_Dry_P Parameter: Age (day) Value: 24
  misc_feature: MA Experiment 20001555 PARAMETER Experiment Name: At_Drought_Soil_Dry_P Parameter: Organism Value: A. thaliana
  misc_feature: MA Experiment 20001555 PARAMETER Experiment Name: At_Drought_Soil_Dry_P Parameter: Plant Line Value: WS
  misc_feature: MA Experiment 20001555 PARAMETER Experiment Name: At_Drought_Soil_Dry_P Parameter: Post Timepoint (hr) Value: None
  misc_feature: MA Experiment 20001555 PARAMETER Experiment Name: At_Drought_Soil_Dry_P Parameter: Post-Treatment Value: None
  misc_feature: MA Experiment 20001555 PARAMETER Experiment Name: At_Drought_Soil_Dry_P Parameter: Timepoint (day) Value: 10
  misc_feature: MA Experiment 20001555 PARAMETER Experiment Name: At_Drought_Soil_Dry_P Parameter: Treatment Value: Drought vs. No Drought
  misc_feature: MA Experiment ID: 20001560 Result: Down-regulated in Transcription
  misc_feature: MA Experiment 20001560 PARAMETER Experiment Name: At_Drought_Soil_Dry_P Parameter: Age (day) Value: 28
  misc_feature: MA Experiment 20001560 PARAMETER Experiment Name: At_Drought_Soil_Dry_P Parameter: Organism Value: A. thaliana
  misc_feature: MA Experiment 20001560 PARAMETER Experiment Name: At_Drought_Soil_Dry_P Parameter: Plant Line Value: WS
  misc_feature: MA Experiment 20001560 PARAMETER Experiment Name: At_Drought_Soil_Dry_P Parameter: Post Timepoint (hr) Value: None
  misc_feature: MA Experiment 20001560 PARAMETER Experiment Name: At_Drought_Soil_Dry_P Parameter: Post-Treatment Value: None
  misc_feature: MA Experiment 20001560 PARAMETER Experiment Name: At_Drought_Soil_Dry_P Parameter: Timepoint (day) Value: 14
  misc_feature: MA Experiment 20001560 PARAMETER Experiment Name: At_Drought_Soil_Dry_P Parameter: Treatment Value: Drought vs. No Drought
  misc_feature: MA Experiment ID: 20001911 Result: Down-regulated in Transcription
  misc_feature: MA Experiment 20001911 PARAMETER Experiment Name: At_Drought_Reproduction_P Parameter: Age (day) Value: 40
  misc_feature: MA Experiment 20001911 PARAMETER Experiment Name: At_Drought_Reproduction_P Parameter: Organism Value: A. thaliana
  misc_feature: MA Experiment 20001911 PARAMETER Experiment Name: At_Drought_Reproduction_P Parameter: Plant Line Value: WS
  misc_feature: MA Experiment 20001911 PARAMETER Experiment Name: At_Drought_Reproduction_P Parameter: Timepoint (day) Value: 10
  misc_feature: MA Experiment 20001911 PARAMETER Experiment Name: At_Drought_Reproduction_P Parameter: Tissue Value: Flowers
  misc_feature: MA Experiment 20001911 PARAMETER Experiment Name: At_Drought_Reproduction_P Parameter: Treatment Value: Drought vs. No Drought

SEQ ID NO: 32977 - protein, 327 aa, Arabidopsis thaliana; identical to SEQ ID NO: 29387
  peptide (1)..(327): Ceres Seq. ID no. 12422075
  misc_feature (184)..(217): Pfam Name: TPR Domain Pfam Description: TPR Domain
  misc_feature (17)..(240): Homolog of NCBI NO: 15233432 NR Description: putative protein; protein id: At4g20900.1
  misc_feature (54)..(269): Homolog of NCBI NO: 29467532 NR Description: P0582D05.25 [Oryza sativa (japonica
  misc_feature (17)..(278): Homolog of NCBI NO: 4028970 NR Description: pollenless3 [Arabidopsis thaliana]
  misc_feature (17)..(278): Homolog of NCBI NO: 3859112 NR Description: male sterility MS5 [Arabidopsis thaliana]
  misc_feature (19)..(268): Homolog of NCBI NO: 15230439 NR Description: MS5-like protein; protein id: At3g51280.1
  misc_feature (44)..(327): Homolog of NCBI NO: 30695554 NR Description: male sterility MS5 family [Arabidopsis thaliana]
  misc_feature (44)..(327): Homolog of NCBI NO: 9758884 NR Description: gb|AAC72543.1~gene_id:K24G6.19~similar to unknown
  misc_feature (33)..(327): Homolog of NCBI NO: 3859116 NR Description: unknown [Oryza sativa]
  misc_feature (25)..(327): Homolog of NCBI NO: 30678993 NR Description: male sterility MS5 family [Arabidopsis thaliana]
  misc_feature (1)..(327): Homolog of NCBI NO: 25406811 NR Description: hypothetical protein [imported] - Arabidopsis

SEQ ID NO: 32978 - protein, 303 aa, Arabidopsis thaliana; identical to SEQ ID NO: 29388
  peptide (1)..(303): Ceres Seq. ID no. 12422076
  misc_feature (160)..(193): Pfam Name: TPR Domain Pfam Description: TPR Domain
  misc_feature (1)..(216): Homolog of NCBI NO: 15233432 NR Description: putative protein; protein id: At4g20900.1
  misc_feature (30)..(245): Homolog of NCBI NO: 29467532 NR Description: P0582D05.25 [Oryza sativa (japonica
  misc_feature (1)..(254): Homolog of NCBI NO: 4028970 NR Description: pollenless3 [Arabidopsis thaliana]
  misc_feature (1)..(254): Homolog of NCBI NO: 3859112 NR Description: male sterility MS5 [Arabidopsis thaliana]
  misc_feature (1)..(244): Homolog of NCBI NO: 15230439 NR Description: MS5-like protein; protein id: At3g51280.1
  misc_feature (20)..(303): Homolog of NCBI NO: 30695554 NR Description: male sterility MS5 family [Arabidopsis thaliana]
  misc_feature (20)..(303): Homolog of NCBI NO: 9758884 NR Description: gb|AAC72543.1~gene_id:K24G6.19~similar to unknown
  misc_feature (9)..(303): Homolog of NCBI NO: 3859116 NR Description: unknown [Oryza sativa]
  misc_feature (1)..(303): Homolog of NCBI NO: 30678993 NR Description: male sterility MS5 family [Arabidopsis thaliana]
  misc_feature (1)..(303): Homolog of NCBI NO: 25406811 NR Description: hypothetical protein [imported] - Arabidopsis

SEQ ID NO: 32979 - protein, 302 aa, Arabidopsis thaliana; identical to SEQ ID NO: 29389
  peptide (1)..(302): Ceres Seq. ID no. 12422077
  misc_feature (159)..(192): Pfam Name: TPR Domain Pfam Description: TPR Domain
  misc_feature (1)..(215): Homolog of NCBI NO: 15233432 NR Description: putative protein; protein id: At4g20900.1
  misc_feature (29)..(244): Homolog of NCBI NO: 29467532 NR Description: P0582D05.25 [Oryza sativa (japonica
  misc_feature (1)..(253): Homolog of NCBI NO: 4028970 NR Description: pollenless3 [Arabidopsis thaliana]
  misc_feature (1)..(253): Homolog of NCBI NO: 3859112 NR Description: male sterility MS5 [Arabidopsis thaliana]
  misc_feature (1)..(243): Homolog of NCBI NO: 15230439 NR Description: MS5-like protein; protein id: At3g51280.1
  misc_feature (19)..(302): Homolog of NCBI NO: 30695554 NR Description: male sterility MS5 family [Arabidopsis thaliana]
  misc_feature (19)..(302): Homolog of NCBI NO: 9758884 NR Description: gb|AAC72543.1~gene_id:K24G6.19~similar to unknown
  misc_feature (8)..(302): Homolog of NCBI NO: 3859116 NR Description: unknown [Oryza sativa]
  misc_feature (1)..(302): Homolog of NCBI NO: 30678993 NR Description: male sterility MS5 family [Arabidopsis thaliana]
  misc_feature (1)..(302): Homolog of NCBI NO: 25406811 NR Description: hypothetical protein [imported] - Arabidopsis

SEQ ID NO: 32980 - DNA, 942 bp, Arabidopsis thaliana; identical to SEQ ID NO: 29390
  misc_feature (1)..(942): Ceres Seq. ID no. 12384618
  misc_feature: MA Experiment ID: 108461 Result: Down-regulated in Transcription
  misc_feature: MA Experiment 108461 PARAMETER Experiment Name: At_Germinating_Seeds_cDNA_P Parameter: Age (day) Value: 1 vs. 0
  misc_feature: MA Experiment 108461 PARAMETER Experiment Name: At_Germinating_Seeds_cDNA_P Parameter: Tissue Value: Germinating Seeds
  misc_feature: MA Experiment ID: 108463 Result: Down-regulated in Transcription
  misc_feature: MA Experiment 108463 PARAMETER Experiment Name: At_Germinating_Seeds_cDNA_P Parameter: Age (day) Value: 3 vs. 0
  misc_feature: MA Experiment 108463 PARAMETER Experiment Name: At_Germinating_Seeds_cDNA_P Parameter: Tissue Value: Germinating Seeds
  misc_feature: MA Experiment ID: 108464 Result: Down-regulated in Transcription
  misc_feature: MA Experiment 108464 PARAMETER Experiment Name: At_Germinating_Seeds_cDNA_P Parameter: Age (day) Value: 4 vs. 0
  misc_feature: MA Experiment 108464 PARAMETER Experiment Name: At_Germinating_Seeds_cDNA_P Parameter: Tissue Value: Germinating Seeds
  misc_feature: MA Experiment ID: 108469 Result: Down-regulated in Transcription
  misc_feature: MA Experiment ID: 108488 Result: Down-regulated in Transcription
  misc_feature: MA Experiment ID: 108501 Result: Up-regulated in Transcription
  misc_feature: MA Experiment 108501 PARAMETER Experiment Name: At_ap2_floral_buds_cDNA_P Parameter: Plant Line Value: ap2 (Ler.)
  misc_feature: MA Experiment 108501 PARAMETER Experiment Name: At_ap2_floral_buds_cDNA_P Parameter: Tissue Value: Closed Flower
  misc_feature: MA Experiment ID: 108561 Result: Up-regulated in Transcription
  misc_feature: MA Experiment 108561 PARAMETER Experiment Name: At_100uM_ABA_cDNA_P Parameter: Timepoint (hr) Value: 6
  misc_feature: MA Experiment 108561 PARAMETER Experiment Name: At_100uM_ABA_cDNA_P Parameter: Tissue Value: Aerial
  misc_feature: MA Experiment 108561 PARAMETER Experiment Name: At_100uM_ABA_cDNA_P Parameter: Treatment Value: 100uM ABA vs. No Treatment
  misc_feature: MA Experiment ID: 108573 Result: Up-regulated in Transcription
  misc_feature: MA Experiment 108573 PARAMETER Experiment Name: At_Drought_cDNA_P Parameter: Timepoint (hr) Value: 6
  misc_feature: MA Experiment 108573 PARAMETER Experiment Name: At_Drought_cDNA_P Parameter: Tissue Value: Aerial
  misc_feature: MA Experiment 108573 PARAMETER Experiment Name: At_Drought_cDNA_P Parameter: Treatment Value: Drought vs. No Drought
  misc_feature: MA Experiment ID: 108595 Result: Up-regulated in Transcription
  misc_feature: MA Experiment 108595 PARAMETER Experiment Name: At_Ler-pi_Ovule_cDNA_P Parameter: Plant Line Value: null
  misc_feature: MA Experiment ID: 108605 Result: Up-regulated in Transcription
  misc_feature: MA Experiment 108605 PARAMETER Experiment Name: At_100uM_ABA_cDNA_P Parameter: Timepoint (hr) Value: 6
  misc_feature: MA Experiment 108605 PARAMETER Experiment Name: At_100uM_ABA_cDNA_P Parameter: Tissue Value: Aerial
  misc_feature: MA Experiment 108605 PARAMETER Experiment Name: At_100uM_ABA_cDNA_P Parameter: Treatment Value: 100uM ABA vs. No Treatment
  misc_feature: MA Experiment ID: 108607 Result: Up-regulated in Transcription
  misc_feature: MA Experiment 108607 PARAMETER Experiment Name: At_100uM_ABA_cDNA_P Parameter: Timepoint (hr) Value: 4
  misc_feature: MA Experiment 108607 PARAMETER Experiment Name: At_100uM_ABA_cDNA_P Parameter: Tissue Value: Aerial
  misc_feature: MA Experiment 108607 PARAMETER Experiment Name: At_100uM_ABA_cDNA_P Parameter: Treatment Value: 100uM ABA vs. No Treatment
  misc_feature: MA Experiment ID: 20000070 Result: Up-regulated in Transcription
  misc_feature: MA Experiment 20000070 PARAMETER Experiment Name: At_100uM_ABA_Mutants_cDNA_P Parameter: Plant Line Value: CS24
  misc_feature: MA Experiment 20000070 PARAMETER Experiment Name: At_100uM_ABA_Mutants_cDNA_P Parameter: Timepoint (hr) Value: 6
  misc_feature: MA Experiment 20000070 PARAMETER Experiment Name: At_100uM_ABA_Mutants_cDNA_P Parameter: Tissue Value: Aerial
  misc_feature: MA Experiment 20000070 PARAMETER Experiment Name: At_100uM_ABA_Mutants_cDNA_P Parameter: Treatment Value: 100uM ABA vs. No Treatment
  misc_feature: MA Experiment ID: 20000071 Result: Up-regulated in Transcription
  misc_feature: MA Experiment 20000071 PARAMETER Experiment Name: At_100uM_ABA_Mutants_cDNA_P Parameter: Plant Line Value: CS8104
  misc_feature: MA Experiment 20000071 PARAMETER Experiment Name: At_100uM_ABA_Mutants_cDNA_P Parameter: Timepoint (hr) Value: 6
  misc_feature: MA Experiment 20000071 PARAMETER Experiment Name: At_100uM_ABA_Mutants_cDNA_P Parameter: Tissue Value: Aerial
  misc_feature: MA Experiment 20000071 PARAMETER Experiment Name: At_100uM_ABA_Mutants_cDNA_P Parameter: Treatment Value: 100uM ABA vs. No Treatment
  misc_feature: MA Experiment ID: 20000072 Result: Up-regulated in Transcription
  misc_feature: MA Experiment 20000072 PARAMETER Experiment Name: At_100uM_ABA_Mutants_cDNA_P Parameter: Plant Line Value: CS8105
  misc_feature: MA Experiment 20000072 PARAMETER Experiment Name: At_100uM_ABA_Mutants_cDNA_P Parameter: Timepoint (hr) Value: 6
  misc_feature: MA Experiment 20000072 PARAMETER Experiment Name: At_100uM_ABA_Mutants_cDNA_P Parameter: Tissue Value: Aerial
  misc_feature: MA Experiment 20000072 PARAMETER Experiment Name: At_100uM_ABA_Mutants_cDNA_P Parameter: Treatment Value: 100uM ABA vs. No Treatment
  misc_feature: MA Experiment ID: 20000086 Result: Up-regulated in Transcription
  misc_feature: MA Experiment 20000086 PARAMETER Experiment Name: At_100uM_ABA_Mutants_cDNA_P Parameter: Plant Line Value: CS22
  misc_feature: MA Experiment 20000086 PARAMETER Experiment Name: At_100uM_ABA_Mutants_cDNA_P Parameter: Timepoint (hr) Value: 6
  misc_feature: MA Experiment 20000086 PARAMETER Experiment Name: At_100uM_ABA_Mutants_cDNA_P Parameter: Tissue Value: Aerial
  misc_feature: MA Experiment 20000086 PARAMETER Experiment Name: At_100uM_ABA_Mutants_cDNA_P Parameter: Treatment Value: 100uM ABA vs. No Treatment
  misc_feature: MA Experiment ID: 20000087 Result: Up-regulated in Transcription
  misc_feature: MA Experiment 20000087 PARAMETER Experiment Name: At_100uM_ABA_Mutants_cDNA_P Parameter: Plant Line Value: WS
  misc_feature: MA Experiment 20000087 PARAMETER Experiment Name: At_100uM_ABA_Mutants_cDNA_P Parameter: Timepoint (hr) Value: 6
  misc_feature: MA Experiment 20000087 PARAMETER Experiment Name: At_100uM_ABA_Mutants_cDNA_P Parameter: Tissue Value: Aerial
  misc_feature: MA Experiment 20000087 PARAMETER Experiment Name: At_100uM_ABA_Mutants_cDNA_P Parameter: Treatment Value: 100uM ABA vs. No Treatment
  misc_feature: MA Experiment ID: 20000117 Result: Up-regulated in Transcription
  misc_feature: MA Experiment 20000117 PARAMETER Experiment Name: At_100uM_ABA_Mutants_cDNA_P Parameter: Plant Line Value: Columbia
  misc_feature: MA Experiment 20000117 PARAMETER Experiment Name: At_100uM_ABA_Mutants_cDNA_P Parameter: Timepoint (hr) Value: 6
  misc_feature: MA Experiment 20000117 PARAMETER Experiment Name: At_100uM_ABA_Mutants_cDNA_P Parameter: Tissue Value: Aerial
  misc_feature: MA Experiment 20000117 PARAMETER Experiment Name: At_100uM_ABA_Mutants_cDNA_P Parameter: Treatment Value: 100uM ABA vs. No Treatment
  misc_feature: MA Experiment ID: 20000182 Result: Down-regulated in Transcription
  misc_feature: MA Experiment 20000182 PARAMETER Experiment Name: At_2mM_SA_P Parameter: Age (day) Value: 14
  misc_feature: MA Experiment 20000182 PARAMETER Experiment Name: At_2mM_SA_P Parameter: Organism Value: A. thaliana
  misc_feature: MA Experiment 20000182 PARAMETER Experiment Name: At_2mM_SA_P Parameter: Plant Line Value: WS
  misc_feature: MA Experiment 20000182 PARAMETER Experiment Name: At_2mM_SA_P Parameter: Timepoint (hr) Value: 6
  misc_feature: MA Experiment 20000182 PARAMETER Experiment Name: At_2mM_SA_P Parameter: Tissue Value: Aerial
  misc_feature: MA Experiment 20000182 PARAMETER Experiment Name: At_2mM_SA_P Parameter: Treatment Value: 2mM SA vs. No Treatment
  misc_feature: MA Experiment ID: 20000184 Result: Down-regulated in Transcription
  misc_feature: MA Experiment 20000184 PARAMETER Experiment Name: At_Shoots__P Parameter: Age (day) Value: 7
  misc_feature: MA Experiment 20000184 PARAMETER Experiment Name: At_Shoots__P Parameter: Tissue Value: Shoots vs. Whole Plant
  misc_feature: MA Experiment ID: 20000234 Result: Up-regulated in Transcription
  misc_feature: MA Experiment 20000234 PARAMETER Experiment Name: At_Siliques_P Parameter: Age (day) Value: 21
  misc_feature: MA Experiment 20000234 PARAMETER Experiment Name: At_Siliques_P Parameter: Organism Value: A. thaliana
  misc_feature: MA Experiment 20000234 PARAMETER Experiment Name: At_Siliques_P Parameter: Plant Line Value: WS
  misc_feature: MA Experiment 20000234 PARAMETER Experiment Name: At_Siliques_P Parameter: Tissue Value: Less Than 5mm Siliques vs. Whole Plant
  misc_feature: MA Experiment ID: 20000235 Result: Up-regulated in Transcription
  misc_feature: MA Experiment 20000235 PARAMETER Experiment Name: At_Siliques_P Parameter: Age (day) Value: 21
  misc_feature: MA Experiment 20000235 PARAMETER Experiment Name: At_Siliques_P Parameter: Organism Value: A. thaliana
  misc_feature: MA Experiment 20000235 PARAMETER Experiment Name: At_Siliques_P Parameter: Plant Line Value: WS
  misc_feature: MA Experiment 20000235 PARAMETER Experiment Name: At_Siliques_P Parameter: Tissue Value: 5-10mm Siliques vs. Whole Plant
  misc_feature: MA Experiment ID: 20000264 Result: Up-regulated in Transcription
  misc_feature: MA Experiment 20000264 PARAMETER Experiment Name: At_Open_Flower_P Parameter: Age (day) Value: 21
  misc_feature: MA Experiment 20000264 PARAMETER Experiment Name: At_Open_Flower_P Parameter: Plant Line Value: WS
  misc_feature: MA Experiment 20000264 PARAMETER Experiment Name: At_Open_Flower_P Parameter: Tissue Value: Open Flower vs. Whole Plant
  misc_feature: MA Experiment ID: 20000267 Result: Up-regulated in Transcription
  misc_feature: MA Experiment 20000267 PARAMETER Experiment Name: At_Drought_P Parameter: Age (day) Value: 7
  misc_feature: MA Experiment 20000267 PARAMETER Experiment Name: At_Drought_P Parameter: Organism Value: A. thaliana
  misc_feature: MA Experiment 20000267 PARAMETER Experiment Name: At_Drought_P Parameter: Plant Line Value: WS
  misc_feature: MA Experiment 20000267 PARAMETER Experiment Name: At_Drought_P Parameter: Timepoint (hr) Value: 6
  misc_feature: MA Experiment 20000267 PARAMETER Experiment Name: At_Drought_P Parameter: Tissue Value: Whole Plant
  misc_feature: MA Experiment 20000267 PARAMETER Experiment Name: At_Drought_P Parameter: Treatment Value: Drought vs. No Drought
  misc_feature: MA Experiment ID: 20000268 Result: Up-regulated in Transcription
  misc_feature: MA Experiment 20000268 PARAMETER Experiment Name: At_100mM_NaCl__P Parameter: Age (day) Value: 14
  misc_feature: MA Experiment 20000268 PARAMETER Experiment Name: At_100mM_NaCl__P Parameter: Organism Value: A. thaliana
  misc_feature: MA Experiment 20000268 PARAMETER Experiment Name: At_100mM_NaCl__P Parameter: Plant Line Value: WS
  misc_feature: MA Experiment 20000268 PARAMETER Experiment Name: At_100mM_NaCl__P Parameter: Timepoint (hr) Value: 6
  misc_feature: MA Experiment 20000268 PARAMETER Experiment Name: At_100mM_NaCl__P Parameter: Tissue Value: Whole Plant
  misc_feature: MA Experiment 20000268 PARAMETER Experiment Name: At_100mM_NaCl__P Parameter: Treatment Value: 100mM NaCl vs. No Treatment
  misc_feature: MA Experiment ID: 20000308 Result: Up-regulated in Transcription
  misc_feature: MA Experiment 20000308 PARAMETER Experiment Name: At_100mM_NaCl__P Parameter: Age (day) Value: 17
  misc_feature: MA Experiment 20000308 PARAMETER Experiment Name: At_100mM_NaCl__P Parameter: Organism Value: A. thaliana
  misc_feature: MA Experiment 20000308 PARAMETER Experiment Name: At_100mM_NaCl__P Parameter: Plant Line Value: WS
  misc_feature: MA Experiment 20000308 PARAMETER Experiment Name: At_100mM_NaCl__P Parameter: Timepoint (hr) Value: 72
  misc_feature: MA Experiment 20000308 PARAMETER Experiment Name: At_100mM_NaCl__P Parameter: Tissue Value: Whole Plant
  misc_feature: MA Experiment 20000308 PARAMETER Experiment Name: At_100mM_NaCl__P Parameter: Treatment Value: 100mM NaCl vs. No Treatment
  misc_feature: MA Experiment ID: 20000436 Result: Up-regulated in Transcription
  misc_feature: MA Experiment 20000436 PARAMETER Experiment Name: At_Drought_P Parameter: Age (day) Value: 7
  misc_feature: MA Experiment 20000436 PARAMETER Experiment Name: At_Drought_P Parameter: Organism Value: A. thaliana
  misc_feature: MA Experiment 20000436 PARAMETER Experiment Name: At_Drought_P Parameter: Plant Line Value: WS
  misc_feature: MA Experiment 20000436 PARAMETER Experiment Name: At_Drought_P Parameter: Timepoint (hr) Value: 12
  misc_feature: MA Experiment 20000436 PARAMETER Experiment Name: At_Drought_P Parameter: Tissue Value: Whole Plant
  misc_feature: MA Experiment 20000436 PARAMETER Experiment Name: At_Drought_P Parameter: Treatment Value: Drought vs. No Drought
  misc_feature: MA Experiment ID: 20000437 Result: Up-regulated in Transcription
  misc_feature: MA Experiment 20000437 PARAMETER Experiment Name: At_Drought_P Parameter: Age (day) Value: 8
  misc_feature: MA Experiment 20000437 PARAMETER Experiment Name: At_Drought_P Parameter: Organism Value: A. thaliana
  misc_feature: MA Experiment 20000437 PARAMETER Experiment Name: At_Drought_P Parameter: Plant Line Value: WS
  misc_feature: MA Experiment 20000437 PARAMETER Experiment Name: At_Drought_P Parameter: Timepoint (hr) Value: 24
  misc_feature: MA Experiment 20000437 PARAMETER Experiment Name: At_Drought_P Parameter: Tissue Value: Whole Plant
  misc_feature: MA Experiment 20000437 PARAMETER Experiment Name: At_Drought_P Parameter: Treatment Value: Drought vs. No Drought
  misc_feature: MA Experiment ID: 20000438 Result: Down-regulated in Transcription
  misc_feature: MA Experiment 20000438 PARAMETER Experiment Name: At_Shoots__P Parameter: Age (day) Value: 14
  misc_feature: MA Experiment 20000438 PARAMETER Experiment Name: At_Shoots__P Parameter: Tissue Value: Shoots vs. Whole Plant
  misc_feature: MA Experiment ID: 20000441 Result: Up-regulated in Transcription
  misc_feature: MA Experiment 20000441 PARAMETER Experiment Name: At_1uM_BR-BRZ__P Parameter: Tissue Value: Shoot Apices
  misc_feature: MA Experiment 20000441 PARAMETER Experiment Name: At_1uM_BR-BRZ__P Parameter: Treatment Value: 1uM BR vs. No Treatment
  misc_feature: MA Experiment ID: 20000443 Result: Up-regulated in Transcription
  misc_feature: MA Experiment 20000443 PARAMETER Experiment Name: At_1uM_BR-BRZ__P Parameter: Tissue Value: Shoot Apices
  misc_feature: MA Experiment 20000443 PARAMETER Experiment Name: At_1uM_BR-BRZ__P Parameter: Treatment Value: 1uM BRZ vs. No Treatment
  misc_feature: MA Experiment ID: 20000453 Result: Up-regulated in Transcription
  misc_feature: MA Experiment 20000453 PARAMETER Experiment Name: At_100uM_ABA_P Parameter: Age (day) Value: 15
  misc_feature: MA Experiment 20000453 PARAMETER Experiment Name: At_100uM_ABA_P Parameter: Organism Value: A. thaliana
  misc_feature: MA Experiment 20000453 PARAMETER Experiment Name: At_100uM_ABA_P Parameter: Plant Line Value: WS
  misc_feature: MA Experiment 20000453 PARAMETER Experiment Name: At_100uM_ABA_P Parameter: Timepoint (hr) Value: 24
  misc_feature: MA Experiment 20000453 PARAMETER Experiment Name: At_100uM_ABA_P Parameter: Tissue Value: Aerial
  misc_feature: MA Experiment 20000453 PARAMETER Experiment Name: At_100uM_ABA_P Parameter: Treatment Value: 100uM ABA vs. No Treatment
  misc_feature: MA Experiment ID: 20000495 Result: Up-regulated in Transcription
  misc_feature: MA Experiment 20000495 PARAMETER Experiment Name: At_Guard_Cells_P Parameter: Harvest Date Value: 8/2/2002
  misc_feature: MA Experiment 20000495 PARAMETER Experiment Name: At_Guard_Cells_P Parameter: Organism Value: A. thaliana
  misc_feature: MA Experiment 20000495 PARAMETER Experiment Name: At_Guard_Cells_P Parameter: Tissue Value: Guard Cells vs. Leaves
  misc_feature: MA Experiment ID: 20000794 Result: Up-regulated in Transcription
  misc_feature: MA Experiment 20000794 PARAMETER Experiment Name: At_Petals_P Parameter: Age (day) Value: 23-25 days
  misc_feature: MA Experiment 20000794 PARAMETER Experiment Name: At_Petals_P Parameter: Plant Line Value: WS
  misc_feature: MA Experiment 20000794 PARAMETER Experiment Name: At_Petals_P Parameter: Tissue Value: Petals vs. Whole plant
  misc_feature: MA Experiment ID: 20001504 Result: Up-regulated in Transcription
  misc_feature: MA Experiment 20001504 PARAMETER Experiment Name: At_Far-red-enriched_P Parameter: Age (day) Value: 10
  misc_feature: MA Experiment 20001504 PARAMETER Experiment Name: At_Far-red-enriched_P Parameter: Light Value: Far-red enriched vs. White
  misc_feature: MA Experiment 20001504 PARAMETER Experiment Name: At_Far-red-enriched_P Parameter: Organism Value: A. thaliana
  misc_feature: MA Experiment 20001504 PARAMETER Experiment Name: At_Far-red-enriched_P Parameter: Plant Line Value: Columbia
  misc_feature: MA Experiment 20001504 PARAMETER Experiment Name: At_Far-red-enriched_P Parameter: Timepoint (day) Value: 6
  misc_feature: MA Experiment 20001504 PARAMETER Experiment Name: At_Far-red-enriched_P Parameter: Tissue Value: Whole Plant
  misc_feature: MA Experiment ID: 20001554 Result: Up-regulated in Transcription
  misc_feature: MA Experiment 20001554 PARAMETER Experiment Name: At_Drought_Soil_Dry_P Parameter: Age (day) Value: 21
  misc_feature: MA Experiment 20001554 PARAMETER Experiment Name: At_Drought_Soil_Dry_P Parameter: Organism Value: A. thaliana
  misc_feature: MA Experiment 20001554 PARAMETER Experiment Name: At_Drought_Soil_Dry_P Parameter: Plant Line Value: WS
  misc_feature: MA Experiment 20001554 PARAMETER Experiment Name: At_Drought_Soil_Dry_P Parameter: Post Timepoint (hr) Value: None
  misc_feature: MA Experiment 20001554 PARAMETER Experiment Name: At_Drought_Soil_Dry_P Parameter: Post-Treatment Value: None
  misc_feature: MA Experiment 20001554 PARAMETER Experiment Name: At_Drought_Soil_Dry_P Parameter: Timepoint (day) Value: 7
  misc_feature: MA Experiment 20001554 PARAMETER Experiment Name: At_Drought_Soil_Dry_P Parameter: Treatment Value: Drought vs. No Drought
  misc_feature: MA Experiment ID: 20001555 Result: Up-regulated in Transcription
  misc_feature: MA Experiment 20001555 PARAMETER Experiment Name: At_Drought_Soil_Dry_P Parameter: Age (day) Value: 24
  misc_feature: MA Experiment 20001555 PARAMETER Experiment Name: At_Drought_Soil_Dry_P Parameter: Organism Value: A. thaliana
  misc_feature: MA Experiment 20001555 PARAMETER Experiment Name: At_Drought_Soil_Dry_P Parameter: Plant Line Value: WS
  misc_feature: MA Experiment 20001555 PARAMETER Experiment Name: At_Drought_Soil_Dry_P Parameter: Post Timepoint (hr) Value: None
  misc_feature: MA Experiment 20001555 PARAMETER Experiment Name: At_Drought_Soil_Dry_P Parameter: Post-Treatment Value: None
  misc_feature: MA Experiment 20001555 PARAMETER Experiment Name: At_Drought_Soil_Dry_P Parameter: Timepoint (day) Value: 10
  misc_feature: MA Experiment 20001555 PARAMETER Experiment Name: At_Drought_Soil_Dry_P Parameter: Treatment Value: Drought vs. No Drought
  misc_feature: MA Experiment ID: 20001556 Result: Up-regulated in Transcription
  misc_feature: MA Experiment 20001556 PARAMETER Experiment Name: At_Drought_Soil_Dry_P Parameter: Age (day) Value: 26
  misc_feature: MA Experiment 20001556 PARAMETER Experiment Name: At_Drought_Soil_Dry_P Parameter: Organism Value: A. thaliana
  misc_feature: MA Experiment 20001556 PARAMETER Experiment Name: At_Drought_Soil_Dry_P Parameter: Plant Line Value: WS
  misc_feature: MA Experiment 20001556 PARAMETER Experiment Name: At_Drought_Soil_Dry_P Parameter: Post Timepoint (hr) Value: None
  misc_feature: MA Experiment 20001556 PARAMETER Experiment Name: At_Drought_Soil_Dry_P Parameter: Post-Treatment Value: None
  misc_feature: MA Experiment 20001556 PARAMETER Experiment Name: At_Drought_Soil_Dry_P Parameter: Timepoint (day) Value: 12
  misc_feature: MA Experiment 20001556 PARAMETER Experiment Name: At_Drought_Soil_Dry_P Parameter: Treatment Value: Drought vs. No Drought
  misc_feature: MA Experiment ID: 20001560 Result: Up-regulated in Transcription
  misc_feature: MA Experiment 20001560 PARAMETER Experiment Name: At_Drought_Soil_Dry_P Parameter: Age (day) Value: 28
  misc_feature: MA Experiment 20001560 PARAMETER Experiment Name: At_Drought_Soil_Dry_P Parameter: Organism Value: A. thaliana
  misc_feature: MA Experiment 20001560 PARAMETER Experiment Name: At_Drought_Soil_Dry_P Parameter: Plant Line Value: WS
  misc_feature: MA Experiment 20001560 PARAMETER Experiment Name: At_Drought_Soil_Dry_P Parameter: Post Timepoint (hr) Value: None
  misc_feature: MA Experiment 20001560 PARAMETER Experiment Name: At_Drought_Soil_Dry_P Parameter: Post-Treatment Value: None
  misc_feature: MA Experiment 20001560 PARAMETER Experiment Name: At_Drought_Soil_Dry_P Parameter: Timepoint (day) Value: 14
  misc_feature: MA Experiment 20001560 PARAMETER Experiment Name: At_Drought_Soil_Dry_P Parameter: Treatment Value: Drought vs. No Drought
  misc_feature: MA Experiment ID: 20001757 Result: Down-regulated in Transcription
  misc_feature: MA Experiment 20001757 PARAMETER Experiment Name: At_50mM_NH4NO3_L-to-H_P Parameter: Timepoint (hr) Value: 6
  misc_feature: MA Experiment 20001757 PARAMETER Experiment Name: At_50mM_NH4NO3_L-to-H_P Parameter: Tissue Value: Leaf
  misc_feature: MA Experiment 20001757 PARAMETER Experiment Name: At_50mM_NH4NO3_L-to-H_P Parameter: Treatment Value: 50mM NH4NO3 vs 100mM Mannitol
  misc_feature: MA Experiment ID: 20001770 Result: Up-regulated in Transcription
  misc_feature: MA Experiment 20001770 PARAMETER Experiment Name: At_Far-red-enriched-adult_P Parameter: Age (day) Value: 28
  misc_feature: MA Experiment 20001770 PARAMETER Experiment Name: At_Far-red-enriched-adult_P Parameter: Light Value: Far-red enriched vs. White
  misc_feature: MA Experiment 20001770 PARAMETER Experiment Name: At_Far-red-enriched-adult_P Parameter: Organism Value: A. thaliana
  misc_feature: MA Experiment 20001770 PARAMETER Experiment Name: At_Far-red-enriched-adult_P Parameter: Plant Line Value: Columbia
  misc_feature: MA Experiment 20001770 PARAMETER Experiment Name: At_Far-red-enriched-adult_P Parameter: Timepoint (hr) Value: 8
  misc_feature: MA Experiment 20001770 PARAMETER Experiment Name: At_Far-red-enriched-adult_P Parameter: Tissue Value: Aerial
  misc_feature: MA Experiment ID: 20001904 Result: Up-regulated in Transcription
  misc_feature: MA Experiment 20001904 PARAMETER Experiment Name: At_Drought_Reproduction_P Parameter: Age (day) Value: 37
  misc_feature: MA Experiment 20001904 PARAMETER Experiment Name: At_Drought_Reproduction_P Parameter: Organism Value: A. thaliana
  misc_feature: MA Experiment 20001904 PARAMETER Experiment Name: At_Drought_Reproduction_P Parameter: Plant Line Value: WS
  misc_feature: MA Experiment 20001904 PARAMETER Experiment Name: At_Drought_Reproduction_P Parameter: Timepoint (day) Value: 7
  misc_feature: MA Experiment 20001904 PARAMETER Experiment Name: At_Drought_Reproduction_P Parameter: Tissue Value: Rosettes
  misc_feature: MA Experiment 20001904 PARAMETER Experiment Name: At_Drought_Reproduction_P Parameter: Treatment Value: Drought vs. No Drought
  misc_feature: MA Experiment ID: 20001906 Result: Up-regulated in Transcription
  misc_feature: MA Experiment 20001906 PARAMETER Experiment Name: At_Drought_Reproduction_P Parameter: Age (day) Value: 35
  misc_feature: MA Experiment 20001906 PARAMETER Experiment Name: At_Drought_Reproduction_P Parameter: Organism Value: A. thaliana
  misc_feature: MA Experiment 20001906 PARAMETER Experiment Name: At_Drought_Reproduction_P Parameter: Plant Line Value: WS
  misc_feature: MA Experiment 20001906 PARAMETER Experiment Name: At_Drought_Reproduction_P Parameter: Timepoint (day) Value: 5
  misc_feature: MA Experiment 20001906 PARAMETER Experiment Name: At_Drought_Reproduction_P Parameter: Tissue Value: Siliques
  misc_feature: MA Experiment 20001906 PARAMETER Experiment Name: At_Drought_Reproduction_P Parameter: Treatment Value: Drought vs. No Drought
  misc_feature: MA Experiment ID: 20001908 Result: Up-regulated in Transcription
  misc_feature: MA Experiment 20001908 PARAMETER Experiment Name: At_Drought_Reproduction_P Parameter: Age (day) Value: 40
  misc_feature: MA Experiment 20001908 PARAMETER Experiment Name: At_Drought_Reproduction_P Parameter: Organism Value: A. thaliana
  misc_feature: MA Experiment 20001908 PARAMETER Experiment Name: At_Drought_Reproduction_P Parameter: Plant Line Value: WS
  misc_feature: MA Experiment 20001908 PARAMETER Experiment Name: At_Drought_Reproduction_P Parameter: Timepoint (day) Value: 10
  misc_feature: MA Experiment 20001908 PARAMETER Experiment Name: At_Drought_Reproduction_P Parameter: Tissue Value: Siliques
  misc_feature: MA Experiment 20001908 PARAMETER Experiment Name: At_Drought_Reproduction_P Parameter: Treatment Value: Drought vs. No Drought
  misc_feature: MA Experiment ID: 20001910 Result: Up-regulated in Transcription
  misc_feature: MA Experiment 20001910 PARAMETER Experiment Name: At_Drought_Reproduction_P Parameter: Age (day) Value: 37
  misc_feature: MA Experiment 20001910 PARAMETER Experiment Name: At_Drought_Reproduction_P Parameter: Organism Value: A. thaliana
  misc_feature: MA Experiment 20001910 PARAMETER Experiment Name: At_Drought_Reproduction_P Parameter: Plant Line Value: WS
  misc_feature: MA Experiment 20001910 PARAMETER Experiment Name: At_Drought_Reproduction_P Parameter: Timepoint (day) Value: 7
  misc_feature: MA Experiment 20001910 PARAMETER Experiment Name: At_Drought_Reproduction_P Parameter: Tissue Value: Flowers
  misc_feature: MA Experiment 20001910 PARAMETER Experiment Name: At_Drought_Reproduction_P Parameter: Treatment Value: Drought vs. No Drought
  misc_feature: MA Experiment ID: 20001911 Result: Up-regulated in Transcription
  misc_feature: MA Experiment 20001911 PARAMETER Experiment Name: At_Drought_Reproduction_P Parameter: Age (day) Value: 40
  misc_feature: MA Experiment 20001911 PARAMETER Experiment Name: At_Drought_Reproduction_P Parameter: Organism Value: A. thaliana
  misc_feature: MA Experiment 20001911 PARAMETER Experiment Name: At_Drought_Reproduction_P Parameter: Plant Line Value: WS
  misc_feature: MA Experiment 20001911 PARAMETER Experiment Name: At_Drought_Reproduction_P Parameter: Timepoint (day) Value: 10
  misc_feature: MA Experiment 20001911 PARAMETER Experiment Name: At_Drought_Reproduction_P Parameter: Tissue Value: Flowers
  misc_feature: MA Experiment 20001911 PARAMETER Experiment Name: At_Drought_Reproduction_P Parameter: Treatment Value: Drought vs. No Drought

SEQ ID NO: 32981 - protein, 117 aa, Arabidopsis thaliana; identical to SEQ ID NO: 29391
  peptide (1)..(117): Ceres Seq. ID no. 12384619
  misc_feature (23)..(112): Pfam Name: alpha/beta hydrolase fold Pfam Description: alpha/beta hydrolase fold
  misc_feature (19)..(113): Homolog of NCBI NO: 15228496 NR Description: hypothetical protein; protein id: At3g03230.1
  misc_feature (18)..(115): Homolog of NCBI NO: 21592662 NR Description: unknown [Arabidopsis thaliana]
  misc_feature (18)..(115): Homolog of NCBI NO: 18410582 NR Description: expressed protein
  misc_feature (14)..(117): Homolog of NCBI NO: 18410575 NR Description: expressed protein
  misc_feature (23)..(117): Homolog of NCBI NO: 28416665 NR Description: At2g36290 [Arabidopsis thaliana]
  misc_feature (19)..(113): Homolog of NCBI NO: 6714434 NR Description: hypothetical protein [Arabidopsis thaliana]
  misc_feature (23)..(117): Homolog of NCBI NO: 18404095 NR Description: expressed protein
  misc_feature (14)..(117): Homolog of NCBI NO: 21537089 NR Description: unknown [Arabidopsis thaliana]
  misc_feature (19)..(113): Homolog of NCBI NO: 30678800 NR Description: esterase/lipase/thioesterase family [Arabidopsis
  misc_feature (8)..(117): Homolog of NCBI NO: 15242253 NR Description: putative protein

SEQ ID NO: 32982 - protein, 99 aa, Arabidopsis thaliana; identical to SEQ ID NO: 29392
  peptide (1)..(99): Ceres Seq. ID no. 12384620
  misc_feature (1)..(74): Pfam Name: alpha/beta hydrolase fold Pfam Description: alpha/beta hydrolase fold
  misc_feature (1)..(54): Homolog of NCBI NO: 15228496 NR Description: hypothetical protein; protein id: At3g03230.1
  misc_feature (1)..(81): Homolog of NCBI NO: 21592662 NR Description: unknown [Arabidopsis thaliana]
  misc_feature (1)..(81): Homolog of NCBI NO: 18410582 NR Description: expressed protein
  misc_feature (1)..(81): Homolog of NCBI NO: 18410575 NR Description: expressed protein
  misc_feature (1)..(51): Homolog of NCBI NO: 6714434 NR Description: hypothetical protein [Arabidopsis thaliana]
  misc_feature (1)..(70): Homolog of NCBI NO: 28416665 NR Description: At2g36290 [Arabidopsis thaliana]
  misc_feature (1)..(74): Homolog of NCBI NO: 18404095 NR Description: expressed protein
  misc_feature (1)..(81): Homolog of NCBI NO: 21537089 NR Description: unknown [Arabidopsis thaliana]
  misc_feature (1)..(51): Homolog of NCBI NO: 30678800 NR Description: esterase/lipase/thioesterase family [Arabidopsis
  misc_feature (1)..(85): Homolog of NCBI NO: 15242253 NR Description: putative protein

SEQ ID NO: 32983 - protein, 81 aa, Arabidopsis thaliana; identical to SEQ ID NO: 29393
  peptide (1)..(81): Ceres Seq. ID no. 12384621
  misc_feature (1)..(76): Pfam Name: alpha/beta hydrolase fold Pfam Description: alpha/beta hydrolase fold
  misc_feature (1)..(77): Homolog of NCBI NO: 15228496 NR Description: hypothetical protein; protein id: At3g03230.1
  misc_feature (1)..(79): Homolog of NCBI NO: 21592662 NR Description: unknown [Arabidopsis thaliana]
  misc_feature (1)..(79): Homolog of NCBI NO: 18410582 NR Description: expressed protein
  misc_feature (1)..(81): Homolog of NCBI NO: 18410575 NR Description: expressed protein
  misc_feature (1)..(81): Homolog of NCBI NO: 28416665 NR Description: At2g36290 [Arabidopsis thaliana]
  misc_feature (1)..(77): Homolog of NCBI NO: 6714434 NR Description: hypothetical protein [Arabidopsis thaliana]
  misc_feature (1)..(81): Homolog of NCBI NO: 18404095 NR Description: expressed protein
  misc_feature (1)..(81): Homolog of NCBI NO: 21537089 NR Description: unknown [Arabidopsis thaliana]
  misc_feature (1)..(77): Homolog of NCBI NO: 30678800 NR Description: esterase/lipase/thioesterase family [Arabidopsis
  misc_feature (1)..(81): Homolog of NCBI NO: 15242253 NR Description: putative protein

SEQ ID NO: 32984 - DNA, 1416 bp, Arabidopsis thaliana; identical to SEQ ID NO: 28614
  misc_feature (1)..(1416): Ceres Seq. ID no. 13487514
  misc_feature: MA Experiment ID: 108461 Result: Up-regulated in Transcription
  misc_feature: MA Experiment 108461 PARAMETER Experiment Name: At_Germinating_Seeds_cDNA_P Parameter: Age (day) Value: 1 vs. 0
  misc_feature: MA Experiment 108461 PARAMETER Experiment Name: At_Germinating_Seeds_cDNA_P Parameter: Tissue Value: Germinating Seeds
  misc_feature: MA Experiment ID: 108462 Result: Up-regulated in Transcription
  misc_feature: MA Experiment 108462 PARAMETER Experiment Name: At_Germinating_Seeds_cDNA_P Parameter: Age (day) Value: 2 vs. 0
  misc_feature: MA Experiment 108462 PARAMETER Experiment Name: At_Germinating_Seeds_cDNA_P Parameter: Tissue Value: Germinating Seeds
  misc_feature: MA Experiment ID: 108577 Result: Down-regulated in Transcription
  misc_feature: MA Experiment 108577 PARAMETER Experiment Name: At_42deg_Heat_cDNA_P Parameter: Temperature (deg C) Value: 42 vs. 22
  misc_feature: MA Experiment 108577 PARAMETER Experiment Name: At_42deg_Heat_cDNA_P Parameter: Timepoint (hr) Value: 6
  misc_feature: MA Experiment 108577 PARAMETER Experiment Name: At_42deg_Heat_cDNA_P Parameter: Tissue Value: Aerial
  misc_feature: MA Experiment ID: 108585 Result: Up-regulated in Transcription
  misc_feature: MA Experiment 108585 PARAMETER Experiment Name: At_5mM_NaNP_cDNA_P Parameter: Timepoint (hr) Value: 6
  misc_feature: MA Experiment 108585 PARAMETER Experiment Name: At_5mM_NaNP_cDNA_P Parameter: Tissue Value: Aerial
  misc_feature: MA Experiment 108585 PARAMETER Experiment Name: At_5mM_NaNP_cDNA_P Parameter: Treatment Value: null
  misc_feature: MA Experiment ID: 20000087 Result: Up-regulated in Transcription
  misc_feature: MA Experiment 20000087 PARAMETER Experiment Name: At_100uM_ABA_Mutants_cDNA_P Parameter: Plant Line Value: WS
  misc_feature: MA Experiment 20000087 PARAMETER Experiment Name: At_100uM_ABA_Mutants_cDNA_P Parameter: Timepoint (hr) Value: 6
  misc_feature: MA Experiment 20000087 PARAMETER Experiment Name: At_100uM_ABA_Mutants_cDNA_P Parameter: Tissue Value: Aerial
  misc_feature: MA Experiment 20000087 PARAMETER Experiment Name: At_100uM_ABA_Mutants_cDNA_P Parameter: Treatment Value: 100uM ABA vs. No Treatment
  misc_feature: MA Experiment ID: 20000093 Result: Down-regulated in Transcription
  misc_feature: MA Experiment 20000093 PARAMETER Experiment Name: At_42deg_Heat_cDNA_P Parameter: Temperature (deg C) Value: 42 vs. 22
  misc_feature: MA Experiment 20000093 PARAMETER Experiment Name: At_42deg_Heat_cDNA_P Parameter: Timepoint (hr) Value: 0.5
  misc_feature: MA Experiment 20000093 PARAMETER Experiment Name: At_42deg_Heat_cDNA_P Parameter: Tissue Value: Aerial
  misc_feature: MA Experiment ID: 20000111 Result: Down-regulated in Transcription
  misc_feature: MA Experiment 20000111 PARAMETER Experiment Name: At_42deg_Heat_cDNA_P Parameter: Temperature (deg C) Value: 42 vs. 22
  misc_feature: MA Experiment 20000111 PARAMETER Experiment Name: At_42deg_Heat_cDNA_P Parameter: Timepoint (hr) Value: 6
  misc_feature: MA Experiment 20000111 PARAMETER Experiment Name: At_42deg_Heat_cDNA_P Parameter: Tissue Value: Aerial
  misc_feature: MA Experiment ID: 20000112 Result: Down-regulated in Transcription
  misc_feature: MA Experiment 20000112 PARAMETER Experiment Name: At_42deg_Heat_cDNA_P Parameter: Temperature (deg C) Value: 42 vs. 22
  misc_feature: MA Experiment 20000112 PARAMETER Experiment Name: At_42deg_Heat_cDNA_P Parameter: Timepoint (hr) Value: 2
  misc_feature: MA Experiment 20000112 PARAMETER Experiment Name: At_42deg_Heat_cDNA_P Parameter: Tissue Value: Aerial
  misc_feature: MA Experiment ID: 20000113 Result: Down-regulated in Transcription
  misc_feature: MA Experiment 20000113 PARAMETER Experiment Name: At_42deg_Heat_cDNA_P Parameter: Temperature (deg C) Value: 42 vs. 22
  misc_feature: MA Experiment 20000113 PARAMETER Experiment Name: At_42deg_Heat_cDNA_P Parameter: Timepoint (hr) Value: 8
  misc_feature: MA Experiment 20000113 PARAMETER Experiment Name: At_42deg_Heat_cDNA_P Parameter: Tissue Value: Aerial
  misc_feature: MA Experiment ID: 20000144 Result: Down-regulated in Transcription
  misc_feature: MA Experiment 20000144 PARAMETER Experiment Name: At_42deg_Heat_cDNA_P Parameter: Temperature (deg C) Value: 42 vs. 22
  misc_feature: MA Experiment 20000144 PARAMETER Experiment Name: At_42deg_Heat_cDNA_P Parameter: Timepoint (hr) Value: 1
  misc_feature: MA Experiment 20000144 PARAMETER Experiment Name: At_42deg_Heat_cDNA_P Parameter: Tissue Value: Aerial
  misc_feature: MA Experiment ID: 20000171 Result: Down-regulated in Transcription
  misc_feature: MA Experiment 20000171 PARAMETER Experiment Name: At_42deg_Heat_P Parameter: Age (day) Value: 14
  misc_feature: MA Experiment 20000171 PARAMETER Experiment Name: At_42deg_Heat_P Parameter: Organism Value: A. thaliana
  misc_feature: MA Experiment 20000171 PARAMETER Experiment Name: At_42deg_Heat_P Parameter: Plant Line Value: WS
  misc_feature: MA Experiment 20000171 PARAMETER Experiment Name: At_42deg_Heat_P Parameter: Temperature (deg C) Value: 42 vs. 22
  misc_feature: MA Experiment 20000171 PARAMETER Experiment Name: At_42deg_Heat_P Parameter: Timepoint (hr) Value: 1
  misc_feature: MA Experiment 20000171 PARAMETER Experiment Name: At_42deg_Heat_P Parameter: Tissue Value: Aerial
  misc_feature: MA Experiment ID: 20000173 Result: Down-regulated in Transcription
  misc_feature: MA Experiment 20000173 PARAMETER Experiment Name: At_42deg_Heat_P Parameter: Age (day) Value: 14
  misc_feature: MA Experiment 20000173 PARAMETER Experiment Name: At_42deg_Heat_P Parameter: Organism Value: A. thaliana
  misc_feature: MA Experiment 20000173 PARAMETER Experiment Name: At_42deg_Heat_P Parameter: Plant Line Value: WS
  misc_feature: MA Experiment 20000173 PARAMETER Experiment Name: At_42deg_Heat_P Parameter: Temperature (deg C) Value: 42 vs. 22
  misc_feature: MA Experiment 20000173 PARAMETER Experiment Name: At_42deg_Heat_P Parameter: Timepoint (hr) Value: 6
  misc_feature: MA Experiment 20000173 PARAMETER Experiment Name: At_42deg_Heat_P Parameter: Tissue Value: Aerial
  misc_feature: MA Experiment ID: 20000179 Result: Up-regulated in Transcription
  misc_feature: MA Experiment 20000179 PARAMETER Experiment Name: At_Germinating_Seeds_P Parameter: Age (hr) Value: 6 vs. 0
  misc_feature: MA Experiment 20000179 PARAMETER Experiment Name: At_Germinating_Seeds_P Parameter: Tissue Value: Germinating Seeds
  misc_feature: MA Experiment ID: 20000180 Result: Up-regulated in Transcription
  misc_feature: MA Experiment 20000180 PARAMETER Experiment Name: At_Germinating_Seeds_P Parameter: Age (hr) Value: 24 vs. 0
  misc_feature: MA Experiment 20000180 PARAMETER Experiment Name: At_Germinating_Seeds_P Parameter: Tissue Value: Germinating Seeds
  misc_feature: MA Experiment ID: 20001557 Result: Up-regulated in Transcription
  misc_feature: MA Experiment 20001557 PARAMETER Experiment Name: At_Drought_Soil_Dry_P Parameter: Age (day) Value: 27
  misc_feature: MA Experiment 20001557 PARAMETER Experiment Name: At_Drought_Soil_Dry_P Parameter: Organism Value: A. thaliana
  misc_feature: MA Experiment 20001557 PARAMETER Experiment Name: At_Drought_Soil_Dry_P Parameter: Plant Line Value: WS
  misc_feature: MA Experiment 20001557 PARAMETER Experiment Name: At_Drought_Soil_Dry_P Parameter: Post Timepoint (hr) Value: 3
  misc_feature: MA Experiment 20001557 PARAMETER Experiment Name: At_Drought_Soil_Dry_P Parameter: Post-Treatment Value: Re-Water vs. No Drought
  misc_feature: MA Experiment 20001557 PARAMETER Experiment Name: At_Drought_Soil_Dry_P Parameter: Timepoint (day) Value: 13
  misc_feature: MA Experiment 20001557 PARAMETER Experiment Name: At_Drought_Soil_Dry_P Parameter: Treatment Value: Drought vs. No Drought

SEQ ID NO: 32985 - protein, 373 aa, Arabidopsis thaliana; identical to SEQ ID NO: 28615
  peptide (1)..(373): Ceres Seq. ID no. 13487515
  misc_feature (31)..(355): Pfam Name: NAD dependent epimerase/dehydratase family Pfam Description: NAD dependent epimerase/dehydratase family
  misc_feature (31)..(355): Pfam Name: NAD dependent epimerase/dehydratase family Pfam Description: NAD dependent epimerase/dehydratase family
  misc_feature (28)..(353): Homolog of NCBI NO: 23128163 NR Description: hypothetical protein [Nostoc punctiforme]
  misc_feature (29)..(352): Homolog of NCBI NO: 16329177 NR Description: GDP-D-mannose dehydratase [Synechocystis sp. PCC
  misc_feature (29)..(353): Homolog of NCBI NO: 4097914 NR Description: putative GDP-D-mannose dehydratase [Anabaena sp.
  misc_feature (28)..(352): Homolog of NCBI NO: 22298176 NR Description: GDP-mannose 4,6-dehydratase [Thermosynechococcus
  misc_feature (7)..(373): Homolog of NCBI NO: 7939611 NR Description: root cap-specific protein [Zea mays]
  misc_feature (28)..(353): Homolog of NCBI NO: 23128163 NR Description: hypothetical protein [Nostoc punctiforme]
  misc_feature (29)..(353): Homolog of NCBI NO: 4097914 NR Description: putative GDP-D-mannose dehydratase [Anabaena sp.
  misc_feature (7)..(373): Homolog of NCBI NO: 7939611 NR Description: root cap-specific protein [Zea mays]
  misc_feature (1)..(373): Homolog of NCBI NO: 21536808 NR Description: GDP-D-mannose-4,6-dehydratase MUR1 [Arabidopsis
  misc_feature (1)..(373): Homolog of NCBI NO: 1764100 NR Description: GDP-D-mannose-4,6-dehydratase [Arabidopsis
  misc_feature (1)..(373): Homolog of NCBI NO: 28373938 NR Description: Chain A, Crystal Structure Of The Gdp-Mannose
  misc_feature (1)..(373): Homolog of NCBI NO: 15230418 NR Description: GDP-D-mannose-4,6-dehydratase (MUR1) [Arabidopsis
  misc_feature (21)..(373): Homolog of NCBI NO: 15239334 NR Description: GDP-D-mannose 4,6-dehydratase, putative
  misc_feature (28)..(352): Homolog of NCBI NO: 22298176 NR Description: GDP-mannose 4,6-dehydratase [Thermosynechococcus
  misc_feature (29)..(352): Homolog of NCBI NO: 16329177 NR Description: GDP-D-mannose dehydratase [Synechocystis sp. PCC
  misc_feature (21)..(373): Homolog of NCBI NO: 15239334 NR Description: GDP-D-mannose 4,6-dehydratase, putative
  misc_feature (1)..(373): Homolog of NCBI NO: 15230418 NR Description: GDP-D-mannose-4,6-dehydratase (MUR1) [Arabidopsis
  misc_feature (1)..(373): Homolog of NCBI NO: 28373938 NR Description: Chain A, Crystal Structure Of The Gdp-Mannose
  misc_feature (1)..(373): Homolog of NCBI NO: 1764100 NR Description: GDP-D-mannose-4,6-dehydratase [Arabidopsis
  misc_feature (1)..(373): Homolog of NCBI NO: 21536808 NR Description: GDP-D-mannose-4,6-dehydratase MUR1 [Arabidopsis

SEQ ID NO: 32986 - protein, 289 aa, Arabidopsis thaliana; identical to SEQ ID NO: 28616
  peptide (1)..(289): Ceres Seq. ID no. 13487516
  misc_feature (1)..(271): Pfam Name: NAD dependent epimerase/dehydratase family Pfam Description: NAD dependent epimerase/dehydratase family
  misc_feature (1)..(271): Pfam Name: NAD dependent epimerase/dehydratase family Pfam Description: NAD dependent epimerase/dehydratase family
  misc_feature (1)..(269): Homolog of NCBI NO: 23128163 NR Description: hypothetical protein [Nostoc punctiforme]
  misc_feature (1)..(268): Homolog of NCBI NO: 16329177 NR Description: GDP-D-mannose dehydratase [Synechocystis sp. PCC
  misc_feature (1)..(269): Homolog of NCBI NO: 4097914 NR Description: putative GDP-D-mannose dehydratase [Anabaena sp.
  misc_feature (1)..(268): Homolog of NCBI NO: 22298176 NR Description: GDP-mannose 4,6-dehydratase [Thermosynechococcus
  misc_feature (1)..(289): Homolog of NCBI NO: 7939611 NR Description: root cap-specific protein [Zea mays]
  misc_feature (1)..(269): Homolog of NCBI NO: 23128163 NR Description: hypothetical protein [Nostoc punctiforme]
  misc_feature (1)..(269): Homolog of NCBI NO: 4097914 NR Description: putative GDP-D-mannose dehydratase [Anabaena sp.
  misc_feature (1)..(289): Homolog of NCBI NO: 7939611 NR Description: root cap-specific protein [Zea mays]
  misc_feature (1)..(289): Homolog of NCBI NO: 21536808 NR Description: GDP-D-mannose-4,6-dehydratase MUR1 [Arabidopsis
  misc_feature (1)..(289): Homolog of NCBI NO: 1764100 NR Description: GDP-D-mannose-4,6-dehydratase [Arabidopsis
  misc_feature (1)..(289): Homolog of NCBI NO: 28373938 NR Description: Chain A, Crystal Structure Of The Gdp-Mannose
  misc_feature (1)..(289): Homolog of NCBI NO: 15230418 NR Description: GDP-D-mannose-4,6-dehydratase (MUR1) [Arabidopsis
  misc_feature (1)..(289): Homolog of NCBI NO: 15239334 NR Description: GDP-D-mannose 4,6-dehydratase, putative
  misc_feature (1)..(268): Homolog of NCBI NO: 22298176 NR Description: GDP-mannose 4,6-dehydratase [Thermosynechococcus
  misc_feature (1)..(268): Homolog of NCBI NO: 16329177 NR Description: GDP-D-mannose dehydratase [Synechocystis sp. PCC
  misc_feature (1)..(289): Homolog of NCBI NO: 15239334 NR Description: GDP-D-mannose 4,6-dehydratase, putative
  misc_feature (1)..(289): Homolog of NCBI NO: 15230418 NR Description: GDP-D-mannose-4,6-dehydratase (MUR1) [Arabidopsis
  misc_feature (1)..(289): Homolog of NCBI NO: 28373938 NR Description: Chain A, Crystal Structure Of The Gdp-Mannose
  misc_feature (1)..(289): Homolog of NCBI NO: 1764100 NR Description: GDP-D-mannose-4,6-dehydratase [Arabidopsis
  misc_feature (1)..(289): Homolog of NCBI NO: 21536808 NR Description: GDP-D-mannose-4,6-dehydratase MUR1 [Arabidopsis

SEQ ID NO: 32987 - protein, 209 aa, Arabidopsis thaliana; identical to SEQ ID NO: 28617
  peptide (1)..(209): Ceres Seq. ID no. 13487517
  misc_feature (1)..(191): Pfam Name: NAD dependent epimerase/dehydratase family Pfam Description: NAD dependent epimerase/dehydratase family
  misc_feature (1)..(191): Pfam Name: NAD dependent epimerase/dehydratase family Pfam Description: NAD dependent epimerase/dehydratase family
  misc_feature (1)..(189): Homolog of NCBI NO: 23128163 NR Description: hypothetical protein [Nostoc punctiforme]
  misc_feature (1)..(188): Homolog of NCBI NO: 16329177 NR Description: GDP-D-mannose dehydratase [Synechocystis sp. PCC
  misc_feature (1)..(189): Homolog of NCBI NO: 4097914 NR Description: putative GDP-D-mannose dehydratase [Anabaena sp.
  misc_feature (1)..(188): Homolog of NCBI NO: 22298176 NR Description: GDP-mannose 4,6-dehydratase [Thermosynechococcus
  misc_feature (1)..(209): Homolog of NCBI NO: 7939611 NR Description: root cap-specific protein [Zea mays]
  misc_feature (1)..(189): Homolog of NCBI NO: 23128163 NR Description: hypothetical protein [Nostoc punctiforme]
  misc_feature (1)..(189): Homolog of NCBI NO: 4097914 NR Description: putative GDP-D-mannose dehydratase [Anabaena sp.
  misc_feature (1)..(209): Homolog of NCBI NO: 7939611 NR Description: root cap-specific protein [Zea mays]
  misc_feature (1)..(209): Homolog of NCBI NO: 21536808 NR Description: GDP-D-mannose-4,6-dehydratase MUR1 [Arabidopsis
  misc_feature (1)..(209): Homolog of NCBI NO: 1764100 NR Description: GDP-D-mannose-4,6-dehydratase [Arabidopsis
  misc_feature (1)..(209): Homolog of NCBI NO: 28373938 NR Description: Chain A, Crystal Structure Of The Gdp-Mannose
  misc_feature (1)..(209): Homolog of NCBI NO: 15230418 NR Description: GDP-D-mannose-4,6-dehydratase (MUR1) [Arabidopsis
  misc_feature (1)..(209): Homolog of NCBI NO: 15239334 NR Description: GDP-D-mannose 4,6-dehydratase, putative
  misc_feature (1)..(188): Homolog of NCBI NO: 22298176 NR Description: GDP-mannose 4,6-dehydratase [Thermosynechococcus
  misc_feature (1)..(188): Homolog of NCBI NO: 16329177 NR Description: GDP-D-mannose dehydratase [Synechocystis sp. PCC
  misc_feature (1)..(209): Homolog of NCBI NO: 15239334 NR Description: GDP-D-mannose 4,6-dehydratase, putative
  misc_feature (1)..(209): Homolog of NCBI NO: 15230418 NR Description: GDP-D-mannose-4,6-dehydratase (MUR1) [Arabidopsis
  misc_feature (1)..(209): Homolog of NCBI NO: 28373938 NR Description: Chain A, Crystal Structure Of The Gdp-Mannose
  misc_feature (1)..(209): Homolog of NCBI NO: 1764100 NR Description: GDP-D-mannose-4,6-dehydratase [Arabidopsis
  misc_feature (1)..(209): Homolog of NCBI NO: 21536808 NR Description: GDP-D-mannose-4,6-dehydratase MUR1 [Arabidopsis

SEQ ID NO: 32988 - DNA, 965 bp, Arabidopsis thaliana; identical to SEQ ID NO: 29398
  misc_feature (1)..(965): Ceres Seq. ID no. 12782031
  misc_feature: MA Experiment ID: 108435 Result: Down-regulated in Transcription
  misc_feature: MA Experiment 108435 PARAMETER Experiment Name: At_stm_Mutants_cDNA_P Parameter: Plant Line Value: wt Landsburg vs stm
  misc_feature: MA Experiment 108435 PARAMETER Experiment Name: At_stm_Mutants_cDNA_P Parameter: Tissue Value: Shoot Apical Meristem Region
  misc_feature: MA Experiment ID: 108463 Result: Up-regulated in Transcription
  misc_feature: MA Experiment 108463 PARAMETER Experiment Name: At_Germinating_Seeds_cDNA_P Parameter: Age (day) Value: 3 vs. 0
  misc_feature: MA Experiment 108463 PARAMETER Experiment Name: At_Germinating_Seeds_cDNA_P Parameter: Tissue Value: Germinating Seeds
  misc_feature: MA Experiment ID: 108464 Result: Up-regulated in Transcription
  misc_feature: MA Experiment 108464 PARAMETER Experiment Name: At_Germinating_Seeds_cDNA_P Parameter: Age (day) Value: 4 vs. 0
  misc_feature: MA Experiment 108464 PARAMETER Experiment Name: At_Germinating_Seeds_cDNA_P Parameter: Tissue Value: Germinating Seeds
  misc_feature: MA Experiment ID: 108488 Result: Up-regulated in Transcription
  misc_feature: MA Experiment ID: 108577 Result: Up-regulated in Transcription
  misc_feature: MA Experiment 108577 PARAMETER Experiment Name: At_42deg_Heat_cDNA_P Parameter: Temperature (deg C) Value: 42 vs. 22
  misc_feature: MA Experiment 108577 PARAMETER Experiment Name: At_42deg_Heat_cDNA_P Parameter: Timepoint (hr) Value: 6
  misc_feature: MA Experiment 108577 PARAMETER Experiment Name: At_42deg_Heat_cDNA_P Parameter: Tissue Value: Aerial
  misc_feature: MA Experiment ID: 108594 Result: Down-regulated in Transcription
  misc_feature: MA Experiment 108594 PARAMETER Experiment Name: At_Ler-rhl_Root_cDNA_P Parameter: Plant Line Value: null
  misc_feature: MA Experiment ID: 108595 Result: Down-regulated in Transcription
  misc_feature: MA Experiment 108595 PARAMETER Experiment Name: At_Ler-pi_Ovule_cDNA_P Parameter: Plant Line Value: null
  misc_feature: MA Experiment ID: 20000086 Result: Down-regulated in Transcription
  misc_feature: MA Experiment 20000086 PARAMETER Experiment Name: At_100uM_ABA_Mutants_cDNA_P Parameter: Plant Line Value: CS22
  misc_feature: MA Experiment 20000086 PARAMETER Experiment Name: At_100uM_ABA_Mutants_cDNA_P Parameter: Timepoint (hr) Value: 6
  misc_feature: MA Experiment 20000086 PARAMETER Experiment Name: At_100uM_ABA_Mutants_cDNA_P Parameter: Tissue Value: Aerial
  misc_feature: MA Experiment 20000086 PARAMETER Experiment Name: At_100uM_ABA_Mutants_cDNA_P Parameter: Treatment Value: 100uM ABA vs. No Treatment
  misc_feature: MA Experiment ID: 20000087 Result: Down-regulated in Transcription
  misc_feature: MA Experiment 20000087 PARAMETER Experiment Name: At_100uM_ABA_Mutants_cDNA_P Parameter: Plant Line Value: WS
  misc_feature: MA Experiment 20000087 PARAMETER Experiment Name: At_100uM_ABA_Mutants_cDNA_P Parameter: Timepoint (hr) Value: 6
  misc_feature: MA Experiment 20000087 PARAMETER Experiment Name: At_100uM_ABA_Mutants_cDNA_P Parameter: Tissue Value: Aerial
  misc_feature: MA Experiment 20000087 PARAMETER Experiment Name: At_100uM_ABA_Mutants_cDNA_P Parameter: Treatment Value: 100uM ABA vs. No Treatment
  misc_feature: MA Experiment ID: 20000090 Result: Down-regulated in Transcription
  misc_feature: MA Experiment ID: 20000185 Result: Down-regulated in Transcription
  misc_feature: MA Experiment 20000185 PARAMETER Experiment Name: At_Roots__P Parameter: Age (day) Value: 7 vs. 21
  misc_feature: MA Experiment 20000185 PARAMETER Experiment Name: At_Roots__P Parameter: Organism Value: A. thaliana
  misc_feature: MA Experiment 20000185 PARAMETER Experiment Name: At_Roots__P Parameter: Tissue Value: Roots vs. Whole Plant
  misc_feature: MA Experiment ID: 20000227 Result: Down-regulated in Transcription
  misc_feature: MA Experiment 20000227 PARAMETER Experiment Name: At_Root-Tips-vs-Tops_P Parameter: Tissue Value: Root Tips vs. Root Tops
  misc_feature: MA Experiment ID: 20000234 Result: Down-regulated in Transcription
  misc_feature: MA Experiment 20000234 PARAMETER Experiment Name: At_Siliques_P Parameter: Age (day) Value: 21
  misc_feature: MA Experiment 20000234 PARAMETER Experiment Name: At_Siliques_P Parameter: Organism Value: A. thaliana
  misc_feature: MA Experiment 20000234 PARAMETER Experiment Name: At_Siliques_P Parameter: Plant Line Value: WS
  misc_feature: MA Experiment 20000234 PARAMETER Experiment Name: At_Siliques_P Parameter: Tissue Value: Less Than 5mm Siliques vs. Whole Plant
  misc_feature: MA Experiment ID: 20000235 Result: Down-regulated in Transcription
  misc_feature: MA Experiment 20000235 PARAMETER Experiment Name: At_Siliques_P Parameter: Age (day) Value: 21
  misc_feature: MA Experiment 20000235 PARAMETER Experiment Name: At_Siliques_P Parameter: Organism Value: A. thaliana
  misc_feature: MA Experiment 20000235 PARAMETER Experiment Name: At_Siliques_P Parameter: Plant Line Value: WS
  misc_feature: MA Experiment 20000235 PARAMETER Experiment Name: At_Siliques_P Parameter: Tissue Value: 5-10mm Siliques vs. Whole Plant
  misc_feature: MA Experiment ID: 20000286 Result: Down-regulated in Transcription
  misc_feature: MA Experiment 20000286 PARAMETER Experiment Name: At_Open_Flower_P Parameter: Age (day) Value: 21
  misc_feature: MA Experiment 20000286 PARAMETER Experiment Name: At_Open_Flower_P Parameter: Plant Line Value: WS
  misc_feature: MA Experiment 20000286 PARAMETER Experiment Name: At_Open_Flower_P Parameter: Tissue Value: Half Open vs. Whole Plant
  misc_feature: MA Experiment ID: 20000308 Result: Down-regulated in Transcription
  misc_feature: MA Experiment 20000308 PARAMETER Experiment Name: At_100mM_NaCl__P Parameter: Age (day) Value: 17
  misc_feature: MA Experiment 20000308 PARAMETER Experiment Name: At_100mM_NaCl__P Parameter: Organism Value: A. thaliana
  misc_feature: MA Experiment 20000308 PARAMETER Experiment Name: At_100mM_NaCl__P Parameter: Plant Line Value: WS
  misc_feature: MA Experiment 20000308 PARAMETER Experiment Name: At_100mM_NaCl__P Parameter: Timepoint (hr) Value: 72
  misc_feature: MA Experiment 20000308 PARAMETER Experiment Name: At_100mM_NaCl__P Parameter: Tissue Value: Whole Plant
  misc_feature: MA Experiment 20000308 PARAMETER Experiment Name: At_100mM_NaCl__P Parameter: Treatment Value: 100mM NaCl vs. No Treatment
  misc_feature: MA Experiment ID: 20000438 Result: Up-regulated in Transcription
  misc_feature: MA Experiment 20000438 PARAMETER Experiment Name: At_Shoots__P Parameter: Age (day) Value: 14
  misc_feature: MA Experiment 20000438 PARAMETER Experiment Name: At_Shoots__P Parameter: Tissue Value: Shoots vs. Whole Plant
  misc_feature: MA Experiment ID: 20000439 Result: Down-regulated in Transcription
  misc_feature: MA Experiment 20000439 PARAMETER Experiment Name: At_Roots__P Parameter: Age (day) Value: 14 vs. 21
  misc_feature: MA Experiment 20000439 PARAMETER Experiment Name: At_Roots__P Parameter: Organism Value: A. thaliana
  misc_feature: MA Experiment 20000439 PARAMETER Experiment Name: At_Roots__P Parameter: Tissue Value: Roots vs. Whole Plant
  misc_feature: MA Experiment ID: 20000527 Result: Up-regulated in Transcription
  misc_feature: MA Experiment 20000527 PARAMETER Experiment Name: At_10percent_PEG_P Parameter: Age (day) Value: 20
  misc_feature: MA Experiment 20000527 PARAMETER Experiment Name: At_10percent_PEG_P Parameter: Organism Value: A. thaliana
  misc_feature: MA Experiment 20000527 PARAMETER Experiment Name: At_10percent_PEG_P Parameter: Plant Line Value: WS
  misc_feature: MA Experiment 20000527 PARAMETER Experiment Name: At_10percent_PEG_P Parameter: Timepoint (day) Value: 20
  misc_feature: MA Experiment 20000527 PARAMETER Experiment Name: At_10percent_PEG_P Parameter: Tissue Value: Whole Plant
  misc_feature: MA Experiment 20000527 PARAMETER Experiment Name: At_10percent_PEG_P Parameter: Treatment Value: 10percent PEG vs. No Treatment
  misc_feature: MA Experiment ID: 20001247 Result: Up-regulated in Transcription
  misc_feature: MA Experiment 20001247 PARAMETER Experiment Name: At_Far-red-induction_P Parameter: Age (day) Value: 7
  misc_feature: MA Experiment 20001247 PARAMETER Experiment Name: At_Far-red-induction_P Parameter: Light Value: Far-red vs. White
  misc_feature: MA Experiment 20001247 PARAMETER Experiment Name: At_Far-red-induction_P Parameter: Organism Value: A. thaliana
  misc_feature: MA Experiment 20001247 PARAMETER Experiment Name: At_Far-red-induction_P Parameter: Plant Line Value: Columbia
  misc_feature: MA Experiment 20001247 PARAMETER Experiment Name: At_Far-red-induction_P Parameter: Timepoint (hr) Value: 1
  misc_feature: MA Experiment 20001247 PARAMETER Experiment Name: At_Far-red-induction_P Parameter: Tissue Value: Whole Plant
  misc_feature: MA Experiment ID: 20001248 Result: Down-regulated in Transcription
  misc_feature: MA Experiment 20001248 PARAMETER Experiment Name: At_Far-red-induction_P Parameter: Age (day) Value: 7
  misc_feature: MA Experiment 20001248 PARAMETER Experiment Name: At_Far-red-induction_P Parameter: Light Value: Far-red vs. White
  misc_feature: MA Experiment 20001248 PARAMETER Experiment Name: At_Far-red-induction_P Parameter: Organism Value: A. thaliana
  misc_feature: MA Experiment 20001248 PARAMETER Experiment Name: At_Far-red-induction_P Parameter: Plant Line Value: Columbia
  misc_feature: MA Experiment 20001248 PARAMETER Experiment Name: At_Far-red-induction_P Parameter: Timepoint (hr) Value: 4
  misc_feature: MA Experiment 20001248 PARAMETER Experiment Name: At_Far-red-induction_P Parameter: Tissue Value: Whole Plant
  misc_feature: MA Experiment ID: 20001556 Result: Down-regulated in Transcription
  misc_feature: MA Experiment 20001556 PARAMETER Experiment Name: At_Drought_Soil_Dry_P Parameter: Age (day) Value: 26
  misc_feature: MA Experiment 20001556 PARAMETER Experiment Name: At_Drought_Soil_Dry_P Parameter: Organism Value: A. thaliana
  misc_feature: MA Experiment 20001556 PARAMETER Experiment Name: At_Drought_Soil_Dry_P Parameter: Plant Line Value: WS
  misc_feature: MA Experiment 20001556 PARAMETER Experiment Name: At_Drought_Soil_Dry_P Parameter: Post Timepoint (hr) Value: None
  misc_feature: MA Experiment 20001556 PARAMETER Experiment Name: At_Drought_Soil_Dry_P Parameter: Post-Treatment Value: None
  misc_feature: MA Experiment 20001556 PARAMETER Experiment Name: At_Drought_Soil_Dry_P Parameter: Timepoint (day) Value: 12
  misc_feature: MA Experiment 20001556 PARAMETER Experiment Name: At_Drought_Soil_Dry_P Parameter: Treatment Value: Drought vs. No Drought
  misc_feature: MA Experiment ID: 20001557 Result: Down-regulated in Transcription
  misc_feature: MA Experiment 20001557 PARAMETER Experiment Name: At_Drought_Soil_Dry_P Parameter: Age (day) Value: 27
  misc_feature: MA Experiment 20001557 PARAMETER Experiment Name: At_Drought_Soil_Dry_P Parameter: Organism Value: A. thaliana
  misc_feature: MA Experiment 20001557 PARAMETER Experiment Name: At_Drought_Soil_Dry_P Parameter: Plant Line Value: WS
  misc_feature: MA Experiment 20001557 PARAMETER Experiment Name: At_Drought_Soil_Dry_P Parameter: Post Timepoint (hr) Value: 3
  misc_feature: MA Experiment 20001557 PARAMETER Experiment Name: At_Drought_Soil_Dry_P Parameter: Post-Treatment Value: Re-Water vs. No Drought
  misc_feature: MA Experiment 20001557 PARAMETER Experiment Name: At_Drought_Soil_Dry_P Parameter: Timepoint (day) Value: 13
  misc_feature: MA Experiment 20001557 PARAMETER Experiment Name: At_Drought_Soil_Dry_P Parameter: Treatment Value: Drought vs. No Drought
  misc_feature: MA Experiment ID: 20001558 Result: Down-regulated in Transcription
  misc_feature: MA Experiment 20001558 PARAMETER Experiment Name: At_Drought_Soil_Dry_P Parameter: Age (day) Value: 27
  misc_feature: MA Experiment 20001558 PARAMETER Experiment Name: At_Drought_Soil_Dry_P Parameter: Organism Value: A. thaliana
  misc_feature: MA Experiment 20001558 PARAMETER Experiment Name: At_Drought_Soil_Dry_P Parameter: Plant Line Value: WS
  misc_feature: MA Experiment 20001558 PARAMETER Experiment Name: At_Drought_Soil_Dry_P Parameter: Post Timepoint (hr) Value: 6
  misc_feature: MA Experiment 20001558 PARAMETER Experiment Name: At_Drought_Soil_Dry_P Parameter: Post-Treatment Value: Re-Water vs. No Drought
  misc_feature: MA Experiment 20001558 PARAMETER Experiment Name: At_Drought_Soil_Dry_P Parameter: Timepoint (day) Value: 13
  misc_feature: MA Experiment 20001558 PARAMETER Experiment Name: At_Drought_Soil_Dry_P Parameter: Treatment Value: Drought vs. No Drought
  misc_feature: MA Experiment ID: 20001559 Result: Down-regulated in Transcription
  misc_feature: MA Experiment 20001559 PARAMETER Experiment Name: At_Drought_Soil_Dry_P Parameter: Age (day) Value: 28
  misc_feature: MA Experiment 20001559 PARAMETER Experiment Name: At_Drought_Soil_Dry_P Parameter: Organism Value: A. thaliana
  misc_feature: MA Experiment 20001559 PARAMETER Experiment Name: At_Drought_Soil_Dry_P Parameter: Plant Line Value: WS
  misc_feature: MA Experiment 20001559 PARAMETER Experiment Name: At_Drought_Soil_Dry_P Parameter: Post Timepoint (hr) Value: 29
  misc_feature: MA Experiment 20001559 PARAMETER Experiment Name: At_Drought_Soil_Dry_P Parameter: Post-Treatment Value: Re-Water vs. No Drought
  misc_feature: MA Experiment 20001559 PARAMETER Experiment Name: At_Drought_Soil_Dry_P Parameter: Timepoint (day) Value: 14
  misc_feature: MA Experiment 20001559 PARAMETER Experiment Name: At_Drought_Soil_Dry_P Parameter: Treatment Value: Drought vs. No Drought
  misc_feature: MA Experiment ID: 20001560 Result: Down-regulated in Transcription
  misc_feature: MA Experiment 20001560 PARAMETER Experiment Name: At_Drought_Soil_Dry_P Parameter: Age (day) Value: 28
  misc_feature: MA Experiment 20001560 PARAMETER Experiment Name: At_Drought_Soil_Dry_P Parameter: Organism Value: A. thaliana
  misc_feature: MA Experiment 20001560 PARAMETER Experiment Name: At_Drought_Soil_Dry_P Parameter: Plant Line Value: WS
  misc_feature: MA Experiment 20001560 PARAMETER Experiment Name: At_Drought_Soil_Dry_P Parameter: Post Timepoint (hr) Value: None
  misc_feature: MA Experiment 20001560 PARAMETER Experiment Name: At_Drought_Soil_Dry_P Parameter: Post-Treatment Value: None
  misc_feature: MA Experiment 20001560 PARAMETER Experiment Name: At_Drought_Soil_Dry_P Parameter: Timepoint (day) Value: 14
  misc_feature: MA Experiment 20001560 PARAMETER Experiment Name: At_Drought_Soil_Dry_P Parameter: Treatment Value: Drought vs. No Drought
  misc_feature: MA Experiment ID: 20001757 Result: Up-regulated in Transcription
  misc_feature: MA Experiment 20001757 PARAMETER Experiment Name: At_50mM_NH4NO3_L-to-H_P Parameter: Timepoint (hr) Value: 6
  misc_feature: MA Experiment 20001757 PARAMETER Experiment Name: At_50mM_NH4NO3_L-to-H_P Parameter: Tissue Value: Leaf
  misc_feature: MA Experiment 20001757 PARAMETER Experiment Name: At_50mM_NH4NO3_L-to-H_P Parameter: Treatment Value: 50mM NH4NO3 vs 100mM Mannitol
  misc_feature: MA Experiment ID: 20001904 Result: Down-regulated in Transcription
  misc_feature: MA Experiment 20001904 PARAMETER Experiment Name: At_Drought_Reproduction_P Parameter: Age (day) Value: 37
  misc_feature: MA Experiment 20001904 PARAMETER Experiment Name: At_Drought_Reproduction_P Parameter: Organism Value: A. thaliana
  misc_feature: MA Experiment 20001904 PARAMETER Experiment Name: At_Drought_Reproduction_P Parameter: Plant Line Value: WS
  misc_feature: MA Experiment 20001904 PARAMETER Experiment Name: At_Drought_Reproduction_P Parameter: Timepoint (day) Value: 7
  misc_feature: MA Experiment 20001904 PARAMETER Experiment Name: At_Drought_Reproduction_P Parameter: Tissue Value: Rosettes
  misc_feature: MA Experiment 20001904 PARAMETER Experiment Name: At_Drought_Reproduction_P Parameter: Treatment Value: Drought vs. No Drought
  misc_feature: MA Experiment ID: 20001905 Result: Down-regulated in Transcription
  misc_feature: MA Experiment 20001905 PARAMETER Experiment Name: At_Drought_Reproduction_P Parameter: Age (day) Value: 40
  misc_feature: MA Experiment 20001905 PARAMETER Experiment Name: At_Drought_Reproduction_P Parameter: Organism Value: A. thaliana
  misc_feature: MA Experiment 20001905 PARAMETER Experiment Name: At_Drought_Reproduction_P Parameter: Plant Line Value: WS
  misc_feature: MA Experiment 20001905 PARAMETER Experiment Name: At_Drought_Reproduction_P Parameter: Timepoint (day) Value: 10
  misc_feature: MA Experiment 20001905 PARAMETER Experiment Name: At_Drought_Reproduction_P Parameter: Tissue Value: Rosettes
  misc_feature: MA Experiment 20001905 PARAMETER Experiment Name: At_Drought_Reproduction_P Parameter: Treatment Value: Drought vs. No Drought

SEQ ID NO: 32989 - protein, 236 aa, Arabidopsis thaliana; identical to SEQ ID NO: 29399
  peptide (1)..(236): Ceres Seq. ID no. 12782032
  misc_feature (78)..(187): Pfam Name: Glutathione peroxidase Pfam Description: Glutathione peroxidase
  misc_feature (21)..(236): Homolog of NCBI NO: 6179600 NR Description: GPX12Hv, glutathione peroxidase-like protein
  misc_feature (71)..(236): Homolog of NCBI NO: 21360380 NR Description: glutathione peroxidase 1 [Oryza sativa]
  misc_feature (1)..(236): Homolog of NCBI NO: 20138099 NR Description: Phospholipid hydroperoxide glutathione
  misc_feature (22)..(236): Homolog of NCBI NO: 2982362 NR Description: glutathione peroxidase [Zantedeschia aethiopica]
  misc_feature (7)..(236): Homolog of NCBI NO: 40388501 NR Description: GPx [Brassica oleracea var. botrytis]
  misc_feature (7)..(236): Homolog of NCBI NO: 20147455 NR Description: glutathione peroxidase [Brassica napus]
  misc_feature (10)..(233): Homolog of NCBI NO: 7433114 NR Description: glutathione peroxidase (EC 1.11.1.9) F11C18.70 -
  misc_feature (10)..(236): Homolog of NCBI NO: 22329066 NR Description: glutathione peroxidase, putative; protein id:
  misc_feature (1)..(236): Homolog of NCBI NO: 15224678 NR Description: glutathione peroxidase, putative
  misc_feature (1)..(235): Homolog of NCBI NO: 2129599 NR Description: glutathione peroxidase (EC 1.11.1.9) precursor -

SEQ ID NO: 32990 - protein, 233 aa, Arabidopsis thaliana; identical to SEQ ID NO: 29400
  peptide (1)..(233): Ceres Seq. ID no. 12782033
  misc_feature (75)..(184): Pfam Name: Glutathione peroxidase Pfam Description: Glutathione peroxidase
  misc_feature (18)..(233): Homolog of NCBI NO: 6179600 NR Description: GPX12Hv, glutathione peroxidase-like protein
  misc_feature (68)..(233): Homolog of NCBI NO: 21360380 NR Description: glutathione peroxidase 1 [Oryza sativa]
  misc_feature (1)..(233): Homolog of NCBI NO: 20138099 NR Description: Phospholipid hydroperoxide glutathione
  misc_feature (19)..(233): Homolog of NCBI NO: 2982362 NR Description: glutathione peroxidase [Zantedeschia aethiopica]
  misc_feature (4)..(233): Homolog of NCBI NO: 40388501 NR Description: GPx [Brassica oleracea var. botrytis]
  misc_feature (4)..(233): Homolog of NCBI NO: 20147455 NR Description: glutathione peroxidase [Brassica napus]
  misc_feature (7)..(230): Homolog of NCBI NO: 7433114 NR Description: glutathione peroxidase (EC 1.11.1.9) F11C18.70 -
  misc_feature (7)..(233): Homolog of NCBI NO: 22329066 NR Description: glutathione peroxidase, putative; protein id:
  misc_feature (1)..(233): Homolog of NCBI NO: 15224678 NR Description: glutathione peroxidase, putative
  misc_feature (1)..(232): Homolog of NCBI NO: 2129599 NR Description: glutathione peroxidase (EC 1.11.1.9) precursor -

SEQ ID NO: 32991 - protein, 135 aa, Arabidopsis thaliana; identical to SEQ ID NO: 29401
  peptide (1)..(135): Ceres Seq. ID no. 12782034
  misc_feature (1)..(86): Pfam Name: Glutathione peroxidase Pfam Description: Glutathione peroxidase
  misc_feature (1)..(135): Homolog of NCBI NO: 6179600 NR Description: GPX12Hv, glutathione peroxidase-like protein
  misc_feature (1)..(135): Homolog of NCBI NO: 21360380 NR Description: glutathione peroxidase 1 [Oryza sativa]
  misc_feature (1)..(135): Homolog of NCBI NO: 20138099 NR Description: Phospholipid hydroperoxide glutathione
  misc_feature (1)..(135): Homolog of NCBI NO: 2982362 NR Description: glutathione peroxidase [Zantedeschia aethiopica]
  misc_feature (1)..(135): Homolog of NCBI NO: 40388501 NR Description: GPx [Brassica oleracea var. botrytis]
  misc_feature (1)..(135): Homolog of NCBI NO: 20147455 NR Description: glutathione peroxidase [Brassica napus]
  misc_feature (1)..(132): Homolog of NCBI NO: 7433114 NR Description: glutathione peroxidase (EC 1.11.1.9) F11C18.70 -
  misc_feature (1)..(135): Homolog of NCBI NO: 22329066 NR Description: glutathione peroxidase, putative; protein id:
  misc_feature (1)..(135): Homolog of NCBI NO: 15224678 NR Description: glutathione peroxidase, putative
  misc_feature (1)..(134): Homolog of NCBI NO: 2129599 NR Description: glutathione peroxidase (EC 1.11.1.9) precursor -

SEQ ID NO: 32992 - DNA, 976 bp, Arabidopsis thaliana; identical to SEQ ID NO: 29402
  misc_feature (1)..(976): Ceres Seq. ID no. 12369947
  misc_feature: MA Experiment ID: 108435 Result: Down-regulated in Transcription
  misc_feature: MA Experiment 108435 PARAMETER Experiment Name: At_stm_Mutants_cDNA_P Parameter: Plant Line Value: wt Landsburg vs stm
  misc_feature: MA Experiment 108435 PARAMETER Experiment Name: At_stm_Mutants_cDNA_P Parameter: Tissue Value: Shoot Apical Meristem Region
  misc_feature: MA Experiment ID: 108461 Result: Up-regulated in Transcription
  misc_feature: MA Experiment 108461 PARAMETER Experiment Name: At_Germinating_Seeds_cDNA_P Parameter: Age (day) Value: 1 vs. 0
  misc_feature: MA Experiment 108461 PARAMETER Experiment Name: At_Germinating_Seeds_cDNA_P Parameter: Tissue Value: Germinating Seeds
  misc_feature: MA Experiment ID: 108462 Result: Up-regulated in Transcription
  misc_feature: MA Experiment 108462 PARAMETER Experiment Name: At_Germinating_Seeds_cDNA_P Parameter: Age (day) Value: 2 vs. 0
  misc_feature: MA Experiment 108462 PARAMETER Experiment Name: At_Germinating_Seeds_cDNA_P Parameter: Tissue Value: Germinating Seeds
  misc_feature: MA Experiment ID: 108463 Result: Up-regulated in Transcription
  misc_feature: MA Experiment 108463 PARAMETER Experiment Name: At_Germinating_Seeds_cDNA_P Parameter: Age (day) Value: 3 vs. 0
  misc_feature: MA Experiment 108463 PARAMETER Experiment Name: At_Germinating_Seeds_cDNA_P Parameter: Tissue Value: Germinating Seeds
  misc_feature: MA Experiment ID: 108488 Result: Up-regulated in Transcription
  misc_feature: MA Experiment ID: 108573 Result: Down-regulated in Transcription
  misc_feature: MA Experiment 108573 PARAMETER Experiment Name: At_Drought_cDNA_P Parameter: Timepoint (hr) Value: 6
  misc_feature: MA Experiment 108573 PARAMETER Experiment Name: At_Drought_cDNA_P Parameter: Tissue Value: Aerial
  misc_feature: MA Experiment 108573 PARAMETER Experiment Name: At_Drought_cDNA_P Parameter: Treatment Value: Drought vs. No Drought
  misc_feature: MA Experiment ID: 108576 Result: Down-regulated in Transcription
  misc_feature: MA Experiment 108576 PARAMETER Experiment Name: At_42deg_Heat_cDNA_P Parameter: Temperature (deg C) Value: 42 vs. 22
  misc_feature: MA Experiment 108576 PARAMETER Experiment Name: At_42deg_Heat_cDNA_P Parameter: Timepoint (hr) Value: 1
  misc_feature: MA Experiment 108576 PARAMETER Experiment Name: At_42deg_Heat_cDNA_P Parameter: Tissue Value: Aerial
  misc_feature: MA Experiment ID: 108585 Result: Down-regulated in Transcription
  misc_feature: MA Experiment 108585 PARAMETER Experiment Name: At_5mM_NaNP_cDNA_P Parameter: Timepoint (hr) Value: 6
  misc_feature: MA Experiment 108585 PARAMETER Experiment Name: At_5mM_NaNP_cDNA_P Parameter: Tissue Value: Aerial
  misc_feature: MA Experiment 108585 PARAMETER Experiment Name: At_5mM_NaNP_cDNA_P Parameter: Treatment Value: null
  misc_feature: MA Experiment ID: 108595 Result: Down-regulated in Transcription
  misc_feature: MA Experiment 108595 PARAMETER Experiment Name: At_Ler-pi_Ovule_cDNA_P Parameter: Plant Line Value: null
  misc_feature: MA Experiment ID: 20000111 Result: Down-regulated in Transcription
  misc_feature: MA Experiment 20000111 PARAMETER Experiment Name: At_42deg_Heat_cDNA_P Parameter: Temperature (deg C) Value: 42 vs. 22
  misc_feature: MA Experiment 20000111 PARAMETER Experiment Name: At_42deg_Heat_cDNA_P Parameter: Timepoint (hr) Value: 6
  misc_feature: MA Experiment 20000111 PARAMETER Experiment Name: At_42deg_Heat_cDNA_P Parameter: Tissue Value: Aerial
  misc_feature: MA Experiment ID: 20000112 Result: Down-regulated in Transcription
  misc_feature: MA Experiment 20000112 PARAMETER Experiment Name: At_42deg_Heat_cDNA_P Parameter: Temperature (deg C) Value: 42 vs. 22
  misc_feature: MA Experiment 20000112 PARAMETER Experiment Name: At_42deg_Heat_cDNA_P Parameter: Timepoint (hr) Value: 2
  misc_feature: MA Experiment 20000112 PARAMETER Experiment Name: At_42deg_Heat_cDNA_P Parameter: Tissue Value: Aerial
  misc_feature: MA Experiment ID: 20000179 Result: Up-regulated in Transcription
  misc_feature: MA Experiment 20000179 PARAMETER Experiment Name: At_Germinating_Seeds_P Parameter: Age (hr) Value: 6 vs. 0
  misc_feature: MA Experiment 20000179 PARAMETER Experiment Name: At_Germinating_Seeds_P Parameter: Tissue Value: Germinating Seeds
  misc_feature: MA Experiment ID: 20000180 Result: Up-regulated in Transcription
  misc_feature: MA Experiment 20000180 PARAMETER Experiment Name: At_Germinating_Seeds_P Parameter: Age (hr) Value: 24 vs. 0
  misc_feature: MA Experiment 20000180 PARAMETER Experiment Name: At_Germinating_Seeds_P Parameter: Tissue Value: Germinating Seeds
  misc_feature: MA Experiment ID: 20000185 Result: Down-regulated in Transcription
  misc_feature: MA Experiment 20000185 PARAMETER Experiment Name: At_Roots__P Parameter: Age (day) Value: 7 vs. 21
  misc_feature: MA Experiment 20000185 PARAMETER Experiment Name: At_Roots__P Parameter: Organism Value: A. thaliana
  misc_feature: MA Experiment 20000185 PARAMETER Experiment Name: At_Roots__P Parameter: Tissue Value: Roots vs. Whole Plant
  misc_feature: MA Experiment ID: 20000224 Result: Up-regulated in Transcription
  misc_feature: MA Experiment ID: 20000227 Result: Down-regulated in Transcription
  misc_feature: MA Experiment 20000227 PARAMETER Experiment Name: At_Root-Tips-vs-Tops_P Parameter: Tissue Value: Root Tips vs. Root Tops
  misc_feature: MA Experiment ID: 20000438 Result: Up-regulated in Transcription
  misc_feature: MA Experiment 20000438 PARAMETER Experiment Name: At_Shoots__P Parameter: Age (day) Value: 14
  misc_feature: MA Experiment 20000438 PARAMETER Experiment Name: At_Shoots__P Parameter: Tissue Value: Shoots vs. Whole Plant
  misc_feature: MA Experiment ID: 20000439 Result: Down-regulated in Transcription
  misc_feature: MA Experiment 20000439 PARAMETER Experiment Name: At_Roots__P Parameter: Age (day) Value: 14 vs. 21
  misc_feature: MA Experiment 20000439 PARAMETER Experiment Name: At_Roots__P Parameter: Organism Value: A. thaliana
  misc_feature: MA Experiment 20000439 PARAMETER Experiment Name: At_Roots__P Parameter: Tissue Value: Roots vs. Whole Plant
  misc_feature: MA Experiment ID: 20000794 Result: Down-regulated in Transcription
  misc_feature: MA Experiment 20000794 PARAMETER Experiment Name: At_Petals_P Parameter: Age (day) Value: 23-25 days
  misc_feature: MA Experiment 20000794 PARAMETER Experiment Name: At_Petals_P Parameter: Plant Line Value: WS
  misc_feature: MA Experiment 20000794 PARAMETER Experiment Name: At_Petals_P Parameter: Tissue Value: Petals vs. Whole plant
  misc_feature: MA Experiment ID: 20001248 Result: Down-regulated in Transcription
  misc_feature: MA Experiment 20001248 PARAMETER Experiment Name: At_Far-red-induction_P Parameter: Age (day) Value: 7
  misc_feature: MA Experiment 20001248 PARAMETER Experiment Name: At_Far-red-induction_P Parameter: Light Value: Far-red vs. White
  misc_feature: MA Experiment 20001248 PARAMETER Experiment Name: At_Far-red-induction_P Parameter: Organism Value: A. thaliana
  misc_feature: MA Experiment 20001248 PARAMETER Experiment Name: At_Far-red-induction_P Parameter: Plant Line Value: Columbia
  misc_feature: MA Experiment 20001248 PARAMETER Experiment Name: At_Far-red-induction_P Parameter: Timepoint (hr) Value: 4
  misc_feature: MA Experiment 20001248 PARAMETER Experiment Name: At_Far-red-induction_P Parameter: Tissue Value: Whole Plant
  misc_feature: MA Experiment ID: 20001450 Result: Down-regulated in Transcription
  misc_feature: MA Experiment 20001450 PARAMETER Experiment Name: At_Far-red-induction_P Parameter: Age (day) Value: 7
  misc_feature: MA Experiment 20001450 PARAMETER Experiment Name: At_Far-red-induction_P Parameter: Light Value: Far-red vs. White
  misc_feature: MA Experiment 20001450 PARAMETER Experiment Name: At_Far-red-induction_P Parameter: Organism Value: A. thaliana
  misc_feature: MA Experiment 20001450 PARAMETER Experiment Name: At_Far-red-induction_P Parameter: Plant Line Value: Columbia
  misc_feature: MA Experiment 20001450 PARAMETER Experiment Name: At_Far-red-induction_P Parameter: Timepoint (hr) Value: 8
  misc_feature: MA Experiment 20001450 PARAMETER Experiment Name: At_Far-red-induction_P Parameter: Tissue Value: Whole Plant
  misc_feature: MA Experiment ID: 20001557 Result: Down-regulated in Transcription
  misc_feature: MA Experiment 20001557 PARAMETER Experiment Name: At_Drought_Soil_Dry_P Parameter: Age (day) Value: 27
  misc_feature: MA Experiment 20001557 PARAMETER Experiment Name: At_Drought_Soil_Dry_P Parameter: Organism Value: A. thaliana
  misc_feature: MA Experiment 20001557 PARAMETER Experiment Name: At_Drought_Soil_Dry_P Parameter: Plant Line Value: WS
  misc_feature: MA Experiment 20001557 PARAMETER Experiment Name: At_Drought_Soil_Dry_P Parameter: Post Timepoint (hr) Value: 3
  misc_feature: MA Experiment 20001557 PARAMETER Experiment Name: At_Drought_Soil_Dry_P Parameter: Post-Treatment Value: Re-Water vs. No Drought
  misc_feature: MA Experiment 20001557 PARAMETER Experiment Name: At_Drought_Soil_Dry_P Parameter: Timepoint (day) Value: 13
  misc_feature: MA Experiment 20001557 PARAMETER Experiment Name: At_Drought_Soil_Dry_P Parameter: Treatment Value: Drought vs. No Drought

SEQ ID NO: 32993 - protein, 224 aa, Arabidopsis thaliana; identical to SEQ ID NO: 29403
  peptide (1)..(224): Ceres Seq. ID no. 12369948
  misc_feature (78)..(214): Pfam Name: Rhodanese-like domain Pfam Description: Rhodanese-like domain
  misc_feature (66)..(223): Homolog of NCBI NO: 18398296 NR Description: rhodanese-like domain protein
  misc_feature (66)..(223): Homolog of NCBI NO: 18491227 NR Description: putative rhodanese family protein [Arabidopsis
  misc_feature (1)..(224): Homolog of NCBI NO: 7487511 NR Description: hypothetical protein T29A15.190 - Arabidopsis
  misc_feature (1)..(224): Homolog of NCBI NO: 21553366 NR Description: unknown [Arabidopsis thaliana]
  misc_feature (1)..(224): Homolog of NCBI NO: 18417050 NR Description: rhodanese-like domain protein

SEQ ID NO: 32994 - protein, 188 aa, Arabidopsis thaliana; identical to SEQ ID NO: 29404
  peptide (1)..(188): Ceres Seq. ID no. 12369949
  misc_feature (42)..(178): Pfam Name: Rhodanese-like domain Pfam Description: Rhodanese-like domain
  misc_feature (30)..(187): Homolog of NCBI NO: 18398296 NR Description: rhodanese-like domain protein
  misc_feature (30)..(187): Homolog of NCBI NO: 18491227 NR Description: putative rhodanese family protein [Arabidopsis
  misc_feature (1)..(188): Homolog of NCBI NO: 7487511 NR Description: hypothetical protein T29A15.190 - Arabidopsis
  misc_feature (1)..(188): Homolog of NCBI NO: 21553366 NR Description: unknown [Arabidopsis thaliana]
  misc_feature (1)..(188): Homolog of NCBI NO: 18417050 NR Description: rhodanese-like domain protein

SEQ ID NO: 32995 - DNA, 1740 bp, Arabidopsis thaliana; identical to SEQ ID NO: 29405
  misc_feature (1)..(1740): Ceres Seq. ID no. 13488118
  misc_feature: MA Experiment ID: 108434 Result: Up-regulated in Transcription
  misc_feature: MA Experiment 108434 PARAMETER Experiment Name: At_Root_Tips_cDNA_P Parameter: Tissue Value: Root Tips
  misc_feature: MA Experiment ID: 108462 Result: Down-regulated in Transcription
  misc_feature: MA Experiment 108462 PARAMETER Experiment Name: At_Germinating_Seeds_cDNA_P Parameter: Age (day) Value: 2 vs. 0
  misc_feature: MA Experiment 108462 PARAMETER Experiment Name: At_Germinating_Seeds_cDNA_P Parameter: Tissue Value: Germinating Seeds
  misc_feature: MA Experiment ID: 108463 Result: Down-regulated in Transcription
  misc_feature: MA Experiment 108463 PARAMETER Experiment Name: At_Germinating_Seeds_cDNA_P Parameter: Age (day) Value: 3 vs. 0
  misc_feature: MA Experiment 108463 PARAMETER Experiment Name: At_Germinating_Seeds_cDNA_P Parameter: Tissue Value: Germinating Seeds
  misc_feature: MA Experiment ID: 108573 Result: Down-regulated in Transcription
  misc_feature: MA Experiment 108573 PARAMETER Experiment Name: At_Drought_cDNA_P Parameter: Timepoint (hr) Value: 6
  misc_feature: MA Experiment 108573 PARAMETER Experiment Name: At_Drought_cDNA_P Parameter: Tissue Value: Aerial
  misc_feature: MA Experiment 108573 PARAMETER Experiment Name: At_Drought_cDNA_P Parameter: Treatment Value: Drought vs. No Drought
  misc_feature: MA Experiment ID: 108576 Result: Up-regulated in Transcription
  misc_feature: MA Experiment 108576 PARAMETER Experiment Name: At_42deg_Heat_cDNA_P Parameter: Temperature (deg C) Value: 42 vs. 22
  misc_feature: MA Experiment 108576 PARAMETER Experiment Name: At_42deg_Heat_cDNA_P Parameter: Timepoint (hr) Value: 1
  misc_feature: MA Experiment 108576 PARAMETER Experiment Name: At_42deg_Heat_cDNA_P Parameter: Tissue Value: Aerial
  misc_feature: MA Experiment ID: 20000093 Result: Up-regulated in Transcription
  misc_feature: MA Experiment 20000093 PARAMETER Experiment Name: At_42deg_Heat_cDNA_P Parameter: Temperature (deg C) Value: 42 vs. 22
  misc_feature: MA Experiment 20000093 PARAMETER Experiment Name: At_42deg_Heat_cDNA_P Parameter: Timepoint (hr) Value: 0.5
  misc_feature: MA Experiment 20000093 PARAMETER Experiment Name: At_42deg_Heat_cDNA_P Parameter: Tissue Value: Aerial
  misc_feature: MA Experiment ID: 20000111 Result: Up-regulated in Transcription
  misc_feature: MA Experiment 20000111 PARAMETER Experiment Name: At_42deg_Heat_cDNA_P Parameter: Temperature (deg C) Value: 42 vs. 22
  misc_feature: MA Experiment 20000111 PARAMETER Experiment Name: At_42deg_Heat_cDNA_P Parameter: Timepoint (hr) Value: 6
  misc_feature: MA Experiment 20000111 PARAMETER Experiment Name: At_42deg_Heat_cDNA_P Parameter: Tissue Value: Aerial
  misc_feature: MA Experiment ID: 20000112 Result: Up-regulated in Transcription
  misc_feature: MA Experiment 20000112 PARAMETER Experiment Name: At_42deg_Heat_cDNA_P Parameter: Temperature (deg C) Value: 42 vs. 22
  misc_feature: MA Experiment 20000112 PARAMETER Experiment Name: At_42deg_Heat_cDNA_P Parameter: Timepoint (hr) Value: 2
  misc_feature: MA Experiment 20000112 PARAMETER Experiment Name: At_42deg_Heat_cDNA_P Parameter: Tissue Value: Aerial
  misc_feature: MA Experiment ID: 20000113 Result: Up-regulated in Transcription
  misc_feature: MA Experiment 20000113 PARAMETER Experiment Name: At_42deg_Heat_cDNA_P Parameter: Temperature (deg C) Value: 42 vs. 22
  misc_feature: MA Experiment 20000113 PARAMETER Experiment Name: At_42deg_Heat_cDNA_P Parameter: Timepoint (hr) Value: 8
  misc_feature: MA Experiment 20000113 PARAMETER Experiment Name: At_42deg_Heat_cDNA_P Parameter: Tissue Value: Aerial
  misc_feature: MA Experiment ID: 20000144 Result: Up-regulated in Transcription
  misc_feature: MA Experiment 20000144 PARAMETER Experiment Name: At_42deg_Heat_cDNA_P Parameter: Temperature (deg C) Value: 42 vs. 22
  misc_feature: MA Experiment 20000144 PARAMETER Experiment Name: At_42deg_Heat_cDNA_P Parameter: Timepoint (hr) Value: 1
  misc_feature: MA Experiment 20000144 PARAMETER Experiment Name: At_42deg_Heat_cDNA_P Parameter: Tissue Value: Aerial
  misc_feature: MA Experiment ID: 20000171 Result: Up-regulated in Transcription
  misc_feature: MA Experiment 20000171 PARAMETER Experiment Name: At_42deg_Heat_P Parameter: Age (day) Value: 14
  misc_feature: MA Experiment 20000171 PARAMETER Experiment Name: At_42deg_Heat_P Parameter: Organism Value: A. thaliana
  misc_feature: MA Experiment 20000171 PARAMETER Experiment Name: At_42deg_Heat_P Parameter: Plant Line Value: WS
  misc_feature: MA Experiment 20000171 PARAMETER Experiment Name: At_42deg_Heat_P Parameter: Temperature (deg C) Value: 42 vs. 22
  misc_feature: MA Experiment 20000171 PARAMETER Experiment Name: At_42deg_Heat_P Parameter: Timepoint (hr) Value: 1
  misc_feature: MA Experiment 20000171 PARAMETER Experiment Name: At_42deg_Heat_P Parameter: Tissue Value: Aerial
  misc_feature: MA Experiment ID: 20000224 Result: Up-regulated in Transcription

SEQ ID NO: 32996 - protein, 456 aa, Arabidopsis thaliana; identical to SEQ ID NO: 29406
  peptide (1)..(456): Ceres Seq. ID no. 13488119
  misc_feature (318)..(439): Pfam Name: DnaJ C terminal region Pfam Description: DnaJ C terminal region
  misc_feature (90)..(445): Homolog of NCBI NO: 27363826 NR Description: DnaJ chaperone [Vibrio vulnificus CMCP6]
  misc_feature (90)..(445): Homolog of NCBI NO: 15640872 NR Description: dnaJ protein [Vibrio cholerae]
  misc_feature (90)..(454): Homolog of NCBI NO: 16759006 NR Description: DnaJ protein [Salmonella enterica subsp. enterica
  misc_feature (90)..(445): Homolog of NCBI NO: 34497100 NR Description: heat shock protein dnaJ; chaperone with DnaK
  misc_feature (93)..(445): Homolog of NCBI NO: 39995145 NR Description: chaperone protein dnaJ [Geobacter sulfurreducens
  misc_feature (90)..(450): Homolog of NCBI NO: 15675997 NR Description: dnaJ protein [Neisseria meningitidis MC58]
  misc_feature (1)..(456): Homolog of NCBI NO: 10177754 NR Description: DnaJ protein-like [Arabidopsis thaliana]
  misc_feature (1)..(456): Homolog of NCBI NO: 21553367 NR Description: DnaJ protein-like [Arabidopsis thaliana]
  misc_feature (1)..(456): Homolog of NCBI NO: 21429604 NR Description: GFA2 [Arabidopsis thaliana]
  misc_feature (1)..(456): Homolog of NCBI NO: 18422864 NR Description: DnaJ protein GFA2, putative [Arabidopsis

SEQ ID NO: 32997 - protein, 367 aa, Arabidopsis thaliana; identical to SEQ ID NO: 29407
  peptide (1)..(367): Ceres Seq. ID no. 13488120
  misc_feature (229)..(350): Pfam Name: DnaJ C terminal region Pfam Description: DnaJ C terminal region
  misc_feature (1)..(356): Homolog of NCBI NO: 27363826 NR Description: DnaJ chaperone [Vibrio vulnificus CMCP6]
  misc_feature (1)..(356): Homolog of NCBI NO: 15640872 NR Description: dnaJ protein [Vibrio cholerae]
  misc_feature (1)..(365): Homolog of NCBI NO: 16759006 NR Description: DnaJ protein [Salmonella enterica subsp. enterica
  misc_feature (1)..(356): Homolog of NCBI NO: 34497100 NR Description: heat shock protein dnaJ; chaperone with DnaK
  misc_feature (4)..(356): Homolog of NCBI NO: 39995145 NR Description: chaperone protein dnaJ [Geobacter sulfurreducens
  misc_feature (1)..(361): Homolog of NCBI NO: 15675997 NR Description: dnaJ protein [Neisseria meningitidis MC58]
  misc_feature (1)..(367): Homolog of NCBI NO: 10177754 NR Description: DnaJ protein-like [Arabidopsis thaliana]
  misc_feature (1)..(367): Homolog of NCBI NO: 21553367 NR Description: DnaJ protein-like [Arabidopsis thaliana]
  misc_feature (1)..(367): Homolog of NCBI NO: 21429604 NR Description: GFA2 [Arabidopsis thaliana]
  misc_feature (1)..(367): Homolog of NCBI NO: 18422864 NR Description: DnaJ protein GFA2, putative [Arabidopsis

SEQ ID NO: 32998 - protein, 332 aa, Arabidopsis thaliana; identical to SEQ ID NO: 29408
  peptide (1)..(332): Ceres Seq. ID no. 13488121
  misc_feature (194)..(315): Pfam Name: DnaJ C terminal region Pfam Description: DnaJ C terminal region
  misc_feature (1)..(321): Homolog of NCBI NO: 27363826 NR Description: DnaJ chaperone [Vibrio vulnificus CMCP6]
  misc_feature (1)..(321): Homolog of NCBI NO: 15640872 NR Description: dnaJ protein [Vibrio cholerae]
  misc_feature (1)..(330): Homolog of NCBI NO: 16759006 NR Description: DnaJ protein [Salmonella enterica subsp. enterica
  misc_feature (1)..(321): Homolog of NCBI NO: 34497100 NR Description: heat shock protein dnaJ; chaperone with DnaK
  misc_feature (1)..(321): Homolog of NCBI NO: 39995145 NR Description: chaperone protein dnaJ [Geobacter sulfurreducens
  misc_feature (1)..(326): Homolog of NCBI NO: 15675997 NR Description: dnaJ protein [Neisseria meningitidis MC58]
  misc_feature (1)..(332): Homolog of NCBI NO: 10177754 NR Description: DnaJ protein-like [Arabidopsis thaliana]
  misc_feature (1)..(332): Homolog of NCBI NO: 21553367 NR Description: DnaJ protein-like [Arabidopsis thaliana]
  misc_feature (1)..(332): Homolog of NCBI NO: 21429604 NR Description: GFA2 [Arabidopsis thaliana]
  misc_feature (1)..(332): Homolog of NCBI NO: 18422864 NR Description: DnaJ protein GFA2, putative [Arabidopsis

SEQ ID NO: 32999 - DNA, 1189 bp, Arabidopsis thaliana; identical to SEQ ID NO: 29409
  misc_feature (1)..(1189): Ceres Seq. ID no. 12325946
  misc_feature: MA Experiment ID: 108595 Result: Down-regulated in Transcription
  misc_feature: MA Experiment 108595 PARAMETER Experiment Name: At_Ler-pi_Ovule_cDNA_P Parameter: Plant Line Value: null
  misc_feature: MA Experiment ID: 20000185 Result: Down-regulated in Transcription
  misc_feature: MA Experiment 20000185 PARAMETER Experiment Name: At_Roots__P Parameter: Age (day) Value: 7 vs. 21
  misc_feature: MA Experiment 20000185 PARAMETER Experiment Name: At_Roots__P Parameter: Organism Value: A. thaliana
  misc_feature: MA Experiment 20000185 PARAMETER Experiment Name: At_Roots__P Parameter: Tissue Value: Roots vs. Whole Plant
  misc_feature: MA Experiment ID: 20000439 Result: Down-regulated in Transcription
  misc_feature: MA Experiment 20000439 PARAMETER Experiment Name: At_Roots__P Parameter: Age (day) Value: 14 vs. 21
  misc_feature: MA Experiment 20000439 PARAMETER Experiment Name: At_Roots__P Parameter: Organism Value: A. thaliana
  misc_feature: MA Experiment 20000439 PARAMETER Experiment Name: At_Roots__P Parameter: Tissue Value: Roots vs. Whole Plant
  misc_feature: MA Experiment ID: 20000495 Result: Down-regulated in Transcription
  misc_feature: MA Experiment 20000495 PARAMETER Experiment Name: At_Guard_Cells_P Parameter: Harvest Date Value: 8/2/2002
  misc_feature: MA Experiment 20000495 PARAMETER Experiment Name: At_Guard_Cells_P Parameter: Organism Value: A. thaliana
  misc_feature: MA Experiment 20000495 PARAMETER Experiment Name: At_Guard_Cells_P Parameter: Tissue Value: Guard Cells vs. Leaves
  misc_feature: MA Experiment ID: 20001557 Result: Down-regulated in Transcription
  misc_feature: MA Experiment 20001557 PARAMETER Experiment Name: At_Drought_Soil_Dry_P Parameter: Age (day) Value: 27
  misc_feature: MA Experiment 20001557 PARAMETER Experiment Name: At_Drought_Soil_Dry_P Parameter: Organism Value: A. thaliana
  misc_feature: MA Experiment 20001557 PARAMETER Experiment Name: At_Drought_Soil_Dry_P Parameter: Plant Line Value: WS
  misc_feature: MA Experiment 20001557 PARAMETER Experiment Name: At_Drought_Soil_Dry_P Parameter: Post Timepoint (hr) Value: 3
  misc_feature: MA Experiment 20001557 PARAMETER Experiment Name: At_Drought_Soil_Dry_P Parameter: Post-Treatment Value: Re-Water vs. No Drought
  misc_feature: MA Experiment 20001557 PARAMETER Experiment Name: At_Drought_Soil_Dry_P Parameter: Timepoint (day) Value: 13
  misc_feature: MA Experiment 20001557 PARAMETER Experiment Name: At_Drought_Soil_Dry_P Parameter: Treatment Value: Drought vs. No Drought
  misc_feature: MA Experiment ID: 20001558 Result: Down-regulated in Transcription
  misc_feature: MA Experiment 20001558 PARAMETER Experiment Name: At_Drought_Soil_Dry_P Parameter: Age (day) Value: 27
  misc_feature: MA Experiment 20001558 PARAMETER Experiment Name: At_Drought_Soil_Dry_P Parameter: Organism Value: A. thaliana
  misc_feature: MA Experiment 20001558 PARAMETER Experiment Name: At_Drought_Soil_Dry_P Parameter: Plant Line Value: WS
  misc_feature: MA Experiment 20001558 PARAMETER Experiment Name: At_Drought_Soil_Dry_P Parameter: Post Timepoint (hr) Value: 6
  misc_feature: MA Experiment 20001558 PARAMETER Experiment Name: At_Drought_Soil_Dry_P Parameter: Post-Treatment Value: Re-Water vs. No Drought
  misc_feature: MA Experiment 20001558 PARAMETER Experiment Name: At_Drought_Soil_Dry_P Parameter: Timepoint (day) Value: 13
  misc_feature: MA Experiment 20001558 PARAMETER Experiment Name: At_Drought_Soil_Dry_P Parameter: Treatment Value: Drought vs. No Drought

SEQ ID NO: 33000 - protein, 351 aa, Arabidopsis thaliana; identical to SEQ ID NO: 29410
  peptide (1)..(351): Ceres Seq. ID no. 12325947
  misc_feature (86)..(276): Homolog of NCBI NO: 118571 NR Description: Granaticin polyketide synthase putative ketoacyl
  misc_feature (86)..(305): Homolog of NCBI NO: 21674585 NR Description: oxidoreductase, short-chain
  misc_feature (86)..(285): Homolog of NCBI NO: 31213111 NR Description: ENSANGP00000021713 [Anopheles gambiae]
  misc_feature (117)..(315): Homolog of NCBI NO: 7485669 NR Description: hypothetical protein F17N18.140 - Arabidopsis
  misc_feature (86)..(351): Homolog of NCBI NO: 34904226 NR Description: P0443E07.30 [Oryza sativa (japonica
  misc_feature (79)..(351): Homolog of NCBI NO: 21673969 NR Description: oxidoreductase, short-chain
  misc_feature (82)..(315): Homolog of NCBI NO: 18413962 NR Description: putative protein
  misc_feature (17)..(351): Homolog of NCBI NO: 29244639 NR Description: putative oxidoreductase protein
  misc_feature (4)..(336): Homolog of NCBI NO: 10178029 NR Description: gene_id:MUG13.25~pir||T07705~similar to unknown
  misc_feature (4)..(351): Homolog of NCBI NO: 18414726 NR Description: putative protein

SEQ ID NO: 33001 - protein, 348 aa, Arabidopsis thaliana; identical to SEQ ID NO: 29411
  peptide (1)..(348): Ceres Seq. ID no. 12325948
  misc_feature (83)..(273): Homolog of NCBI NO: 118571 NR Description: Granaticin polyketide synthase putative ketoacyl
  misc_feature (83)..(302): Homolog of NCBI NO: 21674585 NR Description: oxidoreductase, short-chain
  misc_feature (83)..(282): Homolog of NCBI NO: 31213111 NR Description: ENSANGP00000021713 [Anopheles gambiae]
  misc_feature (114)..(312): Homolog of NCBI NO: 7485669 NR Description: hypothetical protein F17N18.140 - Arabidopsis
  misc_feature (83)..(348): Homolog of NCBI NO: 34904226 NR Description: P0443E07.30 [Oryza sativa (japonica
  misc_feature (76)..(348): Homolog of NCBI NO: 21673969 NR Description: oxidoreductase, short-chain
  misc_feature (79)..(312): Homolog of NCBI NO: 18413962 NR Description: putative protein
  misc_feature (14)..(348): Homolog of NCBI NO: 29244639 NR Description: putative oxidoreductase protein
  misc_feature (1)..(333): Homolog of NCBI NO: 10178029 NR Description: gene_id:MUG13.25~pir||T07705~similar to unknown
  misc_feature (1)..(348): Homolog of NCBI NO: 18414726 NR Description: putative protein

SEQ ID NO: 33002 - protein, 273 aa, Arabidopsis thaliana; identical to SEQ ID NO: 29412
  peptide (1)..(273): Ceres Seq. ID no. 12325949
  misc_feature (8)..(198): Homolog of NCBI NO: 118571 NR Description: Granaticin polyketide synthase putative ketoacyl
  misc_feature (8)..(227): Homolog of NCBI NO: 21674585 NR Description: oxidoreductase, short-chain
  misc_feature (8)..(207): Homolog of NCBI NO: 31213111 NR Description: ENSANGP00000021713 [Anopheles gambiae]
  misc_feature (39)..(237): Homolog of NCBI NO: 7485669 NR Description: hypothetical protein F17N18.140 - Arabidopsis
  misc_feature (8)..(273): Homolog of NCBI NO: 34904226 NR Description: P0443E07.30 [Oryza sativa (japonica
  misc_feature (1)..(273): Homolog of NCBI NO: 21673969 NR Description: oxidoreductase, short-chain
  misc_feature (4)..(237): Homolog of NCBI NO: 18413962 NR Description: putative protein
  misc_feature (1)..(273): Homolog of NCBI NO: 29244639 NR Description: putative oxidoreductase protein
  misc_feature (1)..(258): Homolog of NCBI NO: 10178029 NR Description: gene_id:MUG13.25~pir||T07705~similar to unknown
  misc_feature (1)..(273): Homolog of NCBI NO: 18414726 NR Description: putative protein

SEQ ID NO: 33003 - DNA, 1221 bp, Arabidopsis thaliana; identical to SEQ ID NO: 29413
  misc_feature (1)..(1221): Ceres Seq. ID no. 12336049
  misc_feature: MA Experiment ID: 108434 Result: Up-regulated in Transcription
  misc_feature: MA Experiment 108434 PARAMETER Experiment Name: At_Root_Tips_cDNA_P Parameter: Tissue Value: Root Tips
  misc_feature: MA Experiment ID: 108462 Result: Down-regulated in Transcription
  misc_feature: MA Experiment 108462 PARAMETER Experiment Name: At_Germinating_Seeds_cDNA_P Parameter: Age (day) Value: 2 vs. 0
  misc_feature: MA Experiment 108462 PARAMETER Experiment Name: At_Germinating_Seeds_cDNA_P Parameter: Tissue Value: Germinating Seeds
  misc_feature: MA Experiment ID: 108463 Result: Down-regulated in Transcription
  misc_feature: MA Experiment 108463 PARAMETER Experiment Name: At_Germinating_Seeds_cDNA_P Parameter: Age (day) Value: 3 vs. 0
  misc_feature: MA Experiment 108463 PARAMETER Experiment Name: At_Germinating_Seeds_cDNA_P Parameter: Tissue Value: Germinating Seeds
  misc_feature: MA Experiment ID: 108464 Result: Down-regulated in Transcription
  misc_feature: MA Experiment 108464 PARAMETER Experiment Name: At_Germinating_Seeds_cDNA_P Parameter: Age (day) Value: 4 vs. 0
  misc_feature: MA Experiment 108464 PARAMETER Experiment Name: At_Germinating_Seeds_cDNA_P Parameter: Tissue Value: Germinating Seeds
  misc_feature: MA Experiment ID: 108573 Result: Down-regulated in Transcription
  misc_feature: MA Experiment 108573 PARAMETER Experiment Name: At_Drought_cDNA_P Parameter: Timepoint (hr) Value: 6
  misc_feature: MA Experiment 108573 PARAMETER Experiment Name: At_Drought_cDNA_P Parameter: Tissue Value: Aerial
  misc_feature: MA Experiment 108573 PARAMETER Experiment Name: At_Drought_cDNA_P Parameter: Treatment Value: Drought vs. No Drought
  misc_feature: MA Experiment ID: 108595 Result: Down-regulated in Transcription
  misc_feature: MA Experiment 108595 PARAMETER Experiment Name: At_Ler-pi_Ovule_cDNA_P Parameter: Plant Line Value: null
  misc_feature: MA Experiment ID: 20000227 Result: Up-regulated in Transcription
  misc_feature: MA Experiment 20000227 PARAMETER Experiment Name: At_Root-Tips-vs-Tops_P Parameter: Tissue Value: Root Tips vs. Root Tops
  misc_feature: Phenotype: WHOLE PLANT Size-Small
  misc_feature: Phenotype: WHOLE PLANT Size-Small

SEQ ID NO: 33004 - protein, 281 aa, Arabidopsis thaliana; identical to SEQ ID NO: 29414
  peptide (1)..(281): Ceres Seq. ID no. 12336050
  misc_feature (64)..(162): Pfam Name: Ribosomal protein L15 amino terminal region Pfam Description: Ribosomal protein L15 amino terminal region
  misc_feature (64)..(213): Homolog of NCBI NO: 27380492 NR Description: 50S ribosomal protein L15 [Bradyrhizobium
  misc_feature (64)..(213): Homolog of NCBI NO: 13470570 NR Description: 50S ribosomal protein L15 [Mesorhizobium loti]
  misc_feature (64)..(213): Homolog of NCBI NO: 22965142 NR Description: hypothetical protein [Rhodopseudomonas palustris]
  misc_feature (64)..(212): Homolog of NCBI NO: 23014069 NR Description: hypothetical protein [Magnetospirillum
  misc_feature (50)..(250): Homolog of NCBI NO: 6324045 NR Description: Mitochondrial ribosomal protein MRPL10 (YmL10);
  misc_feature (64)..(212): Homolog of NCBI NO: 22966103 NR Description: hypothetical protein [Rhodospirillum rubrum]
  misc_feature (64)..(213): Homolog of NCBI NO: 17987059 NR Description: LSU ribosomal protein L15P [Brucella melitensis]
  misc_feature (34)..(227): Homolog of NCBI NO: 32410177 NR Description: hypothetical protein [Neurospora crassa]
  misc_feature (1)..(271): Homolog of NCBI NO: 34015188 NR Description: putative ribosomal protein L15
  misc_feature (1)..(281): Homolog of NCBI NO: 15237756 NR Description: putative protein

SEQ ID NO: 33005 - protein, 176 aa, Arabidopsis thaliana; identical to SEQ ID NO: 29415
  peptide (1)..(176): Ceres Seq. ID no. 12336051
  misc_feature (1)..(57): Pfam Name: Ribosomal protein L15 amino terminal region Pfam Description: Ribosomal protein L15 amino terminal region
  misc_feature (1)..(108): Homolog of NCBI NO: 27380492 NR Description: 50S ribosomal protein L15 [Bradyrhizobium
  misc_feature (1)..(108): Homolog of NCBI NO: 13470570 NR Description: 50S ribosomal protein L15 [Mesorhizobium loti]
  misc_feature (1)..(108): Homolog of NCBI NO: 22965142 NR Description: hypothetical protein [Rhodopseudomonas palustris]
  misc_feature (1)..(107): Homolog of NCBI NO: 23014069 NR Description: hypothetical protein [Magnetospirillum
  misc_feature (1)..(145): Homolog of NCBI NO: 6324045 NR Description: Mitochondrial ribosomal protein MRPL10 (YmL10);
  misc_feature (1)..(107): Homolog of NCBI NO: 22966103 NR Description: hypothetical protein [Rhodospirillum rubrum]
  misc_feature (1)..(108): Homolog of NCBI NO: 17987059 NR Description: LSU ribosomal protein L15P [Brucella melitensis]
  misc_feature (1)..(122): Homolog of NCBI NO: 32410177 NR Description: hypothetical protein [Neurospora crassa]
  misc_feature (1)..(166): Homolog of NCBI NO: 34015188 NR Description: putative ribosomal protein L15
  misc_feature (1)..(176): Homolog of NCBI NO: 15237756 NR Description: putative protein

SEQ ID NO: 33006 - DNA, 641 bp, Arabidopsis thaliana; identical to SEQ ID NO: 29416
  misc_feature (1)..(641): Ceres Seq. ID no. 13496822
  misc_feature: MA Experiment ID: 108595 Result: Down-regulated in Transcription
  misc_feature: MA Experiment 108595 PARAMETER Experiment Name: At_Ler-pi_Ovule_cDNA_P Parameter: Plant Line Value: null
  misc_feature: MA Experiment ID: 20000113 Result: Down-regulated in Transcription
  misc_feature: MA Experiment 20000113 PARAMETER Experiment Name: At_42deg_Heat_cDNA_P Parameter: Temperature (deg C) Value: 42 vs. 22
  misc_feature: MA Experiment 20000113 PARAMETER Experiment Name: At_42deg_Heat_cDNA_P Parameter: Timepoint (hr) Value: 8
  misc_feature: MA Experiment 20000113 PARAMETER Experiment Name: At_42deg_Heat_cDNA_P Parameter: Tissue Value: Aerial
  misc_feature: MA Experiment ID: 20000307 Result: Up-regulated in Transcription
  misc_feature: MA Experiment 20000307 PARAMETER Experiment Name: At_Germinating_Seeds_Sub_P Parameter: Age (hr) Value: 24 vs. 0
  misc_feature: MA Experiment 20000307 PARAMETER Experiment Name: At_Germinating_Seeds_Sub_P Parameter: Organism Value: A. thaliana
  misc_feature: MA Experiment 20000307 PARAMETER Experiment Name: At_Germinating_Seeds_Sub_P Parameter: Plant Line Value: WS
  misc_feature: MA Experiment 20000307 PARAMETER Experiment Name: At_Germinating_Seeds_Sub_P Parameter: Tissue Value: Germinating Seeds
  misc_feature: MA Experiment ID: 20000328 Result: Down-regulated in Transcription
  misc_feature: MA Experiment 20000328 PARAMETER Experiment Name: At_42deg_Heat_Sub_P Parameter: Age (day) Value: 14
  misc_feature: MA Experiment 20000328 PARAMETER Experiment Name: At_42deg_Heat_Sub_P Parameter: Organism Value: A. thaliana
  misc_feature: MA Experiment 20000328 PARAMETER Experiment Name: At_42deg_Heat_Sub_P Parameter: Plant Line Value: WS
  misc_feature: MA Experiment 20000328 PARAMETER Experiment Name: At_42deg_Heat_Sub_P Parameter: Temperature (deg C) Value: 42 vs. 22
  misc_feature: MA Experiment 20000328 PARAMETER Experiment Name: At_42deg_Heat_Sub_P Parameter: Timepoint (hr) Value: 6
  misc_feature: MA Experiment 20000328 PARAMETER Experiment Name: At_42deg_Heat_Sub_P Parameter: Tissue Value: Aerial

SEQ ID NO: 33007 - protein, 149 aa, Arabidopsis thaliana; identical to SEQ ID NO: 29417
  peptide (1)..(149): Ceres Seq. ID no. 13496823
  misc_feature (12)..(40): Pfam Name: EF hand Pfam Description: EF hand
  misc_feature (1)..(149): Homolog of NCBI NO: 289525 NR Description: calmodulin
  misc_feature (1)..(149): Homolog of NCBI NO: 30688187 NR Description: calmodulin-6 (CAM6) [Arabidopsis thaliana]
  misc_feature (1)..(149): Homolog of NCBI NO: 3121849 NR Description: CALMODULIN
  misc_feature (1)..(149): Homolog of NCBI NO: 115515 NR Description: Calmodulin
  misc_feature (1)..(149): Homolog of NCBI NO: 34903134 NR Description: unnamed protein product [Oryza sativa (japonica
  misc_feature (1)..(149): Homolog of NCBI NO: 3121848 NR Description: CALMODULIN
  misc_feature (1)..(149): Homolog of NCBI NO: 34304715 NR Description: calmodulin 4 [Daucus carota]
  misc_feature (1)..(149): Homolog of NCBI NO: 15229784 NR Description: calmodulin [Arabidopsis thaliana]
  misc_feature (1)..(149): Homolog of NCBI NO: 30683369 NR Description: calmodulin [Arabidopsis thaliana]
  misc_feature (1)..(149): Homolog of NCBI NO: 15225840 NR Description: calmodulin [Arabidopsis thaliana]

SEQ ID NO: 33008 - protein, 113 aa, Arabidopsis thaliana; identical to SEQ ID NO: 29418
  peptide (1)..(113): Ceres Seq. ID no. 13496824
  misc_feature (1)..(113): Homolog of NCBI NO: 289525 NR Description: calmodulin
  misc_feature (1)..(113): Homolog of NCBI NO: 30688187 NR Description: calmodulin-6 (CAM6) [Arabidopsis thaliana]
  misc_feature (1)..(113): Homolog of NCBI NO: 3121849 NR Description: CALMODULIN
  misc_feature (1)..(113): Homolog of NCBI NO: 115515 NR Description: Calmodulin
  misc_feature (1)..(113): Homolog of NCBI NO: 34903134 NR Description: unnamed protein product [Oryza sativa (japonica
  misc_feature (1)..(113): Homolog of NCBI NO: 3121848 NR Description: CALMODULIN
  misc_feature (1)..(113): Homolog of NCBI NO: 34304715 NR Description: calmodulin 4 [Daucus carota]
  misc_feature (1)..(113): Homolog of NCBI NO: 15229784 NR Description: calmodulin [Arabidopsis thaliana]
  misc_feature (1)..(113): Homolog of NCBI NO: 30683369 NR Description: calmodulin [Arabidopsis thaliana]
  misc_feature (1)..(113): Homolog of NCBI NO: 15225840 NR Description: calmodulin [Arabidopsis thaliana]

SEQ ID NO: 33009 - protein, 98 aa, Arabidopsis thaliana; identical to SEQ ID NO: 29419
  peptide (1)..(98): Ceres Seq. ID no. 13496825
  misc_feature (1)..(98): Homolog of NCBI NO: 289525 NR Description: calmodulin
  misc_feature (1)..(98): Homolog of NCBI NO: 30688187 NR Description: calmodulin-6 (CAM6) [Arabidopsis thaliana]
  misc_feature (1)..(98): Homolog of NCBI NO: 3121849 NR Description: CALMODULIN
  misc_feature (1)..(98): Homolog of NCBI NO: 115515 NR Description: Calmodulin
  misc_feature (1)..(98): Homolog of NCBI NO: 34903134 NR Description: unnamed protein product [Oryza sativa (japonica
  misc_feature (1)..(98): Homolog of NCBI NO: 3121848 NR Description: CALMODULIN
  misc_feature (1)..(98): Homolog of NCBI NO: 34304715 NR Description: calmodulin 4 [Daucus carota]
  misc_feature (1)..(98): Homolog of NCBI NO: 15229784 NR Description: calmodulin [Arabidopsis thaliana]
  misc_feature (1)..(98): Homolog of NCBI NO: 30683369 NR Description: calmodulin [Arabidopsis thaliana]
  misc_feature (1)..(98): Homolog of NCBI NO: 15225840 NR Description: calmodulin [Arabidopsis thaliana]

SEQ ID NO: 33010 - DNA, 812 bp, Arabidopsis thaliana; identical to SEQ ID NO: 29420
  misc_feature (1)..(812): Ceres Seq. ID no. 12332082
  misc_feature: MA Experiment ID: 108434 Result: Up-regulated in Transcription
  misc_feature: MA Experiment 108434 PARAMETER Experiment Name: At_Root_Tips_cDNA_P Parameter: Tissue Value: Root Tips
  misc_feature: MA Experiment ID: 108461 Result: Down-regulated in Transcription
  misc_feature: MA Experiment 108461 PARAMETER Experiment Name: At_Germinating_Seeds_cDNA_P Parameter: Age (day) Value: 1 vs. 0
  misc_feature: MA Experiment 108461 PARAMETER Experiment Name: At_Germinating_Seeds_cDNA_P Parameter: Tissue Value: Germinating Seeds
  misc_feature: MA Experiment ID: 108462 Result: Down-regulated in Transcription
  misc_feature: MA Experiment 108462 PARAMETER Experiment Name: At_Germinating_Seeds_cDNA_P Parameter: Age (day) Value: 2 vs. 0
  misc_feature: MA Experiment 108462 PARAMETER Experiment Name: At_Germinating_Seeds_cDNA_P Parameter: Tissue Value: Germinating Seeds
  misc_feature: MA Experiment ID: 108463 Result: Down-regulated in Transcription
  misc_feature: MA Experiment 108463 PARAMETER Experiment Name: At_Germinating_Seeds_cDNA_P Parameter: Age (day) Value: 3 vs. 0
  misc_feature: MA Experiment 108463 PARAMETER Experiment Name: At_Germinating_Seeds_cDNA_P Parameter: Tissue Value: Germinating Seeds
  misc_feature: MA Experiment ID: 108464 Result: Down-regulated in Transcription
  misc_feature: MA Experiment 108464 PARAMETER Experiment Name: At_Germinating_Seeds_cDNA_P Parameter: Age (day) Value: 4 vs. 0
  misc_feature: MA Experiment 108464 PARAMETER Experiment Name: At_Germinating_Seeds_cDNA_P Parameter: Tissue Value: Germinating Seeds
  misc_feature: MA Experiment ID: 108577 Result: Up-regulated in Transcription
  misc_feature: MA Experiment 108577 PARAMETER Experiment Name: At_42deg_Heat_cDNA_P Parameter: Temperature (deg C) Value: 42 vs. 22
  misc_feature: MA Experiment 108577 PARAMETER Experiment Name: At_42deg_Heat_cDNA_P Parameter: Timepoint (hr) Value: 6
  misc_feature: MA Experiment 108577 PARAMETER Experiment Name: At_42deg_Heat_cDNA_P Parameter: Tissue Value: Aerial
  misc_feature: MA Experiment ID: 20000111 Result: Up-regulated in Transcription
  misc_feature: MA Experiment 20000111 PARAMETER Experiment Name: At_42deg_Heat_cDNA_P Parameter: Temperature (deg C) Value: 42 vs. 22
  misc_feature: MA Experiment 20000111 PARAMETER Experiment Name: At_42deg_Heat_cDNA_P Parameter: Timepoint (hr) Value: 6
  misc_feature: MA Experiment 20000111 PARAMETER Experiment Name: At_42deg_Heat_cDNA_P Parameter: Tissue Value: Aerial
  misc_feature: MA Experiment ID: 20000113 Result: Up-regulated in Transcription
  misc_feature: MA Experiment 20000113 PARAMETER Experiment Name: At_42deg_Heat_cDNA_P Parameter: Temperature (deg C) Value: 42 vs. 22
  misc_feature: MA Experiment 20000113 PARAMETER Experiment Name: At_42deg_Heat_cDNA_P Parameter: Timepoint (hr) Value: 8
  misc_feature: MA Experiment 20000113 PARAMETER Experiment Name: At_42deg_Heat_cDNA_P Parameter: Tissue Value: Aerial

SEQ ID NO: 33011 - protein, 156 aa, Arabidopsis thaliana; identical to SEQ ID NO: 29421
  peptide (1)..(156): Ceres Seq. ID no. 12332083
  misc_feature (58)..(129): Pfam Name: RNA recognition motif. (a.k.a. RRM, RBD, or RNP domain) Pfam Description: RNA recognition motif. (a.k.a. RRM, RBD, or RNP
  misc_feature (55)..(120): Homolog of NCBI NO: 19881711 NR Description: Putative RNA-binding protein [Oryza sativa]
  misc_feature (56)..(156): Homolog of NCBI NO: 21388662 NR Description: glycine-rich RNA-binding protein [Physcomitrella
  misc_feature (55)..(136): Homolog of NCBI NO: 15239958 NR Description: RRM-containing protein
  misc_feature (34)..(135): Homolog of NCBI NO: 34906972 NR Description: putative glycine-rich RNA-binding protein 2
  misc_feature (36)..(150): Homolog of NCBI NO: 15219486 NR Description: RRM-containing RNA-binding protein, putative
  misc_feature (1)..(70): Homolog of NCBI NO: 15226161 NR Description: DEAD/DEAH box RNA helicase, putative; protein id:
  misc_feature (25)..(144): Homolog of NCBI NO: 15224298 NR Description: RRM-containing protein
  misc_feature (18)..(148): Homolog of NCBI NO: 34898598 NR Description: P0534A03.25 [Oryza sativa (japonica
  misc_feature (18)..(150): Homolog of NCBI NO: 38636774 NR Description: putative RNA recognition motif (RRM)-containing
  misc_feature (1)..(156): Homolog of NCBI NO: 15239676 NR Description: RRM-containing protein

SEQ ID NO: 33012 - protein, 154 aa, Arabidopsis thaliana; identical to SEQ ID NO: 29422
  peptide (1)..(154): Ceres Seq. ID no. 12332084
  misc_feature (56)..(127): Pfam Name: RNA recognition motif. (a.k.a. RRM, RBD, or RNP domain) Pfam Description: RNA recognition motif. (a.k.a. RRM, RBD, or RNP
  misc_feature (53)..(118): Homolog of NCBI NO: 19881711 NR Description: Putative RNA-binding protein [Oryza sativa]
  misc_feature (54)..(154): Homolog of NCBI NO: 21388662 NR Description: glycine-rich RNA-binding protein [Physcomitrella
  misc_feature (53)..(134): Homolog of NCBI NO: 15239958 NR Description: RRM-containing protein
  misc_feature (32)..(133): Homolog of NCBI NO: 34906972 NR Description: putative glycine-rich RNA-binding protein 2
  misc_feature (34)..(148): Homolog of NCBI NO: 15219486 NR Description: RRM-containing RNA-binding protein, putative
  misc_feature (1)..(68): Homolog of NCBI NO: 15226161 NR Description: DEAD/DEAH box RNA helicase, putative; protein id:
  misc_feature (23)..(142): Homolog of NCBI NO: 15224298 NR Description: RRM-containing protein
  misc_feature (16)..(146): Homolog of NCBI NO: 34898598 NR Description: P0534A03.25 [Oryza sativa (japonica
  misc_feature (16)..(148): Homolog of NCBI NO: 38636774 NR Description: putative RNA recognition motif (RRM)-containing
  misc_feature (1)..(154): Homolog of NCBI NO: 15239676 NR Description: RRM-containing protein

SEQ ID NO: 33013 - protein, 152 aa, Arabidopsis thaliana; identical to SEQ ID NO: 29423
  peptide (1)..(152): Ceres Seq. ID no. 12332085
  misc_feature (54)..(125): Pfam Name: RNA recognition motif. (a.k.a. RRM, RBD, or RNP domain) Pfam Description: RNA recognition motif. (a.k.a. RRM, RBD, or RNP
  misc_feature (51)..(116): Homolog of NCBI NO: 19881711 NR Description: Putative RNA-binding protein [Oryza sativa]
  misc_feature (52)..(152): Homolog of NCBI NO: 21388662 NR Description: glycine-rich RNA-binding protein [Physcomitrella
  misc_feature (51)..(132): Homolog of NCBI NO: 15239958 NR Description: RRM-containing protein
  misc_feature (30)..(131): Homolog of NCBI NO: 34906972 NR Description: putative glycine-rich RNA-binding protein 2
  misc_feature (32)..(146): Homolog of NCBI NO: 15219486 NR Description: RRM-containing RNA-binding protein, putative
  misc_feature (1)..(66): Homolog of NCBI NO: 15226161 NR Description: DEAD/DEAH box RNA helicase, putative; protein id:
  misc_feature (21)..(140): Homolog of NCBI NO: 15224298 NR Description: RRM-containing protein
  misc_feature (14)..(144): Homolog of NCBI NO: 34898598 NR Description: P0534A03.25 [Oryza sativa (japonica
  misc_feature (14)..(146): Homolog of NCBI NO: 38636774 NR Description: putative RNA recognition motif (RRM)-containing
  misc_feature (1)..(152): Homolog of NCBI NO: 15239676 NR Description: RRM-containing protein

SEQ ID NO: 33014 - DNA, 998 bp, Arabidopsis thaliana; identical to SEQ ID NO: 29424
  misc_feature (1)..(998): Ceres Seq. ID no. 12321343
  misc_feature: MA Experiment ID: 20000184 Result: Down-regulated in Transcription
  misc_feature: MA Experiment 20000184 PARAMETER Experiment Name: At_Shoots__P Parameter: Age (day) Value: 7
  misc_feature: MA Experiment 20000184 PARAMETER Experiment Name: At_Shoots__P Parameter: Tissue Value: Shoots vs. Whole Plant

SEQ ID NO: 33015 - protein, 260 aa, Arabidopsis thaliana; identical to SEQ ID NO: 29425
  peptide (1)..(260): Ceres Seq. ID no. 12321344
  misc_feature (60)..(194): Pfam Name: ADP-ribosylation factor family Pfam Description: ADP-ribosylation factor family
  misc_feature (22)..(248): Homolog of NCBI NO: 14042265 NR Description: unnamed protein product [Homo sapiens]
  misc_feature (22)..(248): Homolog of NCBI NO: 27721301 NR Description: similar to signal recognition particle receptor,
  misc_feature (22)..(248): Homolog of NCBI NO: 12842535 NR Description: unnamed protein product [Mus musculus]
  misc_feature (22)..(248): Homolog of NCBI NO: 6678137 NR Description: signal recognition particle receptor, B subunit
  misc_feature (22)..(241): Homolog of NCBI NO: 38174090 NR Description: Unknown (protein for MGC:75930) [Silurana
  misc_feature (22)..(248): Homolog of NCBI NO: 38649415 NR Description: Signal recognition particle receptor, beta
  misc_feature (22)..(248): Homolog of NCBI NO: 31340540 NR Description: Signal recognition particle receptor beta subunit
  misc_feature (19)..(241): Homolog of NCBI NO: 32450191 NR Description: Unknown (protein for MGC:64420) [Xenopus laevis]
  misc_feature (1)..(260): Homolog of NCBI NO: 15239201 NR Description: signal recognition particle receptor beta
  misc_feature (1)..(260): Homolog of NCBI NO: 15224229 NR Description: putative signal recognition particle receptor

SEQ ID NO: 33016 - protein, 173 aa, Arabidopsis thaliana; identical to SEQ ID NO: 29426
  peptide (1)..(173): Ceres Seq. ID no. 12321345
  misc_feature (1)..(107): Pfam Name: ADP-ribosylation factor family Pfam Description: ADP-ribosylation factor family
  misc_feature (1)..(161): Homolog of NCBI NO: 14042265 NR Description: unnamed protein product [Homo sapiens]
  misc_feature (1)..(161): Homolog of NCBI NO: 12842535 NR Description: unnamed protein product [Mus musculus]
  misc_feature (1)..(161): Homolog of NCBI NO: 27721301 NR Description: similar to signal recognition particle receptor,
  misc_feature (1)..(161): Homolog of NCBI NO: 6678137 NR Description: signal recognition particle receptor, B subunit
  misc_feature (1)..(154): Homolog of NCBI NO: 38174090 NR Description: Unknown (protein for MGC:75930) [Silurana
  misc_feature (1)..(161): Homolog of NCBI NO: 38649415 NR Description: Signal recognition particle receptor, beta
  misc_feature (1)..(161): Homolog of NCBI NO: 31340540 NR Description: Signal recognition particle receptor beta subunit
  misc_feature (1)..(154): Homolog of NCBI NO: 32450191 NR Description: Unknown (protein for MGC:64420) [Xenopus laevis]
  misc_feature (1)..(173): Homolog of NCBI NO: 15239201 NR Description: signal recognition particle receptor beta
  misc_feature (1)..(173): Homolog of NCBI NO: 15224229 NR Description: putative signal recognition particle receptor

SEQ ID NO: 33017 - DNA, 1133 bp, Arabidopsis thaliana; identical to SEQ ID NO: 29056
  misc_feature (1)..(1133): Ceres Seq. ID no. 12336045
  misc_feature: MA Experiment ID: 20000182 Result: Down-regulated in Transcription
  misc_feature: MA Experiment 20000182 PARAMETER Experiment Name: At_2mM_SA_P Parameter: Age (day) Value: 14
  misc_feature: MA Experiment 20000182 PARAMETER Experiment Name: At_2mM_SA_P Parameter: Organism Value: A. thaliana
  misc_feature: MA Experiment 20000182 PARAMETER Experiment Name: At_2mM_SA_P Parameter: Plant Line Value: WS
  misc_feature: MA Experiment 20000182 PARAMETER Experiment Name: At_2mM_SA_P Parameter: Timepoint (hr) Value: 6
  misc_feature: MA Experiment 20000182 PARAMETER Experiment Name: At_2mM_SA_P Parameter: Tissue Value: Aerial
  misc_feature: MA Experiment 20000182 PARAMETER Experiment Name: At_2mM_SA_P Parameter: Treatment Value: 2mM SA vs. No Treatment
  misc_feature: MA Experiment ID: 20000184 Result: Up-regulated in Transcription
  misc_feature: MA Experiment 20000184 PARAMETER Experiment Name: At_Shoots__P Parameter: Age (day) Value: 7
  misc_feature: MA Experiment 20000184 PARAMETER Experiment Name: At_Shoots__P Parameter: Tissue Value: Shoots vs. Whole Plant
  misc_feature: MA Experiment ID: 20000234 Result: Down-regulated in Transcription
  misc_feature: MA Experiment 20000234 PARAMETER Experiment Name: At_Siliques_P Parameter: Age (day) Value: 21
  misc_feature: MA Experiment 20000234 PARAMETER Experiment Name: At_Siliques_P Parameter: Organism Value: A. thaliana
  misc_feature: MA Experiment 20000234 PARAMETER Experiment Name: At_Siliques_P Parameter: Plant Line Value: WS
  misc_feature: MA Experiment 20000234 PARAMETER Experiment Name: At_Siliques_P Parameter: Tissue Value: Less Than 5mm Siliques vs. Whole Plant
  misc_feature: MA Experiment ID: 20000235 Result: Down-regulated in Transcription
  misc_feature: MA Experiment 20000235 PARAMETER Experiment Name: At_Siliques_P Parameter: Age (day) Value: 21
  misc_feature: MA Experiment 20000235 PARAMETER Experiment Name: At_Siliques_P Parameter: Organism Value: A. thaliana
  misc_feature: MA Experiment 20000235 PARAMETER Experiment Name: At_Siliques_P Parameter: Plant Line Value: WS
  misc_feature: MA Experiment 20000235 PARAMETER Experiment Name: At_Siliques_P Parameter: Tissue Value: 5-10mm Siliques vs. Whole Plant
  misc_feature: MA Experiment ID: 20000264 Result: Down-regulated in Transcription
  misc_feature: MA Experiment 20000264 PARAMETER Experiment Name: At_Open_Flower_P Parameter: Age (day) Value: 21
  misc_feature: MA Experiment 20000264 PARAMETER Experiment Name: At_Open_Flower_P Parameter: Plant Line Value: WS
  misc_feature: MA Experiment 20000264 PARAMETER Experiment Name: At_Open_Flower_P Parameter: Tissue Value: Open Flower vs. Whole Plant
  misc_feature: MA Experiment ID: 20000265 Result: Down-regulated in Transcription
  misc_feature: MA Experiment 20000265 PARAMETER Experiment Name: At_Open_Flower_P Parameter: Age (day) Value: 21
  misc_feature: MA Experiment 20000265 PARAMETER Experiment Name: At_Open_Flower_P Parameter: Plant Line Value: WS
  misc_feature: MA Experiment 20000265 PARAMETER Experiment Name: At_Open_Flower_P Parameter: Tissue Value: Closed Flower vs. Whole Plant
  misc_feature: MA Experiment ID: 20000308 Result: Down-regulated in Transcription
  misc_feature: MA Experiment 20000308 PARAMETER Experiment Name: At_100mM_NaCl__P Parameter: Age (day) Value: 17
  misc_feature: MA Experiment 20000308 PARAMETER Experiment Name: At_100mM_NaCl__P Parameter: Organism Value: A. thaliana
  misc_feature: MA Experiment 20000308 PARAMETER Experiment Name: At_100mM_NaCl__P Parameter: Plant Line Value: WS
  misc_feature: MA Experiment 20000308 PARAMETER Experiment Name: At_100mM_NaCl__P Parameter: Timepoint (hr) Value: 72
  misc_feature: MA Experiment 20000308 PARAMETER Experiment Name: At_100mM_NaCl__P Parameter: Tissue Value: Whole Plant
  misc_feature: MA Experiment 20000308 PARAMETER Experiment Name: At_100mM_NaCl__P Parameter: Treatment Value: 100mM NaCl vs. No Treatment
  misc_feature: MA Experiment ID: 20001247 Result: Up-regulated in Transcription
  misc_feature: MA Experiment 20001247 PARAMETER Experiment Name: At_Far-red-induction_P Parameter: Age (day) Value: 7
  misc_feature: MA Experiment 20001247 PARAMETER Experiment Name: At_Far-red-induction_P Parameter: Light Value: Far-red vs. White
  misc_feature: MA Experiment 20001247 PARAMETER Experiment Name: At_Far-red-induction_P Parameter: Organism Value: A. thaliana
  misc_feature: MA Experiment 20001247 PARAMETER Experiment Name: At_Far-red-induction_P Parameter: Plant Line Value: Columbia
  misc_feature: MA Experiment 20001247 PARAMETER Experiment Name: At_Far-red-induction_P Parameter: Timepoint (hr) Value: 1
  misc_feature: MA Experiment 20001247 PARAMETER Experiment Name: At_Far-red-induction_P Parameter: Tissue Value: Whole Plant
  misc_feature: MA Experiment ID: 20001450 Result: Up-regulated in Transcription
  misc_feature: MA Experiment 20001450 PARAMETER Experiment Name: At_Far-red-induction_P Parameter: Age (day) Value: 7
  misc_feature: MA Experiment 20001450 PARAMETER Experiment Name: At_Far-red-induction_P Parameter: Light Value: Far-red vs. White
  misc_feature: MA Experiment 20001450 PARAMETER Experiment Name: At_Far-red-induction_P Parameter: Organism Value: A. thaliana
  misc_feature: MA Experiment 20001450 PARAMETER Experiment Name: At_Far-red-induction_P Parameter: Plant Line Value: Columbia
  misc_feature: MA Experiment 20001450 PARAMETER Experiment Name: At_Far-red-induction_P Parameter: Timepoint (hr) Value: 8
  misc_feature: MA Experiment 20001450 PARAMETER Experiment Name: At_Far-red-induction_P Parameter: Tissue Value: Whole Plant
  misc_feature: MA Experiment ID: 20001451 Result: Up-regulated in Transcription
  misc_feature: MA Experiment 20001451 PARAMETER Experiment Name: At_Far-red-induction_P Parameter: Age (day) Value: 7
  misc_feature: MA Experiment 20001451 PARAMETER Experiment Name: At_Far-red-induction_P Parameter: Light Value: Far-red vs. White
  misc_feature: MA Experiment 20001451 PARAMETER Experiment Name: At_Far-red-induction_P Parameter: Organism Value: A. thaliana
  misc_feature: MA Experiment 20001451 PARAMETER Experiment Name: At_Far-red-induction_P Parameter: Plant Line Value: Columbia
  misc_feature: MA Experiment 20001451 PARAMETER Experiment Name: At_Far-red-induction_P Parameter: Timepoint (hr) Value: 24
  misc_feature: MA Experiment 20001451 PARAMETER Experiment Name: At_Far-red-induction_P Parameter: Tissue Value: Whole Plant
  misc_feature: MA Experiment ID: 20001555 Result: Down-regulated in Transcription
  misc_feature: MA Experiment 20001555 PARAMETER Experiment Name: At_Drought_Soil_Dry_P Parameter: Age (day) Value: 24
  misc_feature: MA Experiment 20001555 PARAMETER Experiment Name: At_Drought_Soil_Dry_P Parameter: Organism Value: A. thaliana
  misc_feature: MA Experiment 20001555 PARAMETER Experiment Name: At_Drought_Soil_Dry_P Parameter: Plant Line Value: WS
  misc_feature: MA Experiment 20001555 PARAMETER Experiment Name: At_Drought_Soil_Dry_P Parameter: Post Timepoint (hr) Value: None
  misc_feature: MA Experiment 20001555 PARAMETER Experiment Name: At_Drought_Soil_Dry_P Parameter: Post-Treatment Value: None
  misc_feature: MA Experiment 20001555 PARAMETER Experiment Name: At_Drought_Soil_Dry_P Parameter: Timepoint (day) Value: 10
  misc_feature: MA Experiment 20001555 PARAMETER Experiment Name: At_Drought_Soil_Dry_P Parameter: Treatment Value: Drought vs. No Drought
  misc_feature: MA Experiment ID: 20001556 Result: Down-regulated in Transcription
  misc_feature: MA Experiment 20001556 PARAMETER Experiment Name: At_Drought_Soil_Dry_P Parameter: Age (day) Value: 26
  misc_feature: MA Experiment 20001556 PARAMETER Experiment Name: At_Drought_Soil_Dry_P Parameter: Organism Value: A. thaliana
  misc_feature: MA Experiment 20001556 PARAMETER Experiment Name: At_Drought_Soil_Dry_P Parameter: Plant Line Value: WS
  misc_feature: MA Experiment 20001556 PARAMETER Experiment Name: At_Drought_Soil_Dry_P Parameter: Post Timepoint (hr) Value: None
  misc_feature: MA Experiment 20001556 PARAMETER Experiment Name: At_Drought_Soil_Dry_P Parameter: Post-Treatment Value: None
  misc_feature: MA Experiment 20001556 PARAMETER Experiment Name: At_Drought_Soil_Dry_P Parameter: Timepoint (day) Value: 12
  misc_feature: MA Experiment 20001556 PARAMETER Experiment Name: At_Drought_Soil_Dry_P Parameter: Treatment Value: Drought vs. No Drought
  misc_feature: MA Experiment ID: 20001558 Result: Down-regulated in Transcription
  misc_feature: MA Experiment 20001558 PARAMETER Experiment Name: At_Drought_Soil_Dry_P Parameter: Age (day) Value: 27
  misc_feature: MA Experiment 20001558 PARAMETER Experiment Name: At_Drought_Soil_Dry_P Parameter: Organism Value: A. thaliana
  misc_feature: MA Experiment 20001558 PARAMETER Experiment Name: At_Drought_Soil_Dry_P Parameter: Plant Line Value: WS
  misc_feature: MA Experiment 20001558 PARAMETER Experiment Name: At_Drought_Soil_Dry_P Parameter: Post Timepoint (hr) Value: 6
  misc_feature: MA Experiment 20001558 PARAMETER Experiment Name: At_Drought_Soil_Dry_P Parameter: Post-Treatment Value: Re-Water vs. No Drought
  misc_feature: MA Experiment 20001558 PARAMETER Experiment Name: At_Drought_Soil_Dry_P Parameter: Timepoint (day) Value: 13
  misc_feature: MA Experiment 20001558 PARAMETER Experiment Name: At_Drought_Soil_Dry_P Parameter: Treatment Value: Drought vs. No Drought
  misc_feature: MA Experiment ID: 20001904 Result: Down-regulated in Transcription
  misc_feature: MA Experiment 20001904 PARAMETER Experiment Name: At_Drought_Reproduction_P Parameter: Age (day) Value: 37
  misc_feature: MA Experiment 20001904 PARAMETER Experiment Name: At_Drought_Reproduction_P Parameter: Organism Value: A. thaliana
  misc_feature: MA Experiment 20001904 PARAMETER Experiment Name: At_Drought_Reproduction_P Parameter: Plant Line Value: WS
  misc_feature: MA Experiment 20001904 PARAMETER Experiment Name: At_Drought_Reproduction_P Parameter: Timepoint (day) Value: 7
  misc_feature: MA Experiment 20001904 PARAMETER Experiment Name: At_Drought_Reproduction_P Parameter: Tissue Value: Rosettes
  misc_feature: MA Experiment 20001904 PARAMETER Experiment Name: At_Drought_Reproduction_P Parameter: Treatment Value: Drought vs. No Drought

SEQ ID NO: 33018 - protein, 285 aa, Arabidopsis thaliana; identical to SEQ ID NO: 29057
  peptide (1)..(285): Ceres Seq. ID no. 12336046
  misc_feature (20)..(284): Pfam Name: Plant protein of unknown function (DUF868) Pfam Description: Plant protein of unknown function (DUF868)
  misc_feature (20)..(284): Pfam Name: Plant protein of unknown function (DUF868) Pfam Description: Plant protein of unknown function (DUF868)
  misc_feature (20)..(284): Pfam Name: Plant protein of unknown function (DUF868) Pfam Description: Plant protein of unknown function (DUF868)
  misc_feature (21)..(285): Homolog of NCBI NO: 18397034 NR Description: expressed protein
  misc_feature (21)..(285): Homolog of NCBI NO: 15241702 NR Description: putative protein
  misc_feature (25)..(283): Homolog of NCBI NO: 22331055 NR Description: hypothetical protein; protein id: At3g13229.1
  misc_feature (1)..(65): Homolog of NCBI NO: 20804936 NR Description: P0456E05.14 [Oryza sativa (japonica
  misc_feature (70)..(285): Homolog of NCBI NO: 20804936 NR Description: P0456E05.14 [Oryza sativa (japonica
  misc_feature (21)..(285): Homolog of NCBI NO: 18397034 NR Description: expressed protein
  misc_feature (25)..(283): Homolog of NCBI NO: 22331055 NR Description: hypothetical protein; protein id: At3g13229.1
  misc_feature (70)..(285): Homolog of NCBI NO: 20804936 NR Description: P0456E05.14 [Oryza sativa (japonica
  misc_feature (1)..(65): Homolog of NCBI NO: 20804936 NR Description: P0456E05.14 [Oryza sativa (japonica
  misc_feature (25)..(283): Homolog of NCBI NO: 22331055 NR Description: hypothetical protein; protein id: At3g13229.1
  misc_feature (21)..(285): Homolog of NCBI NO: 15241702 NR Description: putative protein
  misc_feature (21)..(285): Homolog of NCBI NO: 18397034 NR Description: expressed protein
  misc_feature (1)..(285): Homolog of NCBI NO: 15235452 NR Description: putative protein
  misc_feature (4)..(259): Homolog of NCBI NO: 15228105 NR Description: hypothetical protein; protein id: At2g04220.1
  misc_feature (1)..(250): Homolog of NCBI NO: 15238927 NR Description: putative protein; protein id: At5g48270.1
  misc_feature (251)..(285): Homolog of NCBI NO: 15238927 NR Description: putative protein; protein id: At5g48270.1
  misc_feature (58)..(259): Homolog of NCBI NO: 25334990 NR Description: hypothetical protein At2g04220 [imported] -
  misc_feature (1)..(285): Homolog of NCBI NO: 15235452 NR Description: putative protein
  misc_feature (4)..(259): Homolog of NCBI NO: 15228105 NR Description: hypothetical protein; protein id: At2g04220.1
  misc_feature (1)..(250): Homolog of NCBI NO: 15238927 NR Description: putative protein; protein id: At5g48270.1
  misc_feature (251)..(285): Homolog of NCBI NO: 15238927 NR Description: putative protein; protein id: At5g48270.1
  misc_feature (58)..(259): Homolog of NCBI NO: 25334990 NR Description: hypothetical protein At2g04220 [imported] -
  misc_feature (70)..(285): Homolog of NCBI NO: 20804936 NR Description: P0456E05.14 [Oryza sativa (japonica
  misc_feature (1)..(65): Homolog of NCBI NO: 20804936 NR Description: P0456E05.14 [Oryza sativa (japonica
  misc_feature (21)..(285): Homolog of NCBI NO: 15241702 NR Description: putative protein
  misc_feature (58)..(259): Homolog of NCBI NO: 25334990 NR Description: hypothetical protein At2g04220 [imported] -
  misc_feature (251)..(285): Homolog of NCBI NO: 15238927 NR Description: putative protein; protein id: At5g48270.1
  misc_feature (1)..(250): Homolog of NCBI NO: 15238927 NR Description: putative protein; protein id: At5g48270.1
  misc_feature (4)..(259): Homolog of NCBI NO: 15228105 NR Description: hypothetical protein; protein id: At2g04220.1
  misc_feature (1)..(285): Homolog of NCBI NO: 15235452 NR Description: putative protein

SEQ ID NO: 33019 - protein, 251 aa, Arabidopsis thaliana; identical to SEQ ID NO: 29058
  peptide (1)..(251): Ceres Seq. ID no. 12336047
  misc_feature (1)..(250): Pfam Name: Plant protein of unknown function (DUF868) Pfam Description: Plant protein of unknown function (DUF868)
  misc_feature (1)..(250): Pfam Name: Plant protein of unknown function (DUF868) Pfam Description: Plant protein of unknown function (DUF868)
  misc_feature (1)..(250): Pfam Name: Plant protein of unknown function (DUF868) Pfam Description: Plant protein of unknown function (DUF868)
  misc_feature (1)..(251): Homolog of NCBI NO: 18397034 NR Description: expressed protein
  misc_feature (1)..(251): Homolog of NCBI NO: 15241702 NR Description: putative protein
  misc_feature (1)..(249): Homolog of NCBI NO: 22331055 NR Description: hypothetical protein; protein id: At3g13229.1
  misc_feature (1)..(31): Homolog of NCBI NO: 20804936 NR Description: P0456E05.14 [Oryza sativa (japonica
  misc_feature (36)..(251): Homolog of NCBI NO: 20804936 NR Description: P0456E05.14 [Oryza sativa (japonica
  misc_feature (1)..(251): Homolog of NCBI NO: 18397034 NR Description: expressed protein
  misc_feature (1)..(249): Homolog of NCBI NO: 22331055 NR Description: hypothetical protein; protein id: At3g13229.1
  misc_feature (36)..(251): Homolog of NCBI NO: 20804936 NR Description: P0456E05.14 [Oryza sativa (japonica
  misc_feature (1)..(31): Homolog of NCBI NO: 20804936 NR Description: P0456E05.14 [Oryza sativa (japonica
  misc_feature (1)..(249): Homolog of NCBI NO: 22331055 NR Description: hypothetical protein; protein id: At3g13229.1
  misc_feature (1)..(251): Homolog of NCBI NO: 15241702 NR Description: putative protein
  misc_feature (1)..(251): Homolog of NCBI NO: 18397034 NR Description: expressed protein
  misc_feature (1)..(251): Homolog of NCBI NO: 15235452 NR Description: putative protein
  misc_feature (1)..(225): Homolog of NCBI NO: 15228105 NR Description: hypothetical protein; protein id: At2g04220.1
  misc_feature (1)..(216): Homolog of NCBI NO: 15238927 NR Description: putative protein; protein id: At5g48270.1
  misc_feature (217)..(251): Homolog of NCBI NO: 15238927 NR Description: putative protein; protein id: At5g48270.1
  misc_feature (24)..(225): Homolog of NCBI NO: 25334990 NR Description: hypothetical protein At2g04220 [imported] -
  misc_feature (1)..(251): Homolog of NCBI NO: 15235452 NR Description: putative protein
  misc_feature (1)..(225): Homolog of NCBI NO: 15228105 NR Description: hypothetical protein; protein id: At2g04220.1
  misc_feature (1)..(216): Homolog of NCBI NO: 15238927 NR Description: putative protein; protein id: At5g48270.1
  misc_feature (217)..(251): Homolog of NCBI NO: 15238927 NR Description: putative protein; protein id: At5g48270.1
  misc_feature (24)..(225): Homolog of NCBI NO: 25334990 NR Description: hypothetical protein At2g04220 [imported] -
  misc_feature (36)..(251): Homolog of NCBI NO: 20804936 NR Description: P0456E05.14 [Oryza sativa (japonica
  misc_feature (1)..(31): Homolog of NCBI NO: 20804936 NR Description: P0456E05.14 [Oryza sativa (japonica
  misc_feature (1)..(251): Homolog of NCBI NO: 15241702 NR Description: putative protein
  misc_feature (24)..(225): Homolog of NCBI NO: 25334990 NR Description: hypothetical protein At2g04220 [imported] -
  misc_feature (217)..(251): Homolog of NCBI NO: 15238927 NR Description: putative protein; protein id: At5g48270.1
  misc_feature (1)..(216): Homolog of NCBI NO: 15238927 NR Description: putative protein; protein id: At5g48270.1
  misc_feature (1)..(225): Homolog of NCBI NO: 15228105 NR Description: hypothetical protein; protein id: At2g04220.1
  misc_feature (1)..(251): Homolog of NCBI NO: 15235452 NR Description: putative protein

SEQ ID NO: 33020 - protein, 235 aa, Arabidopsis thaliana; identical to SEQ ID NO: 29059
  peptide (1)..(235): Ceres Seq. ID no. 12336048
  misc_feature (1)..(234): Pfam Name: Plant protein of unknown function (DUF868) Pfam Description: Plant protein of unknown function (DUF868)
  misc_feature (1)..(234): Pfam Name: Plant protein of unknown function (DUF868) Pfam Description: Plant protein of unknown function (DUF868)
  misc_feature (1)..(234): Pfam Name: Plant protein of unknown function (DUF868) Pfam Description: Plant protein of unknown function (DUF868)
  misc_feature (1)..(235): Homolog of NCBI NO: 18397034 NR Description: expressed protein
  misc_feature (1)..(235): Homolog of NCBI NO: 15241702 NR Description: putative protein
  misc_feature (1)..(233): Homolog of NCBI NO: 22331055 NR Description: hypothetical protein; protein id: At3g13229.1
  misc_feature (1)..(15): Homolog of NCBI NO: 20804936 NR Description: P0456E05.14 [Oryza sativa (japonica
  misc_feature (20)..(235): Homolog of NCBI NO: 20804936 NR Description: P0456E05.14 [Oryza sativa (japonica
  misc_feature (1)..(235): Homolog of NCBI NO: 18397034 NR Description: expressed protein
  misc_feature (1)..(233): Homolog of NCBI NO: 22331055 NR Description: hypothetical protein; protein id: At3g13229.1
  misc_feature (20)..(235): Homolog of NCBI NO: 20804936 NR Description: P0456E05.14 [Oryza sativa (japonica
  misc_feature (1)..(15): Homolog of NCBI NO: 20804936 NR Description: P0456E05.14 [Oryza sativa (japonica
  misc_feature (1)..(233): Homolog of NCBI NO: 22331055 NR Description: hypothetical protein; protein id: At3g13229.1
  misc_feature (1)..(235): Homolog of NCBI NO: 15241702 NR Description: putative protein
  misc_feature (1)..(235): Homolog of NCBI NO: 18397034 NR Description: expressed protein
  misc_feature (1)..(235): Homolog of NCBI NO: 15235452 NR Description: putative protein
  misc_feature (1)..(209): Homolog of NCBI NO: 15228105 NR Description: hypothetical protein; protein id: At2g04220.1
  misc_feature (1)..(200): Homolog of NCBI NO: 15238927 NR Description: putative protein; protein id: At5g48270.1
  misc_feature (201)..(235): Homolog of NCBI NO: 15238927 NR Description: putative protein; protein id: At5g48270.1
  misc_feature (8)..(209): Homolog of NCBI NO: 25334990 NR Description: hypothetical protein At2g04220 [imported] -
  misc_feature (1)..(235): Homolog of NCBI NO: 15235452 NR Description: putative protein
  misc_feature (1)..(209): Homolog of NCBI NO: 15228105 NR Description: hypothetical protein; protein id: At2g04220.1
  misc_feature (1)..(200): Homolog of NCBI NO: 15238927 NR Description: putative protein; protein id: At5g48270.1
  misc_feature (201)..(235): Homolog of NCBI NO: 15238927 NR Description: putative protein; protein id: At5g48270.1
  misc_feature (8)..(209): Homolog of NCBI NO: 25334990 NR Description: hypothetical protein At2g04220 [imported] -
  misc_feature (20)..(235): Homolog of NCBI NO: 20804936 NR Description: P0456E05.14 [Oryza sativa (japonica
  misc_feature (1)..(15): Homolog of NCBI NO: 20804936 NR Description: P0456E05.14 [Oryza sativa (japonica
  misc_feature (1)..(235): Homolog of NCBI NO: 15241702 NR Description: putative protein
  misc_feature (8)..(209): Homolog of NCBI NO: 25334990 NR Description: hypothetical protein At2g04220 [imported] -
  misc_feature (201)..(235): Homolog of NCBI NO: 15238927 NR Description: putative protein; protein id: At5g48270.1
  misc_feature (1)..(200): Homolog of NCBI NO: 15238927 NR Description: putative protein; protein id: At5g48270.1
  misc_feature (1)..(209): Homolog of NCBI NO: 15228105 NR Description: hypothetical protein; protein id: At2g04220.1
  misc_feature (1)..(235): Homolog of NCBI NO: 15235452 NR Description: putative protein

SEQ ID NO: 33021 - DNA, 1311 bp, Arabidopsis thaliana; identical to SEQ ID NO: 29431
  misc_feature (1)..(1311): Ceres Seq. ID no. 12580230
  misc_feature: MA Experiment ID: 20000184 Result: Down-regulated in Transcription
  misc_feature: MA Experiment 20000184 PARAMETER Experiment Name: At_Shoots__P Parameter: Age (day) Value: 7
  misc_feature: MA Experiment 20000184 PARAMETER Experiment Name: At_Shoots__P Parameter: Tissue Value: Shoots vs. Whole Plant
  misc_feature: MA Experiment ID: 20000227 Result: Up-regulated in Transcription
  misc_feature: MA Experiment 20000227 PARAMETER Experiment Name: At_Root-Tips-vs-Tops_P Parameter: Tissue Value: Root Tips vs. Root Tops

SEQ ID NO: 33022 - protein, 366 aa, Arabidopsis thaliana; identical to SEQ ID NO: 29432
  peptide (1)..(366): Ceres Seq. ID no. 12580231
  misc_feature (271)..(333): Pfam Name: SNARE domain Pfam Description: SNARE domain
  misc_feature (63)..(358): Homolog of NCBI NO: 15220328 NR Description: syntaxin SYP125; protein id: At1g11250.1
  misc_feature (63)..(366): Homolog of NCBI NO: 15231205 NR Description: syntaxin SYP122
  misc_feature (63)..(366): Homolog of NCBI NO: 11358871 NR Description: syntaxin synt4 [imported] - Arabidopsis thaliana
  misc_feature (63)..(366): Homolog of NCBI NO: 15229865 NR Description: syntaxin SYP121
  misc_feature (63)..(362): Homolog of NCBI NO: 4206787 NR Description: syntaxin-related protein Nt-syr1 [Nicotiana
  misc_feature (63)..(362): Homolog of NCBI NO: 34899960 NR Description: P0428D12.21 [Oryza sativa (japonica
  misc_feature (63)..(362): Homolog of NCBI NO: 33146794 NR Description: putative syntaxin-related protein
  misc_feature (63)..(365): Homolog of NCBI NO: 15228637 NR Description: syntaxin SYP131; protein id: At3g03800.1
  misc_feature (63)..(366): Homolog of NCBI NO: 11358872 NR Description: syntaxin-like protein - Arabidopsis thaliana
  misc_feature (63)..(366): Homolog of NCBI NO: 18415701 NR Description: syntaxin SYP132

SEQ ID NO: 33023 - protein, 304 aa, Arabidopsis thaliana; identical to SEQ ID NO: 29433
  peptide (1)..(304): Ceres Seq. ID no. 12580232
  misc_feature (209)..(271): Pfam Name: SNARE domain Pfam Description: SNARE domain
  misc_feature (1)..(296): Homolog of NCBI NO: 15220328 NR Description: syntaxin SYP125; protein id: At1g11250.1
  misc_feature (1)..(304): Homolog of NCBI NO: 15231205 NR Description: syntaxin SYP122
  misc_feature (1)..(304): Homolog of NCBI NO: 11358871 NR Description: syntaxin synt4 [imported] - Arabidopsis thaliana
  misc_feature (1)..(304): Homolog of NCBI NO: 15229865 NR Description: syntaxin SYP121
  misc_feature (1)..(300): Homolog of NCBI NO: 4206787 NR Description: syntaxin-related protein Nt-syr1 [Nicotiana
  misc_feature (1)..(300): Homolog of NCBI NO: 34899960 NR Description: P0428D12.21 [Oryza sativa (japonica
  misc_feature (1)..(300): Homolog of NCBI NO: 33146794 NR Description: putative syntaxin-related protein
  misc_feature (1)..(303): Homolog of NCBI NO: 15228637 NR Description: syntaxin SYP131; protein id: At3g03800.1
  misc_feature (1)..(304): Homolog of NCBI NO: 11358872 NR Description: syntaxin-like protein - Arabidopsis thaliana
  misc_feature (1)..(304): Homolog of NCBI NO: 18415701 NR Description: syntaxin SYP132

SEQ ID NO: 33024 - protein, 231 aa, Arabidopsis thaliana; identical to SEQ ID NO: 29434
  peptide (1)..(231): Ceres Seq. ID no. 12580233
  misc_feature (136)..(198): Pfam Name: SNARE domain Pfam Description: SNARE domain
  misc_feature (1)..(223): Homolog of NCBI NO: 15220328 NR Description: syntaxin SYP125; protein id: At1g11250.1
  misc_feature (1)..(231): Homolog of NCBI NO: 15231205 NR Description: syntaxin SYP122
  misc_feature (1)..(231): Homolog of NCBI NO: 11358871 NR Description: syntaxin synt4 [imported] - Arabidopsis thaliana
  misc_feature (1)..(231): Homolog of NCBI NO: 15229865 NR Description: syntaxin SYP121
  misc_feature (1)..(227): Homolog of NCBI NO: 4206787 NR Description: syntaxin-related protein Nt-syr1 [Nicotiana
  misc_feature (1)..(227): Homolog of NCBI NO: 34899960 NR Description: P0428D12.21 [Oryza sativa (japonica
  misc_feature (1)..(227): Homolog of NCBI NO: 33146794 NR Description: putative syntaxin-related protein
  misc_feature (1)..(230): Homolog of NCBI NO: 15228637 NR Description: syntaxin SYP131; protein id: At3g03800.1
  misc_feature (1)..(231): Homolog of NCBI NO: 11358872 NR Description: syntaxin-like protein - Arabidopsis thaliana
  misc_feature (1)..(231): Homolog of NCBI NO: 18415701 NR Description: syntaxin SYP132

SEQ ID NO: 33025 - DNA, 1189 bp, Arabidopsis thaliana; identical to SEQ ID NO: 29435
  misc_feature (1)..(1189): Ceres Seq. ID no. 12371708
  misc_feature: MA Experiment ID: 20000184 Result: Down-regulated in Transcription
  misc_feature: MA Experiment 20000184 PARAMETER Experiment Name: At_Shoots__P Parameter: Age (day) Value: 7
  misc_feature: MA Experiment 20000184 PARAMETER Experiment Name: At_Shoots__P Parameter: Tissue Value: Shoots vs. Whole Plant
  misc_feature: Phenotype: ROSETTE LEAVES Curled-Curled 3
  misc_feature: Phenotype: ROSETTE LEAVES Curled-Curled 3
  misc_feature: Phenotype: ROSETTE LEAVES Curled-Curled 3
  misc_feature: Phenotype: ROSETTE LEAVES Curled-Curled 3
  misc_feature: Phenotype: ROSETTE LEAVES Curled-Curled 3
  misc_feature: Phenotype: ROSETTE LEAVES Curled-Curled 3
  misc_feature: Phenotype: ROSETTE LEAVES Curled-Curled 3
  misc_feature: Phenotype: ROSETTE LEAVES Curled-Curled 3

SEQ ID NO: 33026 - protein, 240 aa, Arabidopsis thaliana; identical to SEQ ID NO: 29436
  peptide (1)..(240): Ceres Seq. ID no. 12371709
  misc_feature (17)..(140): Pfam Name: Eukaryotic protein of unknown function (DUF862) Pfam Description: Eukaryotic protein of unknown function (DUF862)
  misc_feature (1)..(169): Homolog of NCBI NO: 15238059 NR Description: putative protein; protein id: At5g47310.1
  misc_feature (3)..(224): Homolog of NCBI NO: 9802596 NR Description: T2E6.19 [Arabidopsis thaliana]
  misc_feature (3)..(224): Homolog of NCBI NO: 21593644 NR Description: unknown [Arabidopsis thaliana]
  misc_feature (3)..(224): Homolog of NCBI NO: 18401869 NR Description: expressed protein
  misc_feature (1)..(217): Homolog of NCBI NO: 25354458 NR Description: hypothetical protein F23A5.4 [imported] -
  misc_feature (1)..(217): Homolog of NCBI NO: 18412886 NR Description: expressed protein
  misc_feature (1)..(213): Homolog of NCBI NO: 18420889 NR Description: putative protein
  misc_feature (1)..(240): Homolog of NCBI NO: 15236618 NR Description: putative protein; protein id: At4g31980.1
  misc_feature (1)..(240): Homolog of NCBI NO: 17529024 NR Description: unknown protein [Arabidopsis thaliana]
  misc_feature (1)..(240): Homolog of NCBI NO: 18400749 NR Description: expressed protein

SEQ ID NO: 33027 - protein, 212 aa, Arabidopsis thaliana; identical to SEQ ID NO: 29437
  peptide (1)..(212): Ceres Seq. ID no. 12371710
  misc_feature (1)..(112): Pfam Name: Eukaryotic protein of unknown function (DUF862) Pfam Description: Eukaryotic protein of unknown function (DUF862)
  misc_feature (1)..(141): Homolog of NCBI NO: 15238059 NR Description: putative protein; protein id: At5g47310.1
  misc_feature (1)..(196): Homolog of NCBI NO: 9802596 NR Description: T2E6.19 [Arabidopsis thaliana]
  misc_feature (1)..(196): Homolog of NCBI NO: 21593644 NR Description: unknown [Arabidopsis thaliana]
  misc_feature (1)..(196): Homolog of NCBI NO: 18401869 NR Description: expressed protein
  misc_feature (1)..(189): Homolog of NCBI NO: 25354458 NR Description: hypothetical protein F23A5.4 [imported] -
  misc_feature (1)..(189): Homolog of NCBI NO: 18412886 NR Description: expressed protein
  misc_feature (1)..(185): Homolog of NCBI NO: 18420889 NR Description: putative protein
  misc_feature (1)..(212): Homolog of NCBI NO: 15236618 NR Description: putative protein; protein id: At4g31980.1
  misc_feature (1)..(212): Homolog of NCBI NO: 17529024 NR Description: unknown protein [Arabidopsis thaliana]
  misc_feature (1)..(212): Homolog of NCBI NO: 18400749 NR Description: expressed protein

SEQ ID NO: 33028 - protein, 144 aa, Arabidopsis thaliana; identical to SEQ ID NO: 29438
  peptide (1)..(144): Ceres Seq. ID no. 12371711
  misc_feature (1)..(73): Homolog of NCBI NO: 15238059 NR Description: putative protein; protein id: At5g47310.1
  misc_feature (1)..(128): Homolog of NCBI NO: 9802596 NR Description: T2E6.19 [Arabidopsis thaliana]
  misc_feature (1)..(128): Homolog of NCBI NO: 21593644 NR Description: unknown [Arabidopsis thaliana]
  misc_feature (1)..(128): Homolog of NCBI NO: 18401869 NR Description: expressed protein
  misc_feature (1)..(121): Homolog of NCBI NO: 25354458 NR Description: hypothetical protein F23A5.4 [imported] -
  misc_feature (1)..(121): Homolog of NCBI NO: 18412886 NR Description: expressed protein
  misc_feature (1)..(117): Homolog of NCBI NO: 18420889 NR Description: putative protein
  misc_feature (1)..(144): Homolog of NCBI NO: 15236618 NR Description: putative protein; protein id: At4g31980.1
  misc_feature (1)..(144): Homolog of NCBI NO: 17529024 NR Description: unknown protein [Arabidopsis thaliana]
  misc_feature (1)..(144): Homolog of NCBI NO: 18400749 NR Description: expressed protein

SEQ ID NO: 33029 - DNA, 1608 bp, Arabidopsis thaliana; identical to SEQ ID NO: 29439
  misc_feature (1)..(1608): Ceres Seq. ID no. 13499783
  misc_feature: MA Experiment ID: 20000327 Result: Up-regulated in Transcription
  misc_feature: MA Experiment 20000327 PARAMETER Experiment Name: At_42deg_Heat_Sub_P Parameter: Age (day) Value: 14
  misc_feature: MA Experiment 20000327 PARAMETER Experiment Name: At_42deg_Heat_Sub_P Parameter: Organism Value: A. thaliana
  misc_feature: MA Experiment 20000327 PARAMETER Experiment Name: At_42deg_Heat_Sub_P Parameter: Plant Line Value: WS
  misc_feature: MA Experiment 20000327 PARAMETER Experiment Name: At_42deg_Heat_Sub_P Parameter: Temperature (deg C) Value: 42 vs. 22
  misc_feature: MA Experiment 20000327 PARAMETER Experiment Name: At_42deg_Heat_Sub_P Parameter: Timepoint (hr) Value: 1
  misc_feature: MA Experiment 20000327 PARAMETER Experiment Name: At_42deg_Heat_Sub_P Parameter: Tissue Value: Aerial
  misc_feature: MA Experiment ID: 20000328 Result: Up-regulated in Transcription
  misc_feature: MA Experiment 20000328 PARAMETER Experiment Name: At_42deg_Heat_Sub_P Parameter: Age (day) Value: 14
  misc_feature: MA Experiment 20000328 PARAMETER Experiment Name: At_42deg_Heat_Sub_P Parameter: Organism Value: A. thaliana
  misc_feature: MA Experiment 20000328 PARAMETER Experiment Name: At_42deg_Heat_Sub_P Parameter: Plant Line Value: WS
  misc_feature: MA Experiment 20000328 PARAMETER Experiment Name: At_42deg_Heat_Sub_P Parameter: Temperature (deg C) Value: 42 vs. 22
  misc_feature: MA Experiment 20000328 PARAMETER Experiment Name: At_42deg_Heat_Sub_P Parameter: Timepoint (hr) Value: 6
  misc_feature: MA Experiment 20000328 PARAMETER Experiment Name: At_42deg_Heat_Sub_P Parameter: Tissue Value: Aerial
  misc_feature: MA Experiment ID: 20000440 Result: Down-regulated in Transcription
  misc_feature: MA Experiment 20000440 PARAMETER Experiment Name: At_Closed-Flower__Sub_P Parameter: Tissue Value: Closed Flower vs. Whole Plant
  misc_feature: MA Experiment ID: 20001807 Result: Down-regulated in Transcription
  misc_feature: MA Experiment 20001807 PARAMETER Experiment Name: At_50mM_NH4NO3_L-to-H_Sub_P Parameter: Timepoint (hr) Value: 6
  misc_feature: MA Experiment 20001807 PARAMETER Experiment Name: At_50mM_NH4NO3_L-to-H_Sub_P Parameter: Tissue Value: Leaf
  misc_feature: MA Experiment 20001807 PARAMETER Experiment Name: At_50mM_NH4NO3_L-to-H_Sub_P Parameter: Treatment Value: 50mM NH4NO3 vs 100mM Mannitol

SEQ ID NO: 33030 - protein, 479 aa, Arabidopsis thaliana; identical to SEQ ID NO: 29440
  peptide (1)..(479): Ceres Seq. ID no. 13499784
  misc_feature (23)..(96): Pfam Name: Ubiquitin family Pfam Description: Ubiquitin family
  misc_feature (23)..(478): Homolog of NCBI NO: 902584 NR Description: polyubiquitin containing 7 ubiquitin monomers
  misc_feature (23)..(478): Homolog of NCBI NO: 481477 NR Description: polyubiquitin 6 - rice
  misc_feature (23)..(478): Homolog of NCBI NO: 2760347 NR Description: ubiquitin [Arabidopsis thaliana]
  misc_feature (23)..(478): Homolog of NCBI NO: 16660462 NR Description: polyubiquitin OUB2 [Olea europaea]
  misc_feature (23)..(478): Homolog of NCBI NO: 4115337 NR Description: ubiquitin [Pisum sativum]
  misc_feature (23)..(478): Homolog of NCBI NO: 100934 NR Description: polyubiquitin - maize
  misc_feature (23)..(478): Homolog of NCBI NO: 418854 NR Description: polyubiquitin 6 - parsley
  misc_feature (23)..(478): Homolog of NCBI NO: 100934 NR Description: polyubiquitin - maize
  misc_feature (23)..(478): Homolog of NCBI NO: 100524 NR Description: polyubiquitin 6 - common sunflower
  misc_feature (23)..(479): Homolog of NCBI NO: 170352 NR Description: hexameric polyubiquitin

SEQ ID NO: 33031 - protein, 457 aa, Arabidopsis thaliana; identical to SEQ ID NO: 29441
  peptide (1)..(457): Ceres Seq. ID no. 13499785
  misc_feature (1)..(74): Pfam Name: Ubiquitin family Pfam Description: Ubiquitin family
  misc_feature (1)..(456): Homolog of NCBI NO: 902584 NR Description: polyubiquitin containing 7 ubiquitin monomers
  misc_feature (1)..(456): Homolog of NCBI NO: 2760347 NR Description: ubiquitin [Arabidopsis thaliana]
  misc_feature (1)..(456): Homolog of NCBI NO: 4115337 NR Description: ubiquitin [Pisum sativum]
  misc_feature (1)..(456): Homolog of NCBI NO: 16660462 NR Description: polyubiquitin OUB2 [Olea europaea]
  misc_feature (1)..(456): Homolog of NCBI NO: 100934 NR Description: polyubiquitin - maize
  misc_feature (1)..(456): Homolog of NCBI NO: 100934 NR Description: polyubiquitin - maize
  misc_feature (1)..(456): Homolog of NCBI NO: 418854 NR Description: polyubiquitin 6 - parsley
  misc_feature (1)..(456): Homolog of NCBI NO: 481477 NR Description: polyubiquitin 6 - rice
  misc_feature (1)..(456): Homolog of NCBI NO: 100524 NR Description: polyubiquitin 6 - common sunflower
  misc_feature (1)..(457): Homolog of NCBI NO: 170352 NR Description: hexameric polyubiquitin

SEQ ID NO: 33032 - protein, 381 aa, Arabidopsis thaliana; identical to SEQ ID NO: 29442
  peptide (1)..(381): Ceres Seq. ID no. 13499786
  misc_feature (1)..(74): Pfam Name: Ubiquitin family Pfam Description: Ubiquitin family
  misc_feature (1)..(380): Homolog of NCBI NO: 902584 NR Description: polyubiquitin containing 7 ubiquitin monomers
  misc_feature (1)..(380): Homolog of NCBI NO: 100934 NR Description: polyubiquitin - maize
  misc_feature (1)..(380): Homolog of NCBI NO: 2760347 NR Description: ubiquitin [Arabidopsis thaliana]
  misc_feature (1)..(380): Homolog of NCBI NO: 4115337 NR Description: ubiquitin [Pisum sativum]
  misc_feature (1)..(380): Homolog of NCBI NO: 16660462 NR Description: polyubiquitin OUB2 [Olea europaea]
  misc_feature (1)..(380): Homolog of NCBI NO: 481477 NR Description: polyubiquitin 6 - rice
  misc_feature (1)..(380): Homolog of NCBI NO: 418854 NR Description: polyubiquitin 6 - parsley
  misc_feature (1)..(380): Homolog of NCBI NO: 100934 NR Description: polyubiquitin - maize
  misc_feature (1)..(380): Homolog of NCBI NO: 100524 NR Description: polyubiquitin 6 - common sunflower
  misc_feature (1)..(381): Homolog of NCBI NO: 170352 NR Description: hexameric polyubiquitin

SEQ ID NO: 33033 - DNA, 1096 bp, Arabidopsis thaliana; identical to SEQ ID NO: 29443
  misc_feature (1)..(1096): Ceres Seq. ID no. 12333636
  misc_feature: MA Experiment ID: 108573 Result: Up-regulated in Transcription
  misc_feature: MA Experiment 108573 PARAMETER Experiment Name: At_Drought_cDNA_P Parameter: Timepoint (hr) Value: 6
  misc_feature: MA Experiment 108573 PARAMETER Experiment Name: At_Drought_cDNA_P Parameter: Tissue Value: Aerial
  misc_feature: MA Experiment 108573 PARAMETER Experiment Name: At_Drought_cDNA_P Parameter: Treatment Value: Drought vs. No Drought
  misc_feature: MA Experiment ID: 108579 Result: Down-regulated in Transcription
  misc_feature: MA Experiment 108579 PARAMETER Experiment Name: At_4deg_Cold_cDNA_P Parameter: Temperature (deg C) Value: 4 vs. 22
  misc_feature: MA Experiment 108579 PARAMETER Experiment Name: At_4deg_Cold_cDNA_P Parameter: Timepoint (hr) Value: 6
  misc_feature: MA Experiment 108579 PARAMETER Experiment Name: At_4deg_Cold_cDNA_P Parameter: Tissue Value: Aerial
  misc_feature: MA Experiment ID: 108585 Result: Up-regulated in Transcription
  misc_feature: MA Experiment 108585 PARAMETER Experiment Name: At_5mM_NaNP_cDNA_P Parameter: Timepoint (hr) Value: 6
  misc_feature: MA Experiment 108585 PARAMETER Experiment Name: At_5mM_NaNP_cDNA_P Parameter: Tissue Value: Aerial
  misc_feature: MA Experiment 108585 PARAMETER Experiment Name: At_5mM_NaNP_cDNA_P Parameter: Treatment Value: null
  misc_feature: MA Experiment ID: 108595 Result: Down-regulated in Transcription
  misc_feature: MA Experiment 108595 PARAMETER Experiment Name: At_Ler-pi_Ovule_cDNA_P Parameter: Plant Line Value: null
  misc_feature: MA Experiment ID: 20000224 Result: Down-regulated in Transcription
  misc_feature: MA Experiment ID: 20000234 Result: Down-regulated in Transcription
  misc_feature: MA Experiment 20000234 PARAMETER Experiment Name: At_Siliques_P Parameter: Age (day) Value: 21
  misc_feature: MA Experiment 20000234 PARAMETER Experiment Name: At_Siliques_P Parameter: Organism Value: A. thaliana
  misc_feature: MA Experiment 20000234 PARAMETER Experiment Name: At_Siliques_P Parameter: Plant Line Value: WS
  misc_feature: MA Experiment 20000234 PARAMETER Experiment Name: At_Siliques_P Parameter: Tissue Value: Less Than 5mm Siliques vs. Whole Plant
  misc_feature: MA Experiment ID: 20000235 Result: Down-regulated in Transcription
  misc_feature: MA Experiment 20000235 PARAMETER Experiment Name: At_Siliques_P Parameter: Age (day) Value: 21
  misc_feature: MA Experiment 20000235 PARAMETER Experiment Name: At_Siliques_P Parameter: Organism Value: A. thaliana
  misc_feature: MA Experiment 20000235 PARAMETER Experiment Name: At_Siliques_P Parameter: Plant Line Value: WS
  misc_feature: MA Experiment 20000235 PARAMETER Experiment Name: At_Siliques_P Parameter: Tissue Value: 5-10mm Siliques vs. Whole Plant
  misc_feature: MA Experiment ID: 20000286 Result: Down-regulated in Transcription
  misc_feature: MA Experiment 20000286 PARAMETER Experiment Name: At_Open_Flower_P Parameter: Age (day) Value: 21
  misc_feature: MA Experiment 20000286 PARAMETER Experiment Name: At_Open_Flower_P Parameter: Plant Line Value: WS
  misc_feature: MA Experiment 20000286 PARAMETER Experiment Name: At_Open_Flower_P Parameter: Tissue Value: Half Open vs. Whole Plant

SEQ ID NO: 33034 - protein, 179 aa, Arabidopsis thaliana; identical to SEQ ID NO: 29444
  peptide (1)..(179): Ceres Seq. ID no. 12333637
  misc_feature (34)..(164): Pfam Name: Domain of unknown function (DUF588) Pfam Description: Domain of unknown function (DUF588)
  misc_feature (29)..(178): Homolog of NCBI NO: 22330130 NR Description: hypothetical protein; protein id: At1g49405.1
  misc_feature (29)..(176): Homolog of NCBI NO: 15241672 NR Description: putative protein; protein id: At5g02060.1
  misc_feature (29)..(73): Homolog of NCBI NO: 11357817 NR Description: hypothetical protein F5K20.150 - Arabidopsis
  misc_feature (64)..(178): Homolog of NCBI NO: 11357817 NR Description: hypothetical protein F5K20.150 - Arabidopsis
  misc_feature (29)..(178): Homolog of NCBI NO: 18409932 NR Description: putative protein
  misc_feature (29)..(178): Homolog of NCBI NO: 30686969 NR Description: expressed protein [Arabidopsis thaliana]
  misc_feature (35)..(162): Homolog of NCBI NO: 26006486 NR Description: Unknown protein [Oryza sativa (japonica
  misc_feature (1)..(178): Homolog of NCBI NO: 30687069 NR Description: expressed protein [Arabidopsis thaliana]
  misc_feature (1)..(178): Homolog of NCBI NO: 25408537 NR Description: hypothetical protein At2g37200 [imported] -
  misc_feature (1)..(179): Homolog of NCBI NO: 18401722 NR Description: expressed protein

SEQ ID NO: 33035 - protein, 151 aa, Arabidopsis thaliana; identical to SEQ ID NO: 29445
  peptide (1)..(151): Ceres Seq. ID no. 12333638
  misc_feature (6)..(136): Pfam Name: Domain of unknown function (DUF588) Pfam Description: Domain of unknown function (DUF588)
  misc_feature (1)..(150): Homolog of NCBI NO: 22330130 NR Description: hypothetical protein; protein id: At1g49405.1
  misc_feature (1)..(148): Homolog of NCBI NO: 15241672 NR Description: putative protein; protein id: At5g02060.1
  misc_feature (1)..(45): Homolog of NCBI NO: 11357817 NR Description: hypothetical protein F5K20.150 - Arabidopsis
  misc_feature (36)..(150): Homolog of NCBI NO: 11357817 NR Description: hypothetical protein F5K20.150 - Arabidopsis
  misc_feature (1)..(150): Homolog of NCBI NO: 18409932 NR Description: putative protein
  misc_feature (1)..(150): Homolog of NCBI NO: 30686969 NR Description: expressed protein [Arabidopsis thaliana]
  misc_feature (7)..(134): Homolog of NCBI NO: 26006486 NR Description: Unknown protein [Oryza sativa (japonica
  misc_feature (1)..(150): Homolog of NCBI NO: 30687069 NR Description: expressed protein [Arabidopsis thaliana]
  misc_feature (1)..(150): Homolog of NCBI NO: 25408537 NR Description: hypothetical protein At2g37200 [imported] -
  misc_feature (1)..(151): Homolog of NCBI NO: 18401722 NR Description: expressed protein

SEQ ID NO: 33036 - protein, 148 aa, Arabidopsis thaliana; identical to SEQ ID NO: 29446
  peptide (1)..(148): Ceres Seq. ID no. 12333639
  misc_feature (3)..(133): Pfam Name: Domain of unknown function (DUF588) Pfam Description: Domain of unknown function (DUF588)
  misc_feature (1)..(147): Homolog of NCBI NO: 22330130 NR Description: hypothetical protein; protein id: At1g49405.1
  misc_feature (1)..(145): Homolog of NCBI NO: 15241672 NR Description: putative protein; protein id: At5g02060.1
  misc_feature (1)..(42): Homolog of NCBI NO: 11357817 NR Description: hypothetical protein F5K20.150 - Arabidopsis
  misc_feature (33)..(147): Homolog of NCBI NO: 11357817 NR Description: hypothetical protein F5K20.150 - Arabidopsis
  misc_feature (1)..(147): Homolog of NCBI NO: 18409932 NR Description: putative protein
  misc_feature (1)..(147): Homolog of NCBI NO: 30686969 NR Description: expressed protein [Arabidopsis thaliana]
  misc_feature (4)..(131): Homolog of NCBI NO: 26006486 NR Description: Unknown protein [Oryza sativa (japonica
  misc_feature (1)..(147): Homolog of NCBI NO: 30687069 NR Description: expressed protein [Arabidopsis thaliana]
  misc_feature (1)..(147): Homolog of NCBI NO: 25408537 NR Description: hypothetical protein At2g37200 [imported] -
  misc_feature (1)..(148): Homolog of NCBI NO: 18401722 NR Description: expressed protein

SEQ ID NO: 33037 - DNA, 1555 bp, Arabidopsis thaliana; identical to SEQ ID NO: 29447
  misc_feature (1)..(1555): Ceres Seq. ID no. 13497190
  misc_feature: MA Experiment ID: 108501 Result: Up-regulated in Transcription
  misc_feature: MA Experiment 108501 PARAMETER Experiment Name: At_ap2_floral_buds_cDNA_P Parameter: Plant Line Value: ap2 (Ler.)
  misc_feature: MA Experiment 108501 PARAMETER Experiment Name: At_ap2_floral_buds_cDNA_P Parameter: Tissue Value: Closed Flower
  misc_feature: MA Experiment ID: 20000173 Result: Up-regulated in Transcription
  misc_feature: MA Experiment 20000173 PARAMETER Experiment Name: At_42deg_Heat_P Parameter: Age (day) Value: 14
  misc_feature: MA Experiment 20000173 PARAMETER Experiment Name: At_42deg_Heat_P Parameter: Organism Value: A. thaliana
  misc_feature: MA Experiment 20000173 PARAMETER Experiment Name: At_42deg_Heat_P Parameter: Plant Line Value: WS
  misc_feature: MA Experiment 20000173 PARAMETER Experiment Name: At_42deg_Heat_P Parameter: Temperature (deg C) Value: 42 vs. 22
  misc_feature: MA Experiment 20000173 PARAMETER Experiment Name: At_42deg_Heat_P Parameter: Timepoint (hr) Value: 6
  misc_feature: MA Experiment 20000173 PARAMETER Experiment Name: At_42deg_Heat_P Parameter: Tissue Value: Aerial
  misc_feature: MA Experiment ID: 20000286 Result: Up-regulated in Transcription
  misc_feature: MA Experiment 20000286 PARAMETER Experiment Name: At_Open_Flower_P Parameter: Age (day) Value: 21
  misc_feature: MA Experiment 20000286 PARAMETER Experiment Name: At_Open_Flower_P Parameter: Plant Line Value: WS
  misc_feature: MA Experiment 20000286 PARAMETER Experiment Name: At_Open_Flower_P Parameter: Tissue Value: Half Open vs. Whole Plant

SEQ ID NO: 33038 - protein, 365 aa, Arabidopsis thaliana; identical to SEQ ID NO: 29448
  peptide (1)..(365): Ceres Seq. ID no. 13497191
  misc_feature (54)..(365): Pfam Name: Glycosyl hydrolases family 17 Pfam Description: Glycosyl hydrolases family 17
  misc_feature (49)..(364): Homolog of NCBI NO: 6073860 NR Description: beta-1, 3-glucananse [Musa acuminata]
  misc_feature (49)..(364): Homolog of NCBI NO: 6448757 NR Description: beta-1,3-glucanase [Musa acuminata]
  misc_feature (48)..(362): Homolog of NCBI NO: 4097944 NR Description: beta-1,3-glucanase precursor [Oryza sativa]
  misc_feature (48)..(362): Homolog of NCBI NO: 34908958 NR Description: beta-1,3-glucanase precursor
  misc_feature (23)..(355): Homolog of NCBI NO: 15241384 NR Description: glycosyl hydrolase family 17 (beta-1,3-glucanase)
  misc_feature (26)..(365): Homolog of NCBI NO: 15241345 NR Description: glycosyl hydrolase family 17 (beta-1,3-glucanase)
  misc_feature (21)..(365): Homolog of NCBI NO: 15217468 NR Description: glycosyl hydrolase family 17 (beta-1,3-glucanase)
  misc_feature (21)..(365): Homolog of NCBI NO: 15241326 NR Description: glycosyl hydrolase family 17 (beta-1,3-glucanase
  misc_feature (21)..(365): Homolog of NCBI NO: 15241325 NR Description: glycosyl hydrolase family 17 (beta-1,3-glucanase
  misc_feature (21)..(365): Homolog of NCBI NO: 21553380 NR Description: beta-1,3-glucanase bg4 [Arabidopsis thaliana]

SEQ ID NO: 33039 - protein, 345 aa, Arabidopsis thaliana; identical to SEQ ID NO: 29449
  peptide (1)..(345): Ceres Seq. ID no. 13497192
  misc_feature (34)..(345): Pfam Name: Glycosyl hydrolases family 17 Pfam Description: Glycosyl hydrolases family 17
  misc_feature (29)..(344): Homolog of NCBI NO: 6073860 NR Description: beta-1, 3-glucananse [Musa acuminata]
  misc_feature (29)..(344): Homolog of NCBI NO: 6448757 NR Description: beta-1,3-glucanase [Musa acuminata]
  misc_feature (28)..(342): Homolog of NCBI NO: 4097944 NR Description: beta-1,3-glucanase precursor [Oryza sativa]
  misc_feature (28)..(342): Homolog of NCBI NO: 34908958 NR Description: beta-1,3-glucanase precursor
  misc_feature (3)..(335): Homolog of NCBI NO: 15241384 NR Description: glycosyl hydrolase family 17 (beta-1,3-glucanase)
  misc_feature (6)..(345): Homolog of NCBI NO: 15241345 NR Description: glycosyl hydrolase family 17 (beta-1,3-glucanase)
  misc_feature (1)..(345): Homolog of NCBI NO: 15217468 NR Description: glycosyl hydrolase family 17 (beta-1,3-glucanase)
  misc_feature (1)..(345): Homolog of NCBI NO: 15241326 NR Description: glycosyl hydrolase family 17 (beta-1,3-glucanase
  misc_feature (1)..(345): Homolog of NCBI NO: 15241325 NR Description: glycosyl hydrolase family 17 (beta-1,3-glucanase
  misc_feature (1)..(345): Homolog of NCBI NO: 21553380 NR Description: beta-1,3-glucanase bg4 [Arabidopsis thaliana]

SEQ ID NO: 33040 - protein, 204 aa, Arabidopsis thaliana; identical to SEQ ID NO: 29450
  peptide (1)..(204): Ceres Seq. ID no. 13497193
  misc_feature (1)..(204): Pfam Name: Glycosyl hydrolases family 17 Pfam Description: Glycosyl hydrolases family 17
  misc_feature (1)..(203): Homolog of NCBI NO: 6073860 NR Description: beta-1, 3-glucananse [Musa acuminata]
  misc_feature (1)..(203): Homolog of NCBI NO: 6448757 NR Description: beta-1,3-glucanase [Musa acuminata]
  misc_feature (1)..(201): Homolog of NCBI NO: 4097944 NR Description: beta-1,3-glucanase precursor [Oryza sativa]
  misc_feature (1)..(201): Homolog of NCBI NO: 34908958 NR Description: beta-1,3-glucanase precursor
  misc_feature (1)..(194): Homolog of NCBI NO: 15241384 NR Description: glycosyl hydrolase family 17 (beta-1,3-glucanase)
  misc_feature (1)..(204): Homolog of NCBI NO: 15241345 NR Description: glycosyl hydrolase family 17 (beta-1,3-glucanase)
  misc_feature (1)..(204): Homolog of NCBI NO: 15217468 NR Description: glycosyl hydrolase family 17 (beta-1,3-glucanase)
  misc_feature (1)..(204): Homolog of NCBI NO: 15241326 NR Description: glycosyl hydrolase family 17 (beta-1,3-glucanase
  misc_feature (1)..(204): Homolog of NCBI NO: 15241325 NR Description: glycosyl hydrolase family 17 (beta-1,3-glucanase
  misc_feature (1)..(204): Homolog of NCBI NO: 21553380 NR Description: beta-1,3-glucanase bg4 [Arabidopsis thaliana]

SEQ ID NO: 33041 - DNA, 1162 bp, Arabidopsis thaliana; identical to SEQ ID NO: 29451
  misc_feature (1)..(1162): Ceres Seq. ID no. 13495779
  misc_feature: MA Experiment ID: 108573 Result: Up-regulated in Transcription
  misc_feature: MA Experiment 108573 PARAMETER Experiment Name: At_Drought_cDNA_P Parameter: Timepoint (hr) Value: 6
  misc_feature: MA Experiment 108573 PARAMETER Experiment Name: At_Drought_cDNA_P Parameter: Tissue Value: Aerial
  misc_feature: MA Experiment 108573 PARAMETER Experiment Name: At_Drought_cDNA_P Parameter: Treatment Value: Drought vs. No Drought
  misc_feature: MA Experiment ID: 108579 Result: Up-regulated in Transcription
  misc_feature: MA Experiment 108579 PARAMETER Experiment Name: At_4deg_Cold_cDNA_P Parameter: Temperature (deg C) Value: 4 vs. 22
  misc_feature: MA Experiment 108579 PARAMETER Experiment Name: At_4deg_Cold_cDNA_P Parameter: Timepoint (hr) Value: 6
  misc_feature: MA Experiment 108579 PARAMETER Experiment Name: At_4deg_Cold_cDNA_P Parameter: Tissue Value: Aerial
  misc_feature: MA Experiment ID: 108608 Result: Up-regulated in Transcription
  misc_feature: MA Experiment 108608 PARAMETER Experiment Name: At_100uM_ABA_cDNA_P Parameter: Timepoint (hr) Value: 1
  misc_feature: MA Experiment 108608 PARAMETER Experiment Name: At_100uM_ABA_cDNA_P Parameter: Tissue Value: Aerial
  misc_feature: MA Experiment 108608 PARAMETER Experiment Name: At_100uM_ABA_cDNA_P Parameter: Treatment Value: 100uM ABA vs. No Treatment
  misc_feature: MA Experiment ID: 108668 Result: Up-regulated in Transcription
  misc_feature: MA Experiment 108668 PARAMETER Experiment Name: At_2mM_SA_cDNA_P Parameter: Plant Line Value: WS
  misc_feature: MA Experiment 108668 PARAMETER Experiment Name: At_2mM_SA_cDNA_P Parameter: Timepoint (hr) Value: 6
  misc_feature: MA Experiment 108668 PARAMETER Experiment Name: At_2mM_SA_cDNA_P Parameter: Treatment Value: 2mM SA vs. No Treatment
  misc_feature: MA Experiment ID: 20000166 Result: Up-regulated in Transcription
  misc_feature: MA Experiment 20000166 PARAMETER Experiment Name: At_100uM_ABA_P Parameter: Age (day) Value: 14
  misc_feature: MA Experiment 20000166 PARAMETER Experiment Name: At_100uM_ABA_P Parameter: Organism Value: A. thaliana
  misc_feature: MA Experiment 20000166 PARAMETER Experiment Name: At_100uM_ABA_P Parameter: Plant Line Value: WS
  misc_feature: MA Experiment 20000166 PARAMETER Experiment Name: At_100uM_ABA_P Parameter: Timepoint (hr) Value: 1
  misc_feature: MA Experiment 20000166 PARAMETER Experiment Name: At_100uM_ABA_P Parameter: Tissue Value: Aerial
  misc_feature: MA Experiment 20000166 PARAMETER Experiment Name: At_100uM_ABA_P Parameter: Treatment Value: 100uM ABA vs. No Treatment
  misc_feature: MA Experiment ID: 20000173 Result: Up-regulated in Transcription
  misc_feature: MA Experiment 20000173 PARAMETER Experiment Name: At_42deg_Heat_P Parameter: Age (day) Value: 14
  misc_feature: MA Experiment 20000173 PARAMETER Experiment Name: At_42deg_Heat_P Parameter: Organism Value: A. thaliana
  misc_feature: MA Experiment 20000173 PARAMETER Experiment Name: At_42deg_Heat_P Parameter: Plant Line Value: WS
  misc_feature: MA Experiment 20000173 PARAMETER Experiment Name: At_42deg_Heat_P Parameter: Temperature (deg C) Value: 42 vs. 22
  misc_feature: MA Experiment 20000173 PARAMETER Experiment Name: At_42deg_Heat_P Parameter: Timepoint (hr) Value: 6
  misc_feature: MA Experiment 20000173 PARAMETER Experiment Name: At_42deg_Heat_P Parameter: Tissue Value: Aerial
  misc_feature: MA Experiment ID: 20000182 Result: Up-regulated in Transcription
  misc_feature: MA Experiment 20000182 PARAMETER Experiment Name: At_2mM_SA_P Parameter: Age (day) Value: 14
  misc_feature: MA Experiment 20000182 PARAMETER Experiment Name: At_2mM_SA_P Parameter: Organism Value: A. thaliana
  misc_feature: MA Experiment 20000182 PARAMETER Experiment Name: At_2mM_SA_P Parameter: Plant Line Value: WS
  misc_feature: MA Experiment 20000182 PARAMETER Experiment Name: At_2mM_SA_P Parameter: Timepoint (hr) Value: 6
  misc_feature: MA Experiment 20000182 PARAMETER Experiment Name: At_2mM_SA_P Parameter: Tissue Value: Aerial
  misc_feature: MA Experiment 20000182 PARAMETER Experiment Name: At_2mM_SA_P Parameter: Treatment Value: 2mM SA vs. No Treatment
  misc_feature: MA Experiment ID: 20000436 Result: Up-regulated in Transcription
  misc_feature: MA Experiment 20000436 PARAMETER Experiment Name: At_Drought_P Parameter: Age (day) Value: 7
  misc_feature: MA Experiment 20000436 PARAMETER Experiment Name: At_Drought_P Parameter: Organism Value: A. thaliana
  misc_feature: MA Experiment 20000436 PARAMETER Experiment Name: At_Drought_P Parameter: Plant Line Value: WS
  misc_feature: MA Experiment 20000436 PARAMETER Experiment Name: At_Drought_P Parameter: Timepoint (hr) Value: 12
  misc_feature: MA Experiment 20000436 PARAMETER Experiment Name: At_Drought_P Parameter: Tissue Value: Whole Plant
  misc_feature: MA Experiment 20000436 PARAMETER Experiment Name: At_Drought_P Parameter: Treatment Value: Drought vs. No Drought
  misc_feature: MA Experiment ID: 20000437 Result: Up-regulated in Transcription
  misc_feature: MA Experiment 20000437 PARAMETER Experiment Name: At_Drought_P Parameter: Age (day) Value: 8
  misc_feature: MA Experiment 20000437 PARAMETER Experiment Name: At_Drought_P Parameter: Organism Value: A. thaliana
  misc_feature: MA Experiment 20000437 PARAMETER Experiment Name: At_Drought_P Parameter: Plant Line Value: WS
  misc_feature: MA Experiment 20000437 PARAMETER Experiment Name: At_Drought_P Parameter: Timepoint (hr) Value: 24
  misc_feature: MA Experiment 20000437 PARAMETER Experiment Name: At_Drought_P Parameter: Tissue Value: Whole Plant
  misc_feature: MA Experiment 20000437 PARAMETER Experiment Name: At_Drought_P Parameter: Treatment Value: Drought vs. No Drought
  misc_feature: MA Experiment ID: 20001905 Result: Up-regulated in Transcription
  misc_feature: MA Experiment 20001905 PARAMETER Experiment Name: At_Drought_Reproduction_P Parameter: Age (day) Value: 40
  misc_feature: MA Experiment 20001905 PARAMETER Experiment Name: At_Drought_Reproduction_P Parameter: Organism Value: A. thaliana
  misc_feature: MA Experiment 20001905 PARAMETER Experiment Name: At_Drought_Reproduction_P Parameter: Plant Line Value: WS
  misc_feature: MA Experiment 20001905 PARAMETER Experiment Name: At_Drought_Reproduction_P Parameter: Timepoint (day) Value: 10
  misc_feature: MA Experiment 20001905 PARAMETER Experiment Name: At_Drought_Reproduction_P Parameter: Tissue Value: Rosettes
  misc_feature: MA Experiment 20001905 PARAMETER Experiment Name: At_Drought_Reproduction_P Parameter: Treatment Value: Drought vs. No Drought
  misc_feature: MA Experiment ID: 20001911 Result: Up-regulated in Transcription
  misc_feature: MA Experiment 20001911 PARAMETER Experiment Name: At_Drought_Reproduction_P Parameter: Age (day) Value: 40
  misc_feature: MA Experiment 20001911 PARAMETER Experiment Name: At_Drought_Reproduction_P Parameter: Organism Value: A. thaliana
  misc_feature: MA Experiment 20001911 PARAMETER Experiment Name: At_Drought_Reproduction_P Parameter: Plant Line Value: WS
  misc_feature: MA Experiment 20001911 PARAMETER Experiment Name: At_Drought_Reproduction_P Parameter: Timepoint (day) Value: 10
  misc_feature: MA Experiment 20001911 PARAMETER Experiment Name: At_Drought_Reproduction_P Parameter: Tissue Value: Flowers
  misc_feature: MA Experiment 20001911 PARAMETER Experiment Name: At_Drought_Reproduction_P Parameter: Treatment Value: Drought vs. No Drought

SEQ ID NO: 33042 - protein, 182 aa, Arabidopsis thaliana; identical to SEQ ID NO: 29452
  peptide (1)..(182): Ceres Seq. ID no. 13495780
  misc_feature (51)..(171): Homolog of NCBI NO: 34899590 NR Description: hypothetical protein~similar to Oryza sativa
  misc_feature (53)..(168): Homolog of NCBI NO: 34897094 NR Description: unknown protein [Oryza sativa (japonica
  misc_feature (12)..(182): Homolog of NCBI NO: 15233147 NR Description: hypothetical protein [Arabidopsis thaliana]
  misc_feature (12)..(174): Homolog of NCBI NO: 18406991 NR Description: expressed protein [Arabidopsis thaliana]
  misc_feature (24)..(168): Homolog of NCBI NO: 34904202 NR Description: P0492F05.25 [Oryza sativa (japonica
  misc_feature (17)..(171): Homolog of NCBI NO: 15222616 NR Description: expressed protein [Arabidopsis thaliana]
  misc_feature (22)..(171): Homolog of NCBI NO: 34909318 NR Description: OSJNBb0021A09.5 [Oryza sativa (japonica
  misc_feature (24)..(171): Homolog of NCBI NO: 15238125 NR Description: expressed protein [Arabidopsis thaliana]
  misc_feature (1)..(171): Homolog of NCBI NO: 15237093 NR Description: expressed protein [Arabidopsis thaliana]
  misc_feature (1)..(171): Homolog of NCBI NO: 15236556 NR Description: expressed protein [Arabidopsis thaliana]

SEQ ID NO: 33043 - protein, 156 aa, Arabidopsis thaliana; identical to SEQ ID NO: 29453
  peptide (1)..(156): Ceres Seq. ID no. 13495781
  misc_feature (25)..(145): Homolog of NCBI NO: 34899590 NR Description: hypothetical protein~similar to Oryza sativa
  misc_feature (27)..(142): Homolog of NCBI NO: 34897094 NR Description: unknown protein [Oryza sativa (japonica
  misc_feature (1)..(156): Homolog of NCBI NO: 15233147 NR Description: hypothetical protein [Arabidopsis thaliana]
  misc_feature (1)..(148): Homolog of NCBI NO: 18406991 NR Description: expressed protein [Arabidopsis thaliana]
  misc_feature (1)..(142): Homolog of NCBI NO: 34904202 NR Description: P0492F05.25 [Oryza sativa (japonica
  misc_feature (1)..(145): Homolog of NCBI NO: 15222616 NR Description: expressed protein [Arabidopsis thaliana]
  misc_feature (1)..(145): Homolog of NCBI NO: 34909318 NR Description: OSJNBb0021A09.5 [Oryza sativa (japonica
  misc_feature (1)..(145): Homolog of NCBI NO: 15238125 NR Description: expressed protein [Arabidopsis thaliana]
  misc_feature (1)..(145): Homolog of NCBI NO: 15237093 NR Description: expressed protein [Arabidopsis thaliana]
  misc_feature (1)..(145): Homolog of NCBI NO: 15236556 NR Description: expressed protein [Arabidopsis thaliana]

SEQ ID NO: 33044 - protein, 133 aa, Arabidopsis thaliana; identical to SEQ ID NO: 29454
  peptide (1)..(133): Ceres Seq. ID no. 13495782
  misc_feature (32)..(133): Homolog of NCBI NO: 34899590 NR Description: hypothetical protein~similar to Oryza sativa
  misc_feature (20)..(133): Homolog of NCBI NO: 34897094 NR Description: unknown protein [Oryza sativa (japonica
  misc_feature (58)..(130): Homolog of NCBI NO: 15233147 NR Description: hypothetical protein [Arabidopsis thaliana]
  misc_feature (32)..(132): Homolog of NCBI NO: 18406991 NR Description: expressed protein [Arabidopsis thaliana]
  misc_feature (8)..(131): Homolog of NCBI NO: 34904202 NR Description: P0492F05.25 [Oryza sativa (japonica
  misc_feature (31)..(133): Homolog of NCBI NO: 15222616 NR Description: expressed protein [Arabidopsis thaliana]
  misc_feature (21)..(131): Homolog of NCBI NO: 34909318 NR Description: OSJNBb0021A09.5 [Oryza sativa (japonica
  misc_feature (31)..(133): Homolog of NCBI NO: 15238125 NR Description: expressed protein [Arabidopsis thaliana]
  misc_feature (31)..(133): Homolog of NCBI NO: 15237093 NR Description: expressed protein [Arabidopsis thaliana]
  misc_feature (31)..(133): Homolog of NCBI NO: 15236556 NR Description: expressed protein [Arabidopsis thaliana]

SEQ ID NO: 33045 - DNA, 1244 bp, Arabidopsis thaliana; identical to SEQ ID NO: 29455
  misc_feature (1)..(1244): Ceres Seq. ID no. 12385291
  misc_feature: MA Experiment ID: 108434 Result: Up-regulated in Transcription
  misc_feature: MA Experiment 108434 PARAMETER Experiment Name: At_Root_Tips_cDNA_P Parameter: Tissue Value: Root Tips
  misc_feature: MA Experiment ID: 108435 Result: Up-regulated in Transcription
  misc_feature: MA Experiment 108435 PARAMETER Experiment Name: At_stm_Mutants_cDNA_P Parameter: Plant Line Value: wt Landsburg vs stm
  misc_feature: MA Experiment 108435 PARAMETER Experiment Name: At_stm_Mutants_cDNA_P Parameter: Tissue Value: Shoot Apical Meristem Region
  misc_feature: MA Experiment ID: 108461 Result: Down-regulated in Transcription
  misc_feature: MA Experiment 108461 PARAMETER Experiment Name: At_Germinating_Seeds_cDNA_P Parameter: Age (day) Value: 1 vs. 0
  misc_feature: MA Experiment 108461 PARAMETER Experiment Name: At_Germinating_Seeds_cDNA_P Parameter: Tissue Value: Germinating Seeds
  misc_feature: MA Experiment ID: 108462 Result: Down-regulated in Transcription
  misc_feature: MA Experiment 108462 PARAMETER Experiment Name: At_Germinating_Seeds_cDNA_P Parameter: Age (day) Value: 2 vs. 0
  misc_feature: MA Experiment 108462 PARAMETER Experiment Name: At_Germinating_Seeds_cDNA_P Parameter: Tissue Value: Germinating Seeds
  misc_feature: MA Experiment ID: 108463 Result: Down-regulated in Transcription
  misc_feature: MA Experiment 108463 PARAMETER Experiment Name: At_Germinating_Seeds_cDNA_P Parameter: Age (day) Value: 3 vs. 0
  misc_feature: MA Experiment 108463 PARAMETER Experiment Name: At_Germinating_Seeds_cDNA_P Parameter: Tissue Value: Germinating Seeds
  misc_feature: MA Experiment ID: 108464 Result: Down-regulated in Transcription
  misc_feature: MA Experiment 108464 PARAMETER Experiment Name: At_Germinating_Seeds_cDNA_P Parameter: Age (day) Value: 4 vs. 0
  misc_feature: MA Experiment 108464 PARAMETER Experiment Name: At_Germinating_Seeds_cDNA_P Parameter: Tissue Value: Germinating Seeds
  misc_feature: MA Experiment ID: 108569 Result: Up-regulated in Transcription
  misc_feature: MA Experiment 108569 PARAMETER Experiment Name: At_0.001%_MeJA__cDNA_P Parameter: Timepoint (hr) Value: 6
  misc_feature: MA Experiment 108569 PARAMETER Experiment Name: At_0.001%_MeJA__cDNA_P Parameter: Tissue Value: Aerial
  misc_feature: MA Experiment 108569 PARAMETER Experiment Name: At_0.001%_MeJA__cDNA_P Parameter: Treatment Value: 0.001% MeJA vs. No Treatment
  misc_feature: MA Experiment ID: 108572 Result: Up-regulated in Transcription
  misc_feature: MA Experiment 108572 PARAMETER Experiment Name: At_Drought_cDNA_P Parameter: Timepoint (hr) Value: 1
  misc_feature: MA Experiment 108572 PARAMETER Experiment Name: At_Drought_cDNA_P Parameter: Tissue Value: Aerial
  misc_feature: MA Experiment 108572 PARAMETER Experiment Name: At_Drought_cDNA_P Parameter: Treatment Value: Drought vs. No Drought
  misc_feature: MA Experiment ID: 108573 Result: Up-regulated in Transcription
  misc_feature: MA Experiment 108573 PARAMETER Experiment Name: At_Drought_cDNA_P Parameter: Timepoint (hr) Value: 6
  misc_feature: MA Experiment 108573 PARAMETER Experiment Name: At_Drought_cDNA_P Parameter: Tissue Value: Aerial
  misc_feature: MA Experiment 108573 PARAMETER Experiment Name: At_Drought_cDNA_P Parameter: Treatment Value: Drought vs. No Drought
  misc_feature: MA Experiment ID: 108574 Result: Up-regulated in Transcription
  misc_feature: MA Experiment 108574 PARAMETER Experiment Name: At_Wounding__cDNA_P Parameter: Timepoint (hr) Value: 1
  misc_feature: MA Experiment 108574 PARAMETER Experiment Name: At_Wounding__cDNA_P Parameter: Tissue Value: Aerial
  misc_feature: MA Experiment 108574 PARAMETER Experiment Name: At_Wounding__cDNA_P Parameter: Treatment Value: Wounding vs. No Wounding
  misc_feature: MA Experiment ID: 108594 Result: Down-regulated in Transcription
  misc_feature: MA Experiment 108594 PARAMETER Experiment Name: At_Ler-rhl_Root_cDNA_P Parameter: Plant Line Value: null
  misc_feature: MA Experiment ID: 108595 Result: Down-regulated in Transcription
  misc_feature: MA Experiment 108595 PARAMETER Experiment Name: At_Ler-pi_Ovule_cDNA_P Parameter: Plant Line Value: null
  misc_feature: MA Experiment ID: 20000069 Result: Down-regulated in Transcription
  misc_feature: MA Experiment 20000069 PARAMETER Experiment Name: At_100uM_ABA_Mutants_cDNA_P Parameter: Plant Line Value: CS23
  misc_feature: MA Experiment 20000069 PARAMETER Experiment Name: At_100uM_ABA_Mutants_cDNA_P Parameter: Timepoint (hr) Value: 6
  misc_feature: MA Experiment 20000069 PARAMETER Experiment Name: At_100uM_ABA_Mutants_cDNA_P Parameter: Tissue Value: Aerial
  misc_feature: MA Experiment 20000069 PARAMETER Experiment Name: At_100uM_ABA_Mutants_cDNA_P Parameter: Treatment Value: 100uM ABA vs. No Treatment
  misc_feature: MA Experiment ID: 20000071 Result: Down-regulated in Transcription
  misc_feature: MA Experiment 20000071 PARAMETER Experiment Name: At_100uM_ABA_Mutants_cDNA_P Parameter: Plant Line Value: CS8104
  misc_feature: MA Experiment 20000071 PARAMETER Experiment Name: At_100uM_ABA_Mutants_cDNA_P Parameter: Timepoint (hr) Value: 6
  misc_feature: MA Experiment 20000071 PARAMETER Experiment Name: At_100uM_ABA_Mutants_cDNA_P Parameter: Tissue Value: Aerial
  misc_feature: MA Experiment 20000071 PARAMETER Experiment Name: At_100uM_ABA_Mutants_cDNA_P Parameter: Treatment Value: 100uM ABA vs. No Treatment
  misc_feature: MA Experiment ID: 20000072 Result: Down-regulated in Transcription
  misc_feature: MA Experiment 20000072 PARAMETER Experiment Name: At_100uM_ABA_Mutants_cDNA_P Parameter: Plant Line Value: CS8105
  misc_feature: MA Experiment 20000072 PARAMETER Experiment Name: At_100uM_ABA_Mutants_cDNA_P Parameter: Timepoint (hr) Value: 6
  misc_feature: MA Experiment 20000072 PARAMETER Experiment Name: At_100uM_ABA_Mutants_cDNA_P Parameter: Tissue Value: Aerial
  misc_feature: MA Experiment 20000072 PARAMETER Experiment Name: At_100uM_ABA_Mutants_cDNA_P Parameter: Treatment Value: 100uM ABA vs. No Treatment
  misc_feature: MA Experiment ID: 20000086 Result: Down-regulated in Transcription
  misc_feature: MA Experiment 20000086 PARAMETER Experiment Name: At_100uM_ABA_Mutants_cDNA_P Parameter: Plant Line Value: CS22
  misc_feature: MA Experiment 20000086 PARAMETER Experiment Name: At_100uM_ABA_Mutants_cDNA_P Parameter: Timepoint (hr) Value: 6
  misc_feature: MA Experiment 20000086 PARAMETER Experiment Name: At_100uM_ABA_Mutants_cDNA_P Parameter: Tissue Value: Aerial
  misc_feature: MA Experiment 20000086 PARAMETER Experiment Name: At_100uM_ABA_Mutants_cDNA_P Parameter: Treatment Value: 100uM ABA vs. No Treatment
  misc_feature: MA Experiment ID: 20000087 Result: Down-regulated in Transcription
  misc_feature: MA Experiment 20000087 PARAMETER Experiment Name: At_100uM_ABA_Mutants_cDNA_P Parameter: Plant Line Value: WS
  misc_feature: MA Experiment 20000087 PARAMETER Experiment Name: At_100uM_ABA_Mutants_cDNA_P Parameter: Timepoint (hr) Value: 6
  misc_feature: MA Experiment 20000087 PARAMETER Experiment Name: At_100uM_ABA_Mutants_cDNA_P Parameter: Tissue Value: Aerial
  misc_feature: MA Experiment 20000087 PARAMETER Experiment Name: At_100uM_ABA_Mutants_cDNA_P Parameter: Treatment Value: 100uM ABA vs. No Treatment
  misc_feature: MA Experiment ID: 20000171 Result: Down-regulated in Transcription
  misc_feature: MA Experiment 20000171 PARAMETER Experiment Name: At_42deg_Heat_P Parameter: Age (day) Value: 14
  misc_feature: MA Experiment 20000171 PARAMETER Experiment Name: At_42deg_Heat_P Parameter: Organism Value: A. thaliana
  misc_feature: MA Experiment 20000171 PARAMETER Experiment Name: At_42deg_Heat_P Parameter: Plant Line Value: WS
  misc_feature: MA Experiment 20000171 PARAMETER Experiment Name: At_42deg_Heat_P Parameter: Temperature (deg C) Value: 42 vs. 22
  misc_feature: MA Experiment 20000171 PARAMETER Experiment Name: At_42deg_Heat_P Parameter: Timepoint (hr) Value: 1
  misc_feature: MA Experiment 20000171 PARAMETER Experiment Name: At_42deg_Heat_P Parameter: Tissue Value: Aerial
  misc_feature: MA Experiment ID: 20000179 Result: Down-regulated in Transcription
  misc_feature: MA Experiment 20000179 PARAMETER Experiment Name: At_Germinating_Seeds_P Parameter: Age (hr) Value: 6 vs. 0
  misc_feature: MA Experiment 20000179 PARAMETER Experiment Name: At_Germinating_Seeds_P Parameter: Tissue Value: Germinating Seeds
  misc_feature: MA Experiment ID: 20000180 Result: Down-regulated in Transcription
  misc_feature: MA Experiment 20000180 PARAMETER Experiment Name: At_Germinating_Seeds_P Parameter: Age (hr) Value: 24 vs. 0
  misc_feature: MA Experiment 20000180 PARAMETER Experiment Name: At_Germinating_Seeds_P Parameter: Tissue Value: Germinating Seeds
  misc_feature: MA Experiment ID: 20000184 Result: Up-regulated in Transcription
  misc_feature: MA Experiment 20000184 PARAMETER Experiment Name: At_Shoots__P Parameter: Age (day) Value: 7
  misc_feature: MA Experiment 20000184 PARAMETER Experiment Name: At_Shoots__P Parameter: Tissue Value: Shoots vs. Whole Plant
  misc_feature: MA Experiment ID: 20000185 Result: Down-regulated in Transcription
  misc_feature: MA Experiment 20000185 PARAMETER Experiment Name: At_Roots__P Parameter: Age (day) Value: 7 vs. 21
  misc_feature: MA Experiment 20000185 PARAMETER Experiment Name: At_Roots__P Parameter: Organism Value: A. thaliana
  misc_feature: MA Experiment 20000185 PARAMETER Experiment Name: At_Roots__P Parameter: Tissue Value: Roots vs. Whole Plant
  misc_feature: MA Experiment ID: 20000213 Result: Up-regulated in Transcription
  misc_feature: MA Experiment 20000213 PARAMETER Experiment Name: At_4deg_Cold_P Parameter: Timepoint (hr) Value: 2
  misc_feature: MA Experiment ID: 20000268 Result: Up-regulated in Transcription
  misc_feature: MA Experiment 20000268 PARAMETER Experiment Name: At_100mM_NaCl__P Parameter: Age (day) Value: 14
  misc_feature: MA Experiment 20000268 PARAMETER Experiment Name: At_100mM_NaCl__P Parameter: Organism Value: A. thaliana
  misc_feature: MA Experiment 20000268 PARAMETER Experiment Name: At_100mM_NaCl__P Parameter: Plant Line Value: WS
  misc_feature: MA Experiment 20000268 PARAMETER Experiment Name: At_100mM_NaCl__P Parameter: Timepoint (hr) Value: 6
  misc_feature: MA Experiment 20000268 PARAMETER Experiment Name: At_100mM_NaCl__P Parameter: Tissue Value: Whole Plant
  misc_feature: MA Experiment 20000268 PARAMETER Experiment Name: At_100mM_NaCl__P Parameter: Treatment Value: 100mM NaCl vs. No Treatment
  misc_feature: MA Experiment ID: 20000436 Result: Down-regulated in Transcription
  misc_feature: MA Experiment 20000436 PARAMETER Experiment Name: At_Drought_P Parameter: Age (day) Value: 7
  misc_feature: MA Experiment 20000436 PARAMETER Experiment Name: At_Drought_P Parameter: Organism Value: A. thaliana
  misc_feature: MA Experiment 20000436 PARAMETER Experiment Name: At_Drought_P Parameter: Plant Line Value: WS
  misc_feature: MA Experiment 20000436 PARAMETER Experiment Name: At_Drought_P Parameter: Timepoint (hr) Value: 12
  misc_feature: MA Experiment 20000436 PARAMETER Experiment Name: At_Drought_P Parameter: Tissue Value: Whole Plant
  misc_feature: MA Experiment 20000436 PARAMETER Experiment Name: At_Drought_P Parameter: Treatment Value: Drought vs. No Drought
  misc_feature: MA Experiment ID: 20000437 Result: Down-regulated in Transcription
  misc_feature: MA Experiment 20000437 PARAMETER Experiment Name: At_Drought_P Parameter: Age (day) Value: 8
  misc_feature: MA Experiment 20000437 PARAMETER Experiment Name: At_Drought_P Parameter: Organism Value: A. thaliana
  misc_feature: MA Experiment 20000437 PARAMETER Experiment Name: At_Drought_P Parameter: Plant Line Value: WS
  misc_feature: MA Experiment 20000437 PARAMETER Experiment Name: At_Drought_P Parameter: Timepoint (hr) Value: 24
  misc_feature: MA Experiment 20000437 PARAMETER Experiment Name: At_Drought_P Parameter: Tissue Value: Whole Plant
  misc_feature: MA Experiment 20000437 PARAMETER Experiment Name: At_Drought_P Parameter: Treatment Value: Drought vs. No Drought
  misc_feature: MA Experiment ID: 20000439 Result: Down-regulated in Transcription
  misc_feature: MA Experiment 20000439 PARAMETER Experiment Name: At_Roots__P Parameter: Age (day) Value: 14 vs. 21
  misc_feature: MA Experiment 20000439 PARAMETER Experiment Name: At_Roots__P Parameter: Organism Value: A. thaliana
  misc_feature: MA Experiment 20000439 PARAMETER Experiment Name: At_Roots__P Parameter: Tissue Value: Roots vs. Whole Plant
  misc_feature: MA Experiment ID: 20000453 Result: Down-regulated in Transcription
  misc_feature: MA Experiment 20000453 PARAMETER Experiment Name: At_100uM_ABA_P Parameter: Age (day) Value: 15
  misc_feature: MA Experiment 20000453 PARAMETER Experiment Name: At_100uM_ABA_P Parameter: Organism Value: A. thaliana
  misc_feature: MA Experiment 20000453 PARAMETER Experiment Name: At_100uM_ABA_P Parameter: Plant Line Value: WS
  misc_feature: MA Experiment 20000453 PARAMETER Experiment Name: At_100uM_ABA_P Parameter: Timepoint (hr) Value: 24
  misc_feature: MA Experiment 20000453 PARAMETER Experiment Name: At_100uM_ABA_P Parameter: Tissue Value: Aerial
  misc_feature: MA Experiment 20000453 PARAMETER Experiment Name: At_100uM_ABA_P Parameter: Treatment Value: 100uM ABA vs. No Treatment
  misc_feature: MA Experiment ID: 20000456 Result: Up-regulated in Transcription
  misc_feature: MA Experiment 20000456 PARAMETER Experiment Name: At_100uM_BA_P Parameter: Age (day) Value: 14
  misc_feature: MA Experiment 20000456 PARAMETER Experiment Name: At_100uM_BA_P Parameter: Organism Value: A. thaliana
  misc_feature: MA Experiment 20000456 PARAMETER Experiment Name: At_100uM_BA_P Parameter: Plant Line Value: WS
  misc_feature: MA Experiment 20000456 PARAMETER Experiment Name: At_100uM_BA_P Parameter: Timepoint (hr) Value: 6
  misc_feature: MA Experiment 20000456 PARAMETER Experiment Name: At_100uM_BA_P Parameter: Tissue Value: Aerial
  misc_feature: MA Experiment 20000456 PARAMETER Experiment Name: At_100uM_BA_P Parameter: Treatment Value: 100uM BA vs. No Treatment
  misc_feature: MA Experiment ID: 20000496 Result: Up-regulated in Transcription
  misc_feature: MA Experiment 20000496 PARAMETER Experiment Name: At_Guard_Cells_P Parameter: Harvest Date Value: 7/19/2002
  misc_feature: MA Experiment 20000496 PARAMETER Experiment Name: At_Guard_Cells_P Parameter: Organism Value: Canola
  misc_feature: MA Experiment 20000496 PARAMETER Experiment Name: At_Guard_Cells_P Parameter: Tissue Value: Guard Cells vs. Leaves
  misc_feature: MA Experiment ID: 20000794 Result: Down-regulated in Transcription
  misc_feature: MA Experiment 20000794 PARAMETER Experiment Name: At_Petals_P Parameter: Age (day) Value: 23-25 days
  misc_feature: MA Experiment 20000794 PARAMETER Experiment Name: At_Petals_P Parameter: Plant Line Value: WS
  misc_feature: MA Experiment 20000794 PARAMETER Experiment Name: At_Petals_P Parameter: Tissue Value: Petals vs. Whole plant
  misc_feature: MA Experiment ID: 20001247 Result: Down-regulated in Transcription
  misc_feature: MA Experiment 20001247 PARAMETER Experiment Name: At_Far-red-induction_P Parameter: Age (day) Value: 7
  misc_feature: MA Experiment 20001247 PARAMETER Experiment Name: At_Far-red-induction_P Parameter: Light Value: Far-red vs. White
  misc_feature: MA Experiment 20001247 PARAMETER Experiment Name: At_Far-red-induction_P Parameter: Organism Value: A. thaliana
  misc_feature: MA Experiment 20001247 PARAMETER Experiment Name: At_Far-red-induction_P Parameter: Plant Line Value: Columbia
  misc_feature: MA Experiment 20001247 PARAMETER Experiment Name: At_Far-red-induction_P Parameter: Timepoint (hr) Value: 1
  misc_feature: MA Experiment 20001247 PARAMETER Experiment Name: At_Far-red-induction_P Parameter: Tissue Value: Whole Plant
  misc_feature: MA Experiment ID: 20001248 Result: Down-regulated in Transcription
  misc_feature: MA Experiment 20001248 PARAMETER Experiment Name: At_Far-red-induction_P Parameter: Age (day) Value: 7
  misc_feature: MA Experiment 20001248 PARAMETER Experiment Name: At_Far-red-induction_P Parameter: Light Value: Far-red vs. White
  misc_feature: MA Experiment 20001248 PARAMETER Experiment Name: At_Far-red-induction_P Parameter: Organism Value: A. thaliana
  misc_feature: MA Experiment 20001248 PARAMETER Experiment Name: At_Far-red-induction_P Parameter: Plant Line Value: Columbia
  misc_feature: MA Experiment 20001248 PARAMETER Experiment Name: At_Far-red-induction_P Parameter: Timepoint (hr) Value: 4
  misc_feature: MA Experiment 20001248 PARAMETER Experiment Name: At_Far-red-induction_P Parameter: Tissue Value: Whole Plant
  misc_feature: MA Experiment ID: 20001450 Result: Down-regulated in Transcription
  misc_feature: MA Experiment 20001450 PARAMETER Experiment Name: At_Far-red-induction_P Parameter: Age (day) Value: 7
  misc_feature: MA Experiment 20001450 PARAMETER Experiment Name: At_Far-red-induction_P Parameter: Light Value: Far-red vs. White
  misc_feature: MA Experiment 20001450 PARAMETER Experiment Name: At_Far-red-induction_P Parameter: Organism Value: A. thaliana
  misc_feature: MA Experiment 20001450 PARAMETER Experiment Name: At_Far-red-induction_P Parameter: Plant Line Value: Columbia
  misc_feature: MA Experiment 20001450 PARAMETER Experiment Name: At_Far-red-induction_P Parameter: Timepoint (hr) Value: 8
  misc_feature: MA Experiment 20001450 PARAMETER Experiment Name: At_Far-red-induction_P Parameter: Tissue Value: Whole Plant
  misc_feature: MA Experiment ID: 20001451 Result: Down-regulated in Transcription
  misc_feature: MA Experiment 20001451 PARAMETER Experiment Name: At_Far-red-induction_P Parameter: Age (day) Value: 7
  misc_feature: MA Experiment 20001451 PARAMETER Experiment Name: At_Far-red-induction_P Parameter: Light Value: Far-red vs. White
  misc_feature: MA Experiment 20001451 PARAMETER Experiment Name: At_Far-red-induction_P Parameter: Organism Value: A. thaliana
  misc_feature: MA Experiment 20001451 PARAMETER Experiment Name: At_Far-red-induction_P Parameter: Plant Line Value: Columbia
  misc_feature: MA Experiment 20001451 PARAMETER Experiment Name: At_Far-red-induction_P Parameter: Timepoint (hr) Value: 24
  misc_feature: MA Experiment 20001451 PARAMETER Experiment Name: At_Far-red-induction_P Parameter: Tissue Value: Whole Plant
  misc_feature: MA Experiment ID: 20001458 Result: Up-regulated in Transcription
  misc_feature: MA Experiment 20001458 PARAMETER Experiment Name: At_50mM_NH4NO3_L-to-H_P Parameter: Age (day) Value: Undefined
  misc_feature: MA Experiment 20001458 PARAMETER Experiment Name: At_50mM_NH4NO3_L-to-H_P Parameter: Organism Value: Undefined
  misc_feature: MA Experiment 20001458 PARAMETER Experiment Name: At_50mM_NH4NO3_L-to-H_P Parameter: Plant Line Value: Undefined
  misc_feature: MA Experiment 20001458 PARAMETER Experiment Name: At_50mM_NH4NO3_L-to-H_P Parameter: Timepoint (hr) Value: 2
  misc_feature: MA Experiment 20001458 PARAMETER Experiment Name: At_50mM_NH4NO3_L-to-H_P Parameter: Tissue Value: Siliques
  misc_feature: MA Experiment 20001458 PARAMETER Experiment Name: At_50mM_NH4NO3_L-to-H_P Parameter: Treatment Value: 50mM NH4NO3 vs. 100mM Manitol
  misc_feature: MA Experiment ID: 20001554 Result: Down-regulated in Transcription
  misc_feature: MA Experiment 20001554 PARAMETER Experiment Name: At_Drought_Soil_Dry_P Parameter: Age (day) Value: 21
  misc_feature: MA Experiment 20001554 PARAMETER Experiment Name: At_Drought_Soil_Dry_P Parameter: Organism Value: A. thaliana
  misc_feature: MA Experiment 20001554 PARAMETER Experiment Name: At_Drought_Soil_Dry_P Parameter: Plant Line Value: WS
  misc_feature: MA Experiment 20001554 PARAMETER Experiment Name: At_Drought_Soil_Dry_P Parameter: Post Timepoint (hr) Value: None
  misc_feature: MA Experiment 20001554 PARAMETER Experiment Name: At_Drought_Soil_Dry_P Parameter: Post-Treatment Value: None
  misc_feature: MA Experiment 20001554 PARAMETER Experiment Name: At_Drought_Soil_Dry_P Parameter: Timepoint (day) Value: 7
  misc_feature: MA Experiment 20001554 PARAMETER Experiment Name: At_Drought_Soil_Dry_P Parameter: Treatment Value: Drought vs. No Drought
  misc_feature: MA Experiment ID: 20001555 Result: Down-regulated in Transcription
  misc_feature: MA Experiment 20001555 PARAMETER Experiment Name: At_Drought_Soil_Dry_P Parameter: Age (day) Value: 24
  misc_feature: MA Experiment 20001555 PARAMETER Experiment Name: At_Drought_Soil_Dry_P Parameter: Organism Value: A. thaliana
  misc_feature: MA Experiment 20001555 PARAMETER Experiment Name: At_Drought_Soil_Dry_P Parameter: Plant Line Value: WS
  misc_feature: MA Experiment 20001555 PARAMETER Experiment Name: At_Drought_Soil_Dry_P Parameter: Post Timepoint (hr) Value: None
  misc_feature: MA Experiment 20001555 PARAMETER Experiment Name: At_Drought_Soil_Dry_P Parameter: Post-Treatment Value: None
  misc_feature: MA Experiment 20001555 PARAMETER Experiment Name: At_Drought_Soil_Dry_P Parameter: Timepoint (day) Value: 10
  misc_feature: MA Experiment 20001555 PARAMETER Experiment Name: At_Drought_Soil_Dry_P Parameter: Treatment Value: Drought vs. No Drought
  misc_feature: MA Experiment ID: 20001556 Result: Down-regulated in Transcription
  misc_feature: MA Experiment 20001556 PARAMETER Experiment Name: At_Drought_Soil_Dry_P Parameter: Age (day) Value: 26
  misc_feature: MA Experiment 20001556 PARAMETER Experiment Name: At_Drought_Soil_Dry_P Parameter: Organism Value: A. thaliana
  misc_feature: MA Experiment 20001556 PARAMETER Experiment Name: At_Drought_Soil_Dry_P Parameter: Plant Line Value: WS
  misc_feature: MA Experiment 20001556 PARAMETER Experiment Name: At_Drought_Soil_Dry_P Parameter: Post Timepoint (hr) Value: None
  misc_feature: MA Experiment 20001556 PARAMETER Experiment Name: At_Drought_Soil_Dry_P Parameter: Post-Treatment Value: None
  misc_feature: MA Experiment 20001556 PARAMETER Experiment Name: At_Drought_Soil_Dry_P Parameter: Timepoint (day) Value: 12
  misc_feature: MA Experiment 20001556 PARAMETER Experiment Name: At_Drought_Soil_Dry_P Parameter: Treatment Value: Drought vs. No Drought
  misc_feature: MA Experiment ID: 20001557 Result: Up-regulated in Transcription
  misc_feature: MA Experiment 20001557 PARAMETER Experiment Name: At_Drought_Soil_Dry_P Parameter: Age (day) Value: 27
  misc_feature: MA Experiment 20001557 PARAMETER Experiment Name: At_Drought_Soil_Dry_P Parameter: Organism Value: A. thaliana
  misc_feature: MA Experiment 20001557 PARAMETER Experiment Name: At_Drought_Soil_Dry_P Parameter: Plant Line Value: WS
  misc_feature: MA Experiment 20001557 PARAMETER Experiment Name: At_Drought_Soil_Dry_P Parameter: Post Timepoint (hr) Value: 3
  misc_feature: MA Experiment 20001557 PARAMETER Experiment Name: At_Drought_Soil_Dry_P Parameter: Post-Treatment Value: Re-Water vs. No Drought
  misc_feature: MA Experiment 20001557 PARAMETER Experiment Name: At_Drought_Soil_Dry_P Parameter: Timepoint (day) Value: 13
  misc_feature: MA Experiment 20001557 PARAMETER Experiment Name: At_Drought_Soil_Dry_P Parameter: Treatment Value: Drought vs. No Drought
  misc_feature: MA Experiment ID: 20001558 Result: Up-regulated in Transcription
  misc_feature: MA Experiment 20001558 PARAMETER Experiment Name: At_Drought_Soil_Dry_P Parameter: Age (day) Value: 27
  misc_feature: MA Experiment 20001558 PARAMETER Experiment Name: At_Drought_Soil_Dry_P Parameter: Organism Value: A. thaliana
  misc_feature: MA Experiment 20001558 PARAMETER Experiment Name: At_Drought_Soil_Dry_P Parameter: Plant Line Value: WS
  misc_feature: MA Experiment 20001558 PARAMETER Experiment Name: At_Drought_Soil_Dry_P Parameter: Post Timepoint (hr) Value: 6
  misc_feature: MA Experiment 20001558 PARAMETER Experiment Name: At_Drought_Soil_Dry_P Parameter: Post-Treatment Value: Re-Water vs. No Drought
  misc_feature: MA Experiment 20001558 PARAMETER Experiment Name: At_Drought_Soil_Dry_P Parameter: Timepoint (day) Value: 13
  misc_feature: MA Experiment 20001558 PARAMETER Experiment Name: At_Drought_Soil_Dry_P Parameter: Treatment Value: Drought vs. No Drought
  misc_feature: MA Experiment ID: 20001559 Result: Down-regulated in Transcription
  misc_feature: MA Experiment 20001559 PARAMETER Experiment Name: At_Drought_Soil_Dry_P Parameter: Age (day) Value: 28
  misc_feature: MA Experiment 20001559 PARAMETER Experiment Name: At_Drought_Soil_Dry_P Parameter: Organism Value: A. thaliana
  misc_feature: MA Experiment 20001559 PARAMETER Experiment Name: At_Drought_Soil_Dry_P Parameter: Plant Line Value: WS
  misc_feature: MA Experiment 20001559 PARAMETER Experiment Name: At_Drought_Soil_Dry_P Parameter: Post Timepoint (hr) Value: 29
  misc_feature: MA Experiment 20001559 PARAMETER Experiment Name: At_Drought_Soil_Dry_P Parameter: Post-Treatment Value: Re-Water vs. No Drought
  misc_feature: MA Experiment 20001559 PARAMETER Experiment Name: At_Drought_Soil_Dry_P Parameter: Timepoint (day) Value: 14
  misc_feature: MA Experiment 20001559 PARAMETER Experiment Name: At_Drought_Soil_Dry_P Parameter: Treatment Value: Drought vs. No Drought
  misc_feature: MA Experiment ID: 20001560 Result: Up-regulated in Transcription
  misc_feature: MA Experiment 20001560 PARAMETER Experiment Name: At_Drought_Soil_Dry_P Parameter: Age (day) Value: 28
  misc_feature: MA Experiment 20001560 PARAMETER Experiment Name: At_Drought_Soil_Dry_P Parameter: Organism Value: A. thaliana
  misc_feature: MA Experiment 20001560 PARAMETER Experiment Name: At_Drought_Soil_Dry_P Parameter: Plant Line Value: WS
  misc_feature: MA Experiment 20001560 PARAMETER Experiment Name: At_Drought_Soil_Dry_P Parameter: Post Timepoint (hr) Value: None
  misc_feature: MA Experiment 20001560 PARAMETER Experiment Name: At_Drought_Soil_Dry_P Parameter: Post-Treatment Value: None
  misc_feature: MA Experiment 20001560 PARAMETER Experiment Name: At_Drought_Soil_Dry_P Parameter: Timepoint (day) Value: 14
  misc_feature: MA Experiment 20001560 PARAMETER Experiment Name: At_Drought_Soil_Dry_P Parameter: Treatment Value: Drought vs. No Drought
  misc_feature: MA Experiment ID: 20001757 Result: Up-regulated in Transcription
  misc_feature: MA Experiment 20001757 PARAMETER Experiment Name: At_50mM_NH4NO3_L-to-H_P Parameter: Timepoint (hr) Value: 6
  misc_feature: MA Experiment 20001757 PARAMETER Experiment Name: At_50mM_NH4NO3_L-to-H_P Parameter: Tissue Value: Leaf
  misc_feature: MA Experiment 20001757 PARAMETER Experiment Name: At_50mM_NH4NO3_L-to-H_P Parameter: Treatment Value: 50mM NH4NO3 vs 100mM Mannitol
  misc_feature: MA Experiment ID: 20001906 Result: Down-regulated in Transcription
  misc_feature: MA Experiment 20001906 PARAMETER Experiment Name: At_Drought_Reproduction_P Parameter: Age (day) Value: 35
  misc_feature: MA Experiment 20001906 PARAMETER Experiment Name: At_Drought_Reproduction_P Parameter: Organism Value: A. thaliana
  misc_feature: MA Experiment 20001906 PARAMETER Experiment Name: At_Drought_Reproduction_P Parameter: Plant Line Value: WS
  misc_feature: MA Experiment 20001906 PARAMETER Experiment Name: At_Drought_Reproduction_P Parameter: Timepoint (day) Value: 5
  misc_feature: MA Experiment 20001906 PARAMETER Experiment Name: At_Drought_Reproduction_P Parameter: Tissue Value: Siliques
  misc_feature: MA Experiment 20001906 PARAMETER Experiment Name: At_Drought_Reproduction_P Parameter: Treatment Value: Drought vs. No Drought
  misc_feature: MA Experiment ID: 20001908 Result: Down-regulated in Transcription
  misc_feature: MA Experiment 20001908 PARAMETER Experiment Name: At_Drought_Reproduction_P Parameter: Age (day) Value: 40
  misc_feature: MA Experiment 20001908 PARAMETER Experiment Name: At_Drought_Reproduction_P Parameter: Organism Value: A. thaliana
  misc_feature: MA Experiment 20001908 PARAMETER Experiment Name: At_Drought_Reproduction_P Parameter: Plant Line Value: WS
  misc_feature: MA Experiment 20001908 PARAMETER Experiment Name: At_Drought_Reproduction_P Parameter: Timepoint (day) Value: 10
  misc_feature: MA Experiment 20001908 PARAMETER Experiment Name: At_Drought_Reproduction_P Parameter: Tissue Value: Siliques
  misc_feature: MA Experiment 20001908 PARAMETER Experiment Name: At_Drought_Reproduction_P Parameter: Treatment Value: Drought vs. No Drought
  misc_feature: MA Experiment ID: 20001911 Result: Down-regulated in Transcription
  misc_feature: MA Experiment 20001911 PARAMETER Experiment Name: At_Drought_Reproduction_P Parameter: Age (day) Value: 40
  misc_feature: MA Experiment 20001911 PARAMETER Experiment Name: At_Drought_Reproduction_P Parameter: Organism Value: A. thaliana
  misc_feature: MA Experiment 20001911 PARAMETER Experiment Name: At_Drought_Reproduction_P Parameter: Plant Line Value: WS
  misc_feature: MA Experiment 20001911 PARAMETER Experiment Name: At_Drought_Reproduction_P Parameter: Timepoint (day) Value: 10
  misc_feature: MA Experiment 20001911 PARAMETER Experiment Name: At_Drought_Reproduction_P Parameter: Tissue Value: Flowers
  misc_feature: MA Experiment 20001911 PARAMETER Experiment Name: At_Drought_Reproduction_P Parameter: Treatment Value: Drought vs. No Drought

SEQ ID NO: 33046 - protein, 280 aa, Arabidopsis thaliana; identical to SEQ ID NO: 29456
  peptide (1)..(280): Ceres Seq. ID no. 12385292
  misc_feature (188)..(265): Pfam Name: Pollen allergen Pfam Description: Pollen allergen
  misc_feature (40)..(280): Homolog of NCBI NO: 29421118 NR Description: expansin [Vitis labrusca x Vitis vinifera]
  misc_feature (36)..(280): Homolog of NCBI NO: 29467507 NR Description: expansin [Pyrus communis]
  misc_feature (47)..(280): Homolog of NCBI NO: 11281293 NR Description: expansin EXP1 [imported] - Arabidopsis thaliana
  misc_feature (40)..(280): Homolog of NCBI NO: 38046730 NR Description: alpha-expansin 3 [Populus tremula x Populus
  misc_feature (32)..(280): Homolog of NCBI NO: 21615407 NR Description: alpha-expansin 3 [Cicer arietinum]
  misc_feature (32)..(280): Homolog of NCBI NO: 30697882 NR Description: expansin, putative (EXP1) [Arabidopsis thaliana]
  misc_feature (36)..(280): Homolog of NCBI NO: 29467505 NR Description: expansin [Pyrus communis]
  misc_feature (32)..(280): Homolog of NCBI NO: 15222356 NR Description: expansin (At-EXP1)
  misc_feature (32)..(280): Homolog of NCBI NO: 21553381 NR Description: alpha-expansin 10 precursor (At-EXP10) (AtEx10)
  misc_feature (32)..(280): Homolog of NCBI NO: 15223347 NR Description: expansin, putative

SEQ ID NO: 33047 - protein, 249 aa, Arabidopsis thaliana; identical to SEQ ID NO: 24224
  peptide (1)..(249): Ceres Seq. ID no. 12385293
  misc_feature (157)..(234): Pfam Name: Pollen allergen Pfam Description: Pollen allergen
  misc_feature (9)..(249): Homolog of NCBI NO: 29421118 NR Description: expansin [Vitis labrusca x Vitis vinifera]
  misc_feature (5)..(249): Homolog of NCBI NO: 29467507 NR Description: expansin [Pyrus communis]
  misc_feature (16)..(249): Homolog of NCBI NO: 11281293 NR Description: expansin EXP1 [imported] - Arabidopsis thaliana
  misc_feature (9)..(249): Homolog of NCBI NO: 38046730 NR Description: alpha-expansin 3 [Populus tremula x Populus
  misc_feature (1)..(249): Homolog of NCBI NO: 21615407 NR Description: alpha-expansin 3 [Cicer arietinum]
  misc_feature (1)..(249): Homolog of NCBI NO: 30697882 NR Description: expansin, putative (EXP1) [Arabidopsis thaliana]
  misc_feature (5)..(249): Homolog of NCBI NO: 29467505 NR Description: expansin [Pyrus communis]
  misc_feature (1)..(249): Homolog of NCBI NO: 15222356 NR Description: expansin (At-EXP1)
  misc_feature (1)..(249): Homolog of NCBI NO: 21553381 NR Description: alpha-expansin 10 precursor (At-EXP10) (AtEx10)
  misc_feature (1)..(249): Homolog of NCBI NO: 15223347 NR Description: expansin, putative

SEQ ID NO: 33048 - protein, 241 aa, Arabidopsis thaliana; identical to SEQ ID NO: 24225
  peptide (1)..(241): Ceres Seq. ID no. 12385294
  misc_feature (149)..(226): Pfam Name: Pollen allergen Pfam Description: Pollen allergen
  misc_feature (1)..(241): Homolog of NCBI NO: 29421118 NR Description: expansin [Vitis labrusca x Vitis vinifera]
  misc_feature (1)..(241): Homolog of NCBI NO: 29467507 NR Description: expansin [Pyrus communis]
  misc_feature (8)..(241): Homolog of NCBI NO: 11281293 NR Description: expansin EXP1 [imported] - Arabidopsis thaliana
  misc_feature (1)..(241): Homolog of NCBI NO: 38046730 NR Description: alpha-expansin 3 [Populus tremula x Populus
  misc_feature (1)..(241): Homolog of NCBI NO: 21615407 NR Description: alpha-expansin 3 [Cicer arietinum]
  misc_feature (1)..(241): Homolog of NCBI NO: 30697882 NR Description: expansin, putative (EXP1) [Arabidopsis thaliana]
  misc_feature (1)..(241): Homolog of NCBI NO: 29467505 NR Description: expansin [Pyrus communis]
  misc_feature (1)..(241): Homolog of NCBI NO: 15222356 NR Description: expansin (At-EXP1)
  misc_feature (1)..(241): Homolog of NCBI NO: 21553381 NR Description: alpha-expansin 10 precursor (At-EXP10) (AtEx10)
  misc_feature (1)..(241): Homolog of NCBI NO: 15223347 NR Description: expansin, putative

SEQ ID NO: 33049 - DNA, 1151 bp, Arabidopsis thaliana; identical to SEQ ID NO: 29459
  misc_feature (1)..(1151): Ceres Seq. ID no. 12327382
  misc_feature: MA Experiment ID: 108462 Result: Down-regulated in Transcription
  misc_feature: MA Experiment 108462 PARAMETER Experiment Name: At_Germinating_Seeds_cDNA_P Parameter: Age (day) Value: 2 vs. 0
  misc_feature: MA Experiment 108462 PARAMETER Experiment Name: At_Germinating_Seeds_cDNA_P Parameter: Tissue Value: Germinating Seeds
  misc_feature: MA Experiment ID: 108572 Result: Up-regulated in Transcription
  misc_feature: MA Experiment 108572 PARAMETER Experiment Name: At_Drought_cDNA_P Parameter: Timepoint (hr) Value: 1
  misc_feature: MA Experiment 108572 PARAMETER Experiment Name: At_Drought_cDNA_P Parameter: Tissue Value: Aerial
  misc_feature: MA Experiment 108572 PARAMETER Experiment Name: At_Drought_cDNA_P Parameter: Treatment Value: Drought vs. No Drought
  misc_feature: MA Experiment ID: 108579 Result: Up-regulated in Transcription
  misc_feature: MA Experiment 108579 PARAMETER Experiment Name: At_4deg_Cold_cDNA_P Parameter: Temperature (deg C) Value: 4 vs. 22
  misc_feature: MA Experiment 108579 PARAMETER Experiment Name: At_4deg_Cold_cDNA_P Parameter: Timepoint (hr) Value: 6
  misc_feature: MA Experiment 108579 PARAMETER Experiment Name: At_4deg_Cold_cDNA_P Parameter: Tissue Value: Aerial
  misc_feature: MA Experiment ID: 108594 Result: Down-regulated in Transcription
  misc_feature: MA Experiment 108594 PARAMETER Experiment Name: At_Ler-rhl_Root_cDNA_P Parameter: Plant Line Value: null
  misc_feature: MA Experiment ID: 108595 Result: Up-regulated in Transcription
  misc_feature: MA Experiment 108595 PARAMETER Experiment Name: At_Ler-pi_Ovule_cDNA_P Parameter: Plant Line Value: null
  misc_feature: MA Experiment ID: 108605 Result: Up-regulated in Transcription
  misc_feature: MA Experiment 108605 PARAMETER Experiment Name: At_100uM_ABA_cDNA_P Parameter: Timepoint (hr) Value: 6
  misc_feature: MA Experiment 108605 PARAMETER Experiment Name: At_100uM_ABA_cDNA_P Parameter: Tissue Value: Aerial
  misc_feature: MA Experiment 108605 PARAMETER Experiment Name: At_100uM_ABA_cDNA_P Parameter: Treatment Value: 100uM ABA vs. No Treatment
  misc_feature: MA Experiment ID: 108607 Result: Up-regulated in Transcription
  misc_feature: MA Experiment 108607 PARAMETER Experiment Name: At_100uM_ABA_cDNA_P Parameter: Timepoint (hr) Value: 4
  misc_feature: MA Experiment 108607 PARAMETER Experiment Name: At_100uM_ABA_cDNA_P Parameter: Tissue Value: Aerial
  misc_feature: MA Experiment 108607 PARAMETER Experiment Name: At_100uM_ABA_cDNA_P Parameter: Treatment Value: 100uM ABA vs. No Treatment
  misc_feature: MA Experiment ID: 108608 Result: Up-regulated in Transcription
  misc_feature: MA Experiment 108608 PARAMETER Experiment Name: At_100uM_ABA_cDNA_P Parameter: Timepoint (hr) Value: 1
  misc_feature: MA Experiment 108608 PARAMETER Experiment Name: At_100uM_ABA_cDNA_P Parameter: Tissue Value: Aerial
  misc_feature: MA Experiment 108608 PARAMETER Experiment Name: At_100uM_ABA_cDNA_P Parameter: Treatment Value: 100uM ABA vs. No Treatment
  misc_feature: MA Experiment ID: 20000069 Result: Up-regulated in Transcription
  misc_feature: MA Experiment 20000069 PARAMETER Experiment Name: At_100uM_ABA_Mutants_cDNA_P Parameter: Plant Line Value: CS23
  misc_feature: MA Experiment 20000069 PARAMETER Experiment Name: At_100uM_ABA_Mutants_cDNA_P Parameter: Timepoint (hr) Value: 6
  misc_feature: MA Experiment 20000069 PARAMETER Experiment Name: At_100uM_ABA_Mutants_cDNA_P Parameter: Tissue Value: Aerial
  misc_feature: MA Experiment 20000069 PARAMETER Experiment Name: At_100uM_ABA_Mutants_cDNA_P Parameter: Treatment Value: 100uM ABA vs. No Treatment
  misc_feature: MA Experiment ID: 20000070 Result: Up-regulated in Transcription
  misc_feature: MA Experiment 20000070 PARAMETER Experiment Name: At_100uM_ABA_Mutants_cDNA_P Parameter: Plant Line Value: CS24
  misc_feature: MA Experiment 20000070 PARAMETER Experiment Name: At_100uM_ABA_Mutants_cDNA_P Parameter: Timepoint (hr) Value: 6
  misc_feature: MA Experiment 20000070 PARAMETER Experiment Name: At_100uM_ABA_Mutants_cDNA_P Parameter: Tissue Value: Aerial
  misc_feature: MA Experiment 20000070 PARAMETER Experiment Name: At_100uM_ABA_Mutants_cDNA_P Parameter: Treatment Value: 100uM ABA vs. No Treatment
  misc_feature: MA Experiment ID: 20000071 Result: Up-regulated in Transcription
  misc_feature: MA Experiment 20000071 PARAMETER Experiment Name: At_100uM_ABA_Mutants_cDNA_P Parameter: Plant Line Value: CS8104
  misc_feature: MA Experiment 20000071 PARAMETER Experiment Name: At_100uM_ABA_Mutants_cDNA_P Parameter: Timepoint (hr) Value: 6
  misc_feature: MA Experiment 20000071 PARAMETER Experiment Name: At_100uM_ABA_Mutants_cDNA_P Parameter: Tissue Value: Aerial
  misc_feature: MA Experiment 20000071 PARAMETER Experiment Name: At_100uM_ABA_Mutants_cDNA_P Parameter: Treatment Value: 100uM ABA vs. No Treatment
  misc_feature: MA Experiment ID: 20000072 Result: Up-regulated in Transcription
  misc_feature: MA Experiment 20000072 PARAMETER Experiment Name: At_100uM_ABA_Mutants_cDNA_P Parameter: Plant Line Value: CS8105
  misc_feature: MA Experiment 20000072 PARAMETER Experiment Name: At_100uM_ABA_Mutants_cDNA_P Parameter: Timepoint (hr) Value: 6
  misc_feature: MA Experiment 20000072 PARAMETER Experiment Name: At_100uM_ABA_Mutants_cDNA_P Parameter: Tissue Value: Aerial
  misc_feature: MA Experiment 20000072 PARAMETER Experiment Name: At_100uM_ABA_Mutants_cDNA_P Parameter: Treatment Value: 100uM ABA vs. No Treatment
  misc_feature: MA Experiment ID: 20000086 Result: Up-regulated in Transcription
  misc_feature: MA Experiment 20000086 PARAMETER Experiment Name: At_100uM_ABA_Mutants_cDNA_P Parameter: Plant Line Value: CS22
  misc_feature: MA Experiment 20000086 PARAMETER Experiment Name: At_100uM_ABA_Mutants_cDNA_P Parameter: Timepoint (hr) Value: 6
  misc_feature: MA Experiment 20000086 PARAMETER Experiment Name: At_100uM_ABA_Mutants_cDNA_P Parameter: Tissue Value: Aerial
  misc_feature: MA Experiment 20000086 PARAMETER Experiment Name: At_100uM_ABA_Mutants_cDNA_P Parameter: Treatment Value: 100uM ABA vs. No Treatment
  misc_feature: MA Experiment ID: 20000087 Result: Up-regulated in Transcription
  misc_feature: MA Experiment 20000087 PARAMETER Experiment Name: At_100uM_ABA_Mutants_cDNA_P Parameter: Plant Line Value: WS
  misc_feature: MA Experiment 20000087 PARAMETER Experiment Name: At_100uM_ABA_Mutants_cDNA_P Parameter: Timepoint (hr) Value: 6
  misc_feature: MA Experiment 20000087 PARAMETER Experiment Name: At_100uM_ABA_Mutants_cDNA_P Parameter: Tissue Value: Aerial
  misc_feature: MA Experiment 20000087 PARAMETER Experiment Name: At_100uM_ABA_Mutants_cDNA_P Parameter: Treatment Value: 100uM ABA vs. No Treatment
  misc_feature: MA Experiment ID: 20000088 Result: Up-regulated in Transcription
  misc_feature: MA Experiment 20000088 PARAMETER Experiment Name: At_100uM_ABA_Mutants_cDNA_P Parameter: Plant Line Value: Landsberg
  misc_feature: MA Experiment 20000088 PARAMETER Experiment Name: At_100uM_ABA_Mutants_cDNA_P Parameter: Timepoint (hr) Value: 6
  misc_feature: MA Experiment 20000088 PARAMETER Experiment Name: At_100uM_ABA_Mutants_cDNA_P Parameter: Tissue Value: Aerial
  misc_feature: MA Experiment 20000088 PARAMETER Experiment Name: At_100uM_ABA_Mutants_cDNA_P Parameter: Treatment Value: 100uM ABA vs. No Treatment
  misc_feature: MA Experiment ID: 20000090 Result: Up-regulated in Transcription
  misc_feature: MA Experiment ID: 20000111 Result: Down-regulated in Transcription
  misc_feature: MA Experiment 20000111 PARAMETER Experiment Name: At_42deg_Heat_cDNA_P Parameter: Temperature (deg C) Value: 42 vs. 22
  misc_feature: MA Experiment 20000111 PARAMETER Experiment Name: At_42deg_Heat_cDNA_P Parameter: Timepoint (hr) Value: 6
  misc_feature: MA Experiment 20000111 PARAMETER Experiment Name: At_42deg_Heat_cDNA_P Parameter: Tissue Value: Aerial
  misc_feature: MA Experiment ID: 20000113 Result: Down-regulated in Transcription
  misc_feature: MA Experiment 20000113 PARAMETER Experiment Name: At_42deg_Heat_cDNA_P Parameter: Temperature (deg C) Value: 42 vs. 22
  misc_feature: MA Experiment 20000113 PARAMETER Experiment Name: At_42deg_Heat_cDNA_P Parameter: Timepoint (hr) Value: 8
  misc_feature: MA Experiment 20000113 PARAMETER Experiment Name: At_42deg_Heat_cDNA_P Parameter: Tissue Value: Aerial
  misc_feature: MA Experiment ID: 20000117 Result: Up-regulated in Transcription
  misc_feature: MA Experiment 20000117 PARAMETER Experiment Name: At_100uM_ABA_Mutants_cDNA_P Parameter: Plant Line Value: Columbia
  misc_feature: MA Experiment 20000117 PARAMETER Experiment Name: At_100uM_ABA_Mutants_cDNA_P Parameter: Timepoint (hr) Value: 6
  misc_feature: MA Experiment 20000117 PARAMETER Experiment Name: At_100uM_ABA_Mutants_cDNA_P Parameter: Tissue Value: Aerial
  misc_feature: MA Experiment 20000117 PARAMETER Experiment Name: At_100uM_ABA_Mutants_cDNA_P Parameter: Treatment Value: 100uM ABA vs. No Treatment
  misc_feature: MA Experiment ID: 20000173 Result: Down-regulated in Transcription
  misc_feature: MA Experiment 20000173 PARAMETER Experiment Name: At_42deg_Heat_P Parameter: Age (day) Value: 14
  misc_feature: MA Experiment 20000173 PARAMETER Experiment Name: At_42deg_Heat_P Parameter: Organism Value: A. thaliana
  misc_feature: MA Experiment 20000173 PARAMETER Experiment Name: At_42deg_Heat_P Parameter: Plant Line Value: WS
  misc_feature: MA Experiment 20000173 PARAMETER Experiment Name: At_42deg_Heat_P Parameter: Temperature (deg C) Value: 42 vs. 22
  misc_feature: MA Experiment 20000173 PARAMETER Experiment Name: At_42deg_Heat_P Parameter: Timepoint (hr) Value: 6
  misc_feature: MA Experiment 20000173 PARAMETER Experiment Name: At_42deg_Heat_P Parameter: Tissue Value: Aerial
  misc_feature: MA Experiment ID: 20000224 Result: Up-regulated in Transcription
  misc_feature: MA Experiment ID: 20000234 Result: Up-regulated in Transcription
  misc_feature: MA Experiment 20000234 PARAMETER Experiment Name: At_Siliques_P Parameter: Age (day) Value: 21
  misc_feature: MA Experiment 20000234 PARAMETER Experiment Name: At_Siliques_P Parameter: Organism Value: A. thaliana
  misc_feature: MA Experiment 20000234 PARAMETER Experiment Name: At_Siliques_P Parameter: Plant Line Value: WS
  misc_feature: MA Experiment 20000234 PARAMETER Experiment Name: At_Siliques_P Parameter: Tissue Value: Less Than 5mm Siliques vs. Whole Plant
  misc_feature: MA Experiment ID: 20000235 Result: Up-regulated in Transcription
  misc_feature: MA Experiment 20000235 PARAMETER Experiment Name: At_Siliques_P Parameter: Age (day) Value: 21
  misc_feature: MA Experiment 20000235 PARAMETER Experiment Name: At_Siliques_P Parameter: Organism Value: A. thaliana
  misc_feature: MA Experiment 20000235 PARAMETER Experiment Name: At_Siliques_P Parameter: Plant Line Value: WS
  misc_feature: MA Experiment 20000235 PARAMETER Experiment Name: At_Siliques_P Parameter: Tissue Value: 5-10mm Siliques vs. Whole Plant
  misc_feature: MA Experiment ID: 20000267 Result: Up-regulated in Transcription
  misc_feature: MA Experiment 20000267 PARAMETER Experiment Name: At_Drought_P Parameter: Age (day) Value: 7
  misc_feature: MA Experiment 20000267 PARAMETER Experiment Name: At_Drought_P Parameter: Organism Value: A. thaliana
  misc_feature: MA Experiment 20000267 PARAMETER Experiment Name: At_Drought_P Parameter: Plant Line Value: WS
  misc_feature: MA Experiment 20000267 PARAMETER Experiment Name: At_Drought_P Parameter: Timepoint (hr) Value: 6
  misc_feature: MA Experiment 20000267 PARAMETER Experiment Name: At_Drought_P Parameter: Tissue Value: Whole Plant
  misc_feature: MA Experiment 20000267 PARAMETER Experiment Name: At_Drought_P Parameter: Treatment Value: Drought vs. No Drought
  misc_feature: MA Experiment ID: 20000437 Result: Up-regulated in Transcription
  misc_feature: MA Experiment 20000437 PARAMETER Experiment Name: At_Drought_P Parameter: Age (day) Value: 8
  misc_feature: MA Experiment 20000437 PARAMETER Experiment Name: At_Drought_P Parameter: Organism Value: A. thaliana
  misc_feature: MA Experiment 20000437 PARAMETER Experiment Name: At_Drought_P Parameter: Plant Line Value: WS
  misc_feature: MA Experiment 20000437 PARAMETER Experiment Name: At_Drought_P Parameter: Timepoint (hr) Value: 24
  misc_feature: MA Experiment 20000437 PARAMETER Experiment Name: At_Drought_P Parameter: Tissue Value: Whole Plant
  misc_feature: MA Experiment 20000437 PARAMETER Experiment Name: At_Drought_P Parameter: Treatment Value: Drought vs. No Drought
  misc_feature: MA Experiment ID: 20000438 Result: Down-regulated in Transcription
  misc_feature: MA Experiment 20000438 PARAMETER Experiment Name: At_Shoots__P Parameter: Age (day) Value: 14
  misc_feature: MA Experiment 20000438 PARAMETER Experiment Name: At_Shoots__P Parameter: Tissue Value: Shoots vs. Whole Plant
  misc_feature: MA Experiment ID: 20000441 Result: Down-regulated in Transcription
  misc_feature: MA Experiment 20000441 PARAMETER Experiment Name: At_1uM_BR-BRZ__P Parameter: Tissue Value: Shoot Apices
  misc_feature: MA Experiment 20000441 PARAMETER Experiment Name: At_1uM_BR-BRZ__P Parameter: Treatment Value: 1uM BR vs. No Treatment
  misc_feature: MA Experiment ID: 20000443 Result: Down-regulated in Transcription
  misc_feature: MA Experiment 20000443 PARAMETER Experiment Name: At_1uM_BR-BRZ__P Parameter: Tissue Value: Shoot Apices
  misc_feature: MA Experiment 20000443 PARAMETER Experiment Name: At_1uM_BR-BRZ__P Parameter: Treatment Value: 1uM BRZ vs. No Treatment
  misc_feature: MA Experiment ID: 20001247 Result: Down-regulated in Transcription
  misc_feature: MA Experiment 20001247 PARAMETER Experiment Name: At_Far-red-induction_P Parameter: Age (day) Value: 7
  misc_feature: MA Experiment 20001247 PARAMETER Experiment Name: At_Far-red-induction_P Parameter: Light Value: Far-red vs. White
  misc_feature: MA Experiment 20001247 PARAMETER Experiment Name: At_Far-red-induction_P Parameter: Organism Value: A. thaliana
  misc_feature: MA Experiment 20001247 PARAMETER Experiment Name: At_Far-red-induction_P Parameter: Plant Line Value: Columbia
  misc_feature: MA Experiment 20001247 PARAMETER Experiment Name: At_Far-red-induction_P Parameter: Timepoint (hr) Value: 1
  misc_feature: MA Experiment 20001247 PARAMETER Experiment Name: At_Far-red-induction_P Parameter: Tissue Value: Whole Plant
  misc_feature: MA Experiment ID: 20001450 Result: Down-regulated in Transcription
  misc_feature: MA Experiment 20001450 PARAMETER Experiment Name: At_Far-red-induction_P Parameter: Age (day) Value: 7
  misc_feature: MA Experiment 20001450 PARAMETER Experiment Name: At_Far-red-induction_P Parameter: Light Value: Far-red vs. White
  misc_feature: MA Experiment 20001450 PARAMETER Experiment Name: At_Far-red-induction_P Parameter: Organism Value: A. thaliana
  misc_feature: MA Experiment 20001450 PARAMETER Experiment Name: At_Far-red-induction_P Parameter: Plant Line Value: Columbia
  misc_feature: MA Experiment 20001450 PARAMETER Experiment Name: At_Far-red-induction_P Parameter: Timepoint (hr) Value: 8
  misc_feature: MA Experiment 20001450 PARAMETER Experiment Name: At_Far-red-induction_P Parameter: Tissue Value: Whole Plant
  misc_feature: MA Experiment ID: 20001451 Result: Down-regulated in Transcription
  misc_feature: MA Experiment 20001451 PARAMETER Experiment Name: At_Far-red-induction_P Parameter: Age (day) Value: 7
  misc_feature: MA Experiment 20001451 PARAMETER Experiment Name: At_Far-red-induction_P Parameter: Light Value: Far-red vs. White
  misc_feature: MA Experiment 20001451 PARAMETER Experiment Name: At_Far-red-induction_P Parameter: Organism Value: A. thaliana
  misc_feature: MA Experiment 20001451 PARAMETER Experiment Name: At_Far-red-induction_P Parameter: Plant Line Value: Columbia
  misc_feature: MA Experiment 20001451 PARAMETER Experiment Name: At_Far-red-induction_P Parameter: Timepoint (hr) Value: 24
  misc_feature: MA Experiment 20001451 PARAMETER Experiment Name: At_Far-red-induction_P Parameter: Tissue Value: Whole Plant
  misc_feature: MA Experiment ID: 20001555 Result: Up-regulated in Transcription
  misc_feature: MA Experiment 20001555 PARAMETER Experiment Name: At_Drought_Soil_Dry_P Parameter: Age (day) Value: 24
  misc_feature: MA Experiment 20001555 PARAMETER Experiment Name: At_Drought_Soil_Dry_P Parameter: Organism Value: A. thaliana
  misc_feature: MA Experiment 20001555 PARAMETER Experiment Name: At_Drought_Soil_Dry_P Parameter: Plant Line Value: WS
  misc_feature: MA Experiment 20001555 PARAMETER Experiment Name: At_Drought_Soil_Dry_P Parameter: Post Timepoint (hr) Value: None
  misc_feature: MA Experiment 20001555 PARAMETER Experiment Name: At_Drought_Soil_Dry_P Parameter: Post-Treatment Value: None
  misc_feature: MA Experiment 20001555 PARAMETER Experiment Name: At_Drought_Soil_Dry_P Parameter: Timepoint (day) Value: 10
  misc_feature: MA Experiment 20001555 PARAMETER Experiment Name: At_Drought_Soil_Dry_P Parameter: Treatment Value: Drought vs. No Drought
  misc_feature: MA Experiment ID: 20001556 Result: Up-regulated in Transcription
  misc_feature: MA Experiment 20001556 PARAMETER Experiment Name: At_Drought_Soil_Dry_P Parameter: Age (day) Value: 26
  misc_feature: MA Experiment 20001556 PARAMETER Experiment Name: At_Drought_Soil_Dry_P Parameter: Organism Value: A. thaliana
  misc_feature: MA Experiment 20001556 PARAMETER Experiment Name: At_Drought_Soil_Dry_P Parameter: Plant Line Value: WS
  misc_feature: MA Experiment 20001556 PARAMETER Experiment Name: At_Drought_Soil_Dry_P Parameter: Post Timepoint (hr) Value: None
  misc_feature: MA Experiment 20001556 PARAMETER Experiment Name: At_Drought_Soil_Dry_P Parameter: Post-Treatment Value: None
  misc_feature: MA Experiment 20001556 PARAMETER Experiment Name: At_Drought_Soil_Dry_P Parameter: Timepoint (day) Value: 12
  misc_feature: MA Experiment 20001556 PARAMETER Experiment Name: At_Drought_Soil_Dry_P Parameter: Treatment Value: Drought vs. No Drought
  misc_feature: MA Experiment ID: 20001557 Result: Up-regulated in Transcription
  misc_feature: MA Experiment 20001557 PARAMETER Experiment Name: At_Drought_Soil_Dry_P Parameter: Age (day) Value: 27
  misc_feature: MA Experiment 20001557 PARAMETER Experiment Name: At_Drought_Soil_Dry_P Parameter: Organism Value: A. thaliana
  misc_feature: MA Experiment 20001557 PARAMETER Experiment Name: At_Drought_Soil_Dry_P Parameter: Plant Line Value: WS
  misc_feature: MA Experiment 20001557 PARAMETER Experiment Name: At_Drought_Soil_Dry_P Parameter: Post Timepoint (hr) Value: 3
  misc_feature: MA Experiment 20001557 PARAMETER Experiment Name: At_Drought_Soil_Dry_P Parameter: Post-Treatment Value: Re-Water vs. No Drought
  misc_feature: MA Experiment 20001557 PARAMETER Experiment Name: At_Drought_Soil_Dry_P Parameter: Timepoint (day) Value: 13
  misc_feature: MA Experiment 20001557 PARAMETER Experiment Name: At_Drought_Soil_Dry_P Parameter: Treatment Value: Drought vs. No Drought
  misc_feature: MA Experiment ID: 20001558 Result: Up-regulated in Transcription
  misc_feature: MA Experiment 20001558 PARAMETER Experiment Name: At_Drought_Soil_Dry_P Parameter: Age (day) Value: 27
  misc_feature: MA Experiment 20001558 PARAMETER Experiment Name: At_Drought_Soil_Dry_P Parameter: Organism Value: A. thaliana
  misc_feature: MA Experiment 20001558 PARAMETER Experiment Name: At_Drought_Soil_Dry_P Parameter: Plant Line Value: WS
  misc_feature: MA Experiment 20001558 PARAMETER Experiment Name: At_Drought_Soil_Dry_P Parameter: Post Timepoint (hr) Value: 6
  misc_feature: MA Experiment 20001558 PARAMETER Experiment Name: At_Drought_Soil_Dry_P Parameter: Post-Treatment Value: Re-Water vs. No Drought
  misc_feature: MA Experiment 20001558 PARAMETER Experiment Name: At_Drought_Soil_Dry_P Parameter: Timepoint (day) Value: 13
  misc_feature: MA Experiment 20001558 PARAMETER Experiment Name: At_Drought_Soil_Dry_P Parameter: Treatment Value: Drought vs. No Drought
  misc_feature: MA Experiment ID: 20001560 Result: Up-regulated in Transcription
  misc_feature: MA Experiment 20001560 PARAMETER Experiment Name: At_Drought_Soil_Dry_P Parameter: Age (day) Value: 28
  misc_feature: MA Experiment 20001560 PARAMETER Experiment Name: At_Drought_Soil_Dry_P Parameter: Organism Value: A. thaliana
  misc_feature: MA Experiment 20001560 PARAMETER Experiment Name: At_Drought_Soil_Dry_P Parameter: Plant Line Value: WS
  misc_feature: MA Experiment 20001560 PARAMETER Experiment Name: At_Drought_Soil_Dry_P Parameter: Post Timepoint (hr) Value: None
  misc_feature: MA Experiment 20001560 PARAMETER Experiment Name: At_Drought_Soil_Dry_P Parameter: Post-Treatment Value: None
  misc_feature: MA Experiment 20001560 PARAMETER Experiment Name: At_Drought_Soil_Dry_P Parameter: Timepoint (day) Value: 14
  misc_feature: MA Experiment 20001560 PARAMETER Experiment Name: At_Drought_Soil_Dry_P Parameter: Treatment Value: Drought vs. No Drought
  misc_feature: MA Experiment ID: 20001757 Result: Down-regulated in Transcription
  misc_feature: MA Experiment 20001757 PARAMETER Experiment Name: At_50mM_NH4NO3_L-to-H_P Parameter: Timepoint (hr) Value: 6
  misc_feature: MA Experiment 20001757 PARAMETER Experiment Name: At_50mM_NH4NO3_L-to-H_P Parameter: Tissue Value: Leaf
  misc_feature: MA Experiment 20001757 PARAMETER Experiment Name: At_50mM_NH4NO3_L-to-H_P Parameter: Treatment Value: 50mM NH4NO3 vs 100mM Mannitol
  misc_feature: MA Experiment ID: 20001904 Result: Up-regulated in Transcription
  misc_feature: MA Experiment 20001904 PARAMETER Experiment Name: At_Drought_Reproduction_P Parameter: Age (day) Value: 37
  misc_feature: MA Experiment 20001904 PARAMETER Experiment Name: At_Drought_Reproduction_P Parameter: Organism Value: A. thaliana
  misc_feature: MA Experiment 20001904 PARAMETER Experiment Name: At_Drought_Reproduction_P Parameter: Plant Line Value: WS
  misc_feature: MA Experiment 20001904 PARAMETER Experiment Name: At_Drought_Reproduction_P Parameter: Timepoint (day) Value: 7
  misc_feature: MA Experiment 20001904 PARAMETER Experiment Name: At_Drought_Reproduction_P Parameter: Tissue Value: Rosettes
  misc_feature: MA Experiment 20001904 PARAMETER Experiment Name: At_Drought_Reproduction_P Parameter: Treatment Value: Drought vs. No Drought
  misc_feature: MA Experiment ID: 20001905 Result: Up-regulated in Transcription
  misc_feature: MA Experiment 20001905 PARAMETER Experiment Name: At_Drought_Reproduction_P Parameter: Age (day) Value: 40
  misc_feature: MA Experiment 20001905 PARAMETER Experiment Name: At_Drought_Reproduction_P Parameter: Organism Value: A. thaliana
  misc_feature: MA Experiment 20001905 PARAMETER Experiment Name: At_Drought_Reproduction_P Parameter: Plant Line Value: WS
  misc_feature: MA Experiment 20001905 PARAMETER Experiment Name: At_Drought_Reproduction_P Parameter: Timepoint (day) Value: 10
  misc_feature: MA Experiment 20001905 PARAMETER Experiment Name: At_Drought_Reproduction_P Parameter: Tissue Value: Rosettes
  misc_feature: MA Experiment 20001905 PARAMETER Experiment Name: At_Drought_Reproduction_P Parameter: Treatment Value: Drought vs. No Drought

SEQ ID NO: 33050 - protein, 304 aa, Arabidopsis thaliana; identical to SEQ ID NO: 29460
  peptide (1)..(304): Ceres Seq. ID no. 12327383
  misc_feature (11)..(297): Homolog of NCBI NO: 17978649 NR Description: cinnamoyl-CoA reductase [Pinus taeda]
  misc_feature (11)..(297): Homolog of NCBI NO: 3341511 NR Description: cinnamoyl-CoA reductase [Saccharum officinarum]
  misc_feature (11)..(297): Homolog of NCBI NO: 25140432 NR Description: cinnamoyl CoA reductase [Hordeum vulgare]
  misc_feature (11)..(297): Homolog of NCBI NO: 9964087 NR Description: cinnamoyl CoA reductase [Lolium perenne]
  misc_feature (2)..(298): Homolog of NCBI NO: 37537132 NR Description: putative cinnamoyl-CoA reductase
  misc_feature (1)..(304): Homolog of NCBI NO: 21553548 NR Description: cinnamoyl-CoA reductase-like protein [Arabidopsis
  misc_feature (1)..(304): Homolog of NCBI NO: 15234751 NR Description: cinnamoyl-CoA reductase - like protein
  misc_feature (1)..(304): Homolog of NCBI NO: 25412171 NR Description: probable cinnamoyl CoA reductase [imported] -
  misc_feature (1)..(304): Homolog of NCBI NO: 18400407 NR Description: putative cinnamoyl CoA reductase
  misc_feature (1)..(304): Homolog of NCBI NO: 21553382 NR Description: putative cinnamoyl CoA reductase [Arabidopsis

SEQ ID NO: 33051 - protein, 252 aa, Arabidopsis thaliana; identical to SEQ ID NO: 29461
  peptide (1)..(252): Ceres Seq. ID no. 12327384
  misc_feature (1)..(245): Homolog of NCBI NO: 17978649 NR Description: cinnamoyl-CoA reductase [Pinus taeda]
  misc_feature (1)..(245): Homolog of NCBI NO: 3341511 NR Description: cinnamoyl-CoA reductase [Saccharum officinarum]
  misc_feature (1)..(245): Homolog of NCBI NO: 25140432 NR Description: cinnamoyl CoA reductase [Hordeum vulgare]
  misc_feature (1)..(245): Homolog of NCBI NO: 9964087 NR Description: cinnamoyl CoA reductase [Lolium perenne]
  misc_feature (1)..(246): Homolog of NCBI NO: 37537132 NR Description: putative cinnamoyl-CoA reductase
  misc_feature (1)..(252): Homolog of NCBI NO: 21553548 NR Description: cinnamoyl-CoA reductase-like protein [Arabidopsis
  misc_feature (1)..(252): Homolog of NCBI NO: 15234751 NR Description: cinnamoyl-CoA reductase - like protein
  misc_feature (1)..(252): Homolog of NCBI NO: 25412171 NR Description: probable cinnamoyl CoA reductase [imported] -
  misc_feature (1)..(252): Homolog of NCBI NO: 18400407 NR Description: putative cinnamoyl CoA reductase
  misc_feature (1)..(252): Homolog of NCBI NO: 21553382 NR Description: putative cinnamoyl CoA reductase [Arabidopsis

SEQ ID NO: 33052 - DNA, 1062 bp, Arabidopsis thaliana; identical to SEQ ID NO: 29462
  misc_feature (1)..(1062): Ceres Seq. ID no. 12421958
  misc_feature: MA Experiment ID: 108434 Result: Down-regulated in Transcription
  misc_feature: MA Experiment 108434 PARAMETER Experiment Name: At_Root_Tips_cDNA_P Parameter: Tissue Value: Root Tips
  misc_feature: MA Experiment ID: 108462 Result: Up-regulated in Transcription
  misc_feature: MA Experiment 108462 PARAMETER Experiment Name: At_Germinating_Seeds_cDNA_P Parameter: Age (day) Value: 2 vs. 0
  misc_feature: MA Experiment 108462 PARAMETER Experiment Name: At_Germinating_Seeds_cDNA_P Parameter: Tissue Value: Germinating Seeds
  misc_feature: MA Experiment ID: 108561 Result: Up-regulated in Transcription
  misc_feature: MA Experiment 108561 PARAMETER Experiment Name: At_100uM_ABA_cDNA_P Parameter: Timepoint (hr) Value: 6
  misc_feature: MA Experiment 108561 PARAMETER Experiment Name: At_100uM_ABA_cDNA_P Parameter: Tissue Value: Aerial
  misc_feature: MA Experiment 108561 PARAMETER Experiment Name: At_100uM_ABA_cDNA_P Parameter: Treatment Value: 100uM ABA vs. No Treatment
  misc_feature: MA Experiment ID: 108576 Result: Down-regulated in Transcription
  misc_feature: MA Experiment 108576 PARAMETER Experiment Name: At_42deg_Heat_cDNA_P Parameter: Temperature (deg C) Value: 42 vs. 22
  misc_feature: MA Experiment 108576 PARAMETER Experiment Name: At_42deg_Heat_cDNA_P Parameter: Timepoint (hr) Value: 1
  misc_feature: MA Experiment 108576 PARAMETER Experiment Name: At_42deg_Heat_cDNA_P Parameter: Tissue Value: Aerial
  misc_feature: MA Experiment ID: 108577 Result: Down-regulated in Transcription
  misc_feature: MA Experiment 108577 PARAMETER Experiment Name: At_42deg_Heat_cDNA_P Parameter: Temperature (deg C) Value: 42 vs. 22
  misc_feature: MA Experiment 108577 PARAMETER Experiment Name: At_42deg_Heat_cDNA_P Parameter: Timepoint (hr) Value: 6
  misc_feature: MA Experiment 108577 PARAMETER Experiment Name: At_42deg_Heat_cDNA_P Parameter: Tissue Value: Aerial
  misc_feature: MA Experiment ID: 108579 Result: Up-regulated in Transcription
  misc_feature: MA Experiment 108579 PARAMETER Experiment Name: At_4deg_Cold_cDNA_P Parameter: Temperature (deg C) Value: 4 vs. 22
  misc_feature: MA Experiment 108579 PARAMETER Experiment Name: At_4deg_Cold_cDNA_P Parameter: Timepoint (hr) Value: 6
  misc_feature: MA Experiment 108579 PARAMETER Experiment Name: At_4deg_Cold_cDNA_P Parameter: Tissue Value: Aerial
  misc_feature: MA Experiment ID: 108594 Result: Up-regulated in Transcription
  misc_feature: MA Experiment 108594 PARAMETER Experiment Name: At_Ler-rhl_Root_cDNA_P Parameter: Plant Line Value: null
  misc_feature: MA Experiment ID: 108595 Result: Up-regulated in Transcription
  misc_feature: MA Experiment 108595 PARAMETER Experiment Name: At_Ler-pi_Ovule_cDNA_P Parameter: Plant Line Value: null
  misc_feature: MA Experiment ID: 108607 Result: Up-regulated in Transcription
  misc_feature: MA Experiment 108607 PARAMETER Experiment Name: At_100uM_ABA_cDNA_P Parameter: Timepoint (hr) Value: 4
  misc_feature: MA Experiment 108607 PARAMETER Experiment Name: At_100uM_ABA_cDNA_P Parameter: Tissue Value: Aerial
  misc_feature: MA Experiment 108607 PARAMETER Experiment Name: At_100uM_ABA_cDNA_P Parameter: Treatment Value: 100uM ABA vs. No Treatment
  misc_feature: MA Experiment ID: 108668 Result: Down-regulated in Transcription
  misc_feature: MA Experiment 108668 PARAMETER Experiment Name: At_2mM_SA_cDNA_P Parameter: Plant Line Value: WS
  misc_feature: MA Experiment 108668 PARAMETER Experiment Name: At_2mM_SA_cDNA_P Parameter: Timepoint (hr) Value: 6
  misc_feature: MA Experiment 108668 PARAMETER Experiment Name: At_2mM_SA_cDNA_P Parameter: Treatment Value: 2mM SA vs. No Treatment
  misc_feature: MA Experiment ID: 20000089 Result: Down-regulated in Transcription
  misc_feature: MA Experiment ID: 20000090 Result: Down-regulated in Transcription
  misc_feature: MA Experiment ID: 20000166 Result: Up-regulated in Transcription
  misc_feature: MA Experiment 20000166 PARAMETER Experiment Name: At_100uM_ABA_P Parameter: Age (day) Value: 14
  misc_feature: MA Experiment 20000166 PARAMETER Experiment Name: At_100uM_ABA_P Parameter: Organism Value: A. thaliana
  misc_feature: MA Experiment 20000166 PARAMETER Experiment Name: At_100uM_ABA_P Parameter: Plant Line Value: WS
  misc_feature: MA Experiment 20000166 PARAMETER Experiment Name: At_100uM_ABA_P Parameter: Timepoint (hr) Value: 1
  misc_feature: MA Experiment 20000166 PARAMETER Experiment Name: At_100uM_ABA_P Parameter: Tissue Value: Aerial
  misc_feature: MA Experiment 20000166 PARAMETER Experiment Name: At_100uM_ABA_P Parameter: Treatment Value: 100uM ABA vs. No Treatment
  misc_feature: MA Experiment ID: 20000169 Result: Up-regulated in Transcription
  misc_feature: MA Experiment 20000169 PARAMETER Experiment Name: At_100uM_ABA_P Parameter: Age (day) Value: 14
  misc_feature: MA Experiment 20000169 PARAMETER Experiment Name: At_100uM_ABA_P Parameter: Organism Value: A. thaliana
  misc_feature: MA Experiment 20000169 PARAMETER Experiment Name: At_100uM_ABA_P Parameter: Plant Line Value: WS
  misc_feature: MA Experiment 20000169 PARAMETER Experiment Name: At_100uM_ABA_P Parameter: Timepoint (hr) Value: 6
  misc_feature: MA Experiment 20000169 PARAMETER Experiment Name: At_100uM_ABA_P Parameter: Tissue Value: Aerial
  misc_feature: MA Experiment 20000169 PARAMETER Experiment Name: At_100uM_ABA_P Parameter: Treatment Value: 100uM ABA vs. No Treatment
  misc_feature: MA Experiment ID: 20000180 Result: Up-regulated in Transcription
  misc_feature: MA Experiment 20000180 PARAMETER Experiment Name: At_Germinating_Seeds_P Parameter: Age (hr) Value: 24 vs. 0
  misc_feature: MA Experiment 20000180 PARAMETER Experiment Name: At_Germinating_Seeds_P Parameter: Tissue Value: Germinating Seeds
  misc_feature: MA Experiment ID: 20000182 Result: Down-regulated in Transcription
  misc_feature: MA Experiment 20000182 PARAMETER Experiment Name: At_2mM_SA_P Parameter: Age (day) Value: 14
  misc_feature: MA Experiment 20000182 PARAMETER Experiment Name: At_2mM_SA_P Parameter: Organism Value: A. thaliana
  misc_feature: MA Experiment 20000182 PARAMETER Experiment Name: At_2mM_SA_P Parameter: Plant Line Value: WS
  misc_feature: MA Experiment 20000182 PARAMETER Experiment Name: At_2mM_SA_P Parameter: Timepoint (hr) Value: 6
  misc_feature: MA Experiment 20000182 PARAMETER Experiment Name: At_2mM_SA_P Parameter: Tissue Value: Aerial
  misc_feature: MA Experiment 20000182 PARAMETER Experiment Name: At_2mM_SA_P Parameter: Treatment Value: 2mM SA vs. No Treatment
  misc_feature: MA Experiment ID: 20000213 Result: Up-regulated in Transcription
  misc_feature: MA Experiment 20000213 PARAMETER Experiment Name: At_4deg_Cold_P Parameter: Timepoint (hr) Value: 2
  misc_feature: MA Experiment ID: 20000224 Result: Up-regulated in Transcription
  misc_feature: MA Experiment ID: 20000227 Result: Down-regulated in Transcription
  misc_feature: MA Experiment 20000227 PARAMETER Experiment Name: At_Root-Tips-vs-Tops_P Parameter: Tissue Value: Root Tips vs. Root Tops
  misc_feature: MA Experiment ID: 20000573 Result: Down-regulated in Transcription
  misc_feature: MA Experiment 20000573 PARAMETER Experiment Name: At_100uM_ABA_Mutants__P Parameter: Organism Value: A. thaliana
  misc_feature: MA Experiment 20000573 PARAMETER Experiment Name: At_100uM_ABA_Mutants__P Parameter: Plant Line Value: CS22 vs. Ler wt
  misc_feature: MA Experiment 20000573 PARAMETER Experiment Name: At_100uM_ABA_Mutants__P Parameter: Timepoint (hr) Value: N/A
  misc_feature: MA Experiment 20000573 PARAMETER Experiment Name: At_100uM_ABA_Mutants__P Parameter: Tissue Value: Whole Plant
  misc_feature: MA Experiment 20000573 PARAMETER Experiment Name: At_100uM_ABA_Mutants__P Parameter: Treatment Value: None
  misc_feature: MA Experiment ID: 20000794 Result: Up-regulated in Transcription
  misc_feature: MA Experiment 20000794 PARAMETER Experiment Name: At_Petals_P Parameter: Age (day) Value: 23-25 days
  misc_feature: MA Experiment 20000794 PARAMETER Experiment Name: At_Petals_P Parameter: Plant Line Value: WS
  misc_feature: MA Experiment 20000794 PARAMETER Experiment Name: At_Petals_P Parameter: Tissue Value: Petals vs. Whole plant
  misc_feature: MA Experiment ID: 20001248 Result: Down-regulated in Transcription
  misc_feature: MA Experiment 20001248 PARAMETER Experiment Name: At_Far-red-induction_P Parameter: Age (day) Value: 7
  misc_feature: MA Experiment 20001248 PARAMETER Experiment Name: At_Far-red-induction_P Parameter: Light Value: Far-red vs. White
  misc_feature: MA Experiment 20001248 PARAMETER Experiment Name: At_Far-red-induction_P Parameter: Organism Value: A. thaliana
  misc_feature: MA Experiment 20001248 PARAMETER Experiment Name: At_Far-red-induction_P Parameter: Plant Line Value: Columbia
  misc_feature: MA Experiment 20001248 PARAMETER Experiment Name: At_Far-red-induction_P Parameter: Timepoint (hr) Value: 4
  misc_feature: MA Experiment 20001248 PARAMETER Experiment Name: At_Far-red-induction_P Parameter: Tissue Value: Whole Plant
  misc_feature: MA Experiment ID: 20001450 Result: Down-regulated in Transcription
  misc_feature: MA Experiment 20001450 PARAMETER Experiment Name: At_Far-red-induction_P Parameter: Age (day) Value: 7
  misc_feature: MA Experiment 20001450 PARAMETER Experiment Name: At_Far-red-induction_P Parameter: Light Value: Far-red vs. White
  misc_feature: MA Experiment 20001450 PARAMETER Experiment Name: At_Far-red-induction_P Parameter: Organism Value: A. thaliana
  misc_feature: MA Experiment 20001450 PARAMETER Experiment Name: At_Far-red-induction_P Parameter: Plant Line Value: Columbia
  misc_feature: MA Experiment 20001450 PARAMETER Experiment Name: At_Far-red-induction_P Parameter: Timepoint (hr) Value: 8
  misc_feature: MA Experiment 20001450 PARAMETER Experiment Name: At_Far-red-induction_P Parameter: Tissue Value: Whole Plant
  misc_feature: MA Experiment ID: 20001451 Result: Up-regulated in Transcription
  misc_feature: MA Experiment 20001451 PARAMETER Experiment Name: At_Far-red-induction_P Parameter: Age (day) Value: 7
  misc_feature: MA Experiment 20001451 PARAMETER Experiment Name: At_Far-red-induction_P Parameter: Light Value: Far-red vs. White
  misc_feature: MA Experiment 20001451 PARAMETER Experiment Name: At_Far-red-induction_P Parameter: Organism Value: A. thaliana
  misc_feature: MA Experiment 20001451 PARAMETER Experiment Name: At_Far-red-induction_P Parameter: Plant Line Value: Columbia
  misc_feature: MA Experiment 20001451 PARAMETER Experiment Name: At_Far-red-induction_P Parameter: Timepoint (hr) Value: 24
  misc_feature: MA Experiment 20001451 PARAMETER Experiment Name: At_Far-red-induction_P Parameter: Tissue Value: Whole Plant
  misc_feature: MA Experiment ID: 20001554 Result: Up-regulated in Transcription
  misc_feature: MA Experiment 20001554 PARAMETER Experiment Name: At_Drought_Soil_Dry_P Parameter: Age (day) Value: 21
  misc_feature: MA Experiment 20001554 PARAMETER Experiment Name: At_Drought_Soil_Dry_P Parameter: Organism Value: A. thaliana
  misc_feature: MA Experiment 20001554 PARAMETER Experiment Name: At_Drought_Soil_Dry_P Parameter: Plant Line Value: WS
  misc_feature: MA Experiment 20001554 PARAMETER Experiment Name: At_Drought_Soil_Dry_P Parameter: Post Timepoint (hr) Value: None
  misc_feature: MA Experiment 20001554 PARAMETER Experiment Name: At_Drought_Soil_Dry_P Parameter: Post-Treatment Value: None
  misc_feature: MA Experiment 20001554 PARAMETER Experiment Name: At_Drought_Soil_Dry_P Parameter: Timepoint (day) Value: 7
  misc_feature: MA Experiment 20001554 PARAMETER Experiment Name: At_Drought_Soil_Dry_P Parameter: Treatment Value: Drought vs. No Drought
  misc_feature: MA Experiment ID: 20001557 Result: Down-regulated in Transcription
  misc_feature: MA Experiment 20001557 PARAMETER Experiment Name: At_Drought_Soil_Dry_P Parameter: Age (day) Value: 27
  misc_feature: MA Experiment 20001557 PARAMETER Experiment Name: At_Drought_Soil_Dry_P Parameter: Organism Value: A. thaliana
  misc_feature: MA Experiment 20001557 PARAMETER Experiment Name: At_Drought_Soil_Dry_P Parameter: Plant Line Value: WS
  misc_feature: MA Experiment 20001557 PARAMETER Experiment Name: At_Drought_Soil_Dry_P Parameter: Post Timepoint (hr) Value: 3
  misc_feature: MA Experiment 20001557 PARAMETER Experiment Name: At_Drought_Soil_Dry_P Parameter: Post-Treatment Value: Re-Water vs. No Drought
  misc_feature: MA Experiment 20001557 PARAMETER Experiment Name: At_Drought_Soil_Dry_P Parameter: Timepoint (day) Value: 13
  misc_feature: MA Experiment 20001557 PARAMETER Experiment Name: At_Drought_Soil_Dry_P Parameter: Treatment Value: Drought vs. No Drought
  misc_feature: MA Experiment ID: 20001560 Result: Down-regulated in Transcription
  misc_feature: MA Experiment 20001560 PARAMETER Experiment Name: At_Drought_Soil_Dry_P Parameter: Age (day) Value: 28
  misc_feature: MA Experiment 20001560 PARAMETER Experiment Name: At_Drought_Soil_Dry_P Parameter: Organism Value: A. thaliana
  misc_feature: MA Experiment 20001560 PARAMETER Experiment Name: At_Drought_Soil_Dry_P Parameter: Plant Line Value: WS
  misc_feature: MA Experiment 20001560 PARAMETER Experiment Name: At_Drought_Soil_Dry_P Parameter: Post Timepoint (hr) Value: None
  misc_feature: MA Experiment 20001560 PARAMETER Experiment Name: At_Drought_Soil_Dry_P Parameter: Post-Treatment Value: None
  misc_feature: MA Experiment 20001560 PARAMETER Experiment Name: At_Drought_Soil_Dry_P Parameter: Timepoint (day) Value: 14
  misc_feature: MA Experiment 20001560 PARAMETER Experiment Name: At_Drought_Soil_Dry_P Parameter: Treatment Value: Drought vs. No Drought
  misc_feature: MA Experiment ID: 20001911 Result: Up-regulated in Transcription
  misc_feature: MA Experiment 20001911 PARAMETER Experiment Name: At_Drought_Reproduction_P Parameter: Age (day) Value: 40
  misc_feature: MA Experiment 20001911 PARAMETER Experiment Name: At_Drought_Reproduction_P Parameter: Organism Value: A. thaliana
  misc_feature: MA Experiment 20001911 PARAMETER Experiment Name: At_Drought_Reproduction_P Parameter: Plant Line Value: WS
  misc_feature: MA Experiment 20001911 PARAMETER Experiment Name: At_Drought_Reproduction_P Parameter: Timepoint (day) Value: 10
  misc_feature: MA Experiment 20001911 PARAMETER Experiment Name: At_Drought_Reproduction_P Parameter: Tissue Value: Flowers
  misc_feature: MA Experiment 20001911 PARAMETER Experiment Name: At_Drought_Reproduction_P Parameter: Treatment Value: Drought vs. No Drought

SEQ ID NO: 33053 - protein, 305 aa, Arabidopsis thaliana; identical to SEQ ID NO: 29463
  peptide (1)..(305): Ceres Seq. ID no. 12421959
  misc_feature (40)..(258): Pfam Name: haloacid dehalogenase-like hydrolase Pfam Description: haloacid dehalogenase-like hydrolase
  misc_feature (34)..(305): Homolog of NCBI NO: 40714684 NR Description: expressed protein [Oryza sativa (japonica
  misc_feature (26)..(301): Homolog of NCBI NO: 21618155 NR Description: putative ripening-related protein-like
  misc_feature (26)..(301): Homolog of NCBI NO: 30697236 NR Description: haloacid dehalogenase-like hydrolase family
  misc_feature (26)..(301): Homolog of NCBI NO: 30697234 NR Description: haloacid dehalogenase-like hydrolase family
  misc_feature (26)..(305): Homolog of NCBI NO: 15238429 NR Description: putative ripening-related protein - like; protein
  misc_feature (22)..(305): Homolog of NCBI NO: 8885554 NR Description: ripening-related protein-like; hydrolase-like
  misc_feature (173)..(305): Homolog of NCBI NO: 7406669 NR Description: putative ripening-related protein [Vitis vinifera]
  misc_feature (26)..(187): Homolog of NCBI NO: 7406669 NR Description: putative ripening-related protein [Vitis vinifera]
  misc_feature (26)..(305): Homolog of NCBI NO: 21593165 NR Description: unknown [Arabidopsis thaliana]
  misc_feature (26)..(305): Homolog of NCBI NO: 15241720 NR Description: putative protein

SEQ ID NO: 33054 - protein, 280 aa, Arabidopsis thaliana; identical to SEQ ID NO: 29464
  peptide (1)..(280): Ceres Seq. ID no. 12421960
  misc_feature (15)..(233): Pfam Name: haloacid dehalogenase-like hydrolase Pfam Description: haloacid dehalogenase-like hydrolase
  misc_feature (9)..(280): Homolog of NCBI NO: 40714684 NR Description: expressed protein [Oryza sativa (japonica
  misc_feature (1)..(276): Homolog of NCBI NO: 21618155 NR Description: putative ripening-related protein-like
  misc_feature (1)..(276): Homolog of NCBI NO: 30697236 NR Description: haloacid dehalogenase-like hydrolase family
  misc_feature (1)..(276): Homolog of NCBI NO: 30697234 NR Description: haloacid dehalogenase-like hydrolase family
  misc_feature (1)..(280): Homolog of NCBI NO: 15238429 NR Description: putative ripening-related protein - like; protein
  misc_feature (1)..(280): Homolog of NCBI NO: 8885554 NR Description: ripening-related protein-like; hydrolase-like
  misc_feature (148)..(280): Homolog of NCBI NO: 7406669 NR Description: putative ripening-related protein [Vitis vinifera]
  misc_feature (1)..(162): Homolog of NCBI NO: 7406669 NR Description: putative ripening-related protein [Vitis vinifera]
  misc_feature (1)..(280): Homolog of NCBI NO: 21593165 NR Description: unknown [Arabidopsis thaliana]
  misc_feature (1)..(280): Homolog of NCBI NO: 15241720 NR Description: putative protein

SEQ ID NO: 33055 - protein, 236 aa, Arabidopsis thaliana; identical to SEQ ID NO: 23607
  peptide (1)..(236): Ceres Seq. ID no. 12421961
  misc_feature (1)..(189): Pfam Name: haloacid dehalogenase-like hydrolase Pfam Description: haloacid dehalogenase-like hydrolase
  misc_feature (1)..(236): Homolog of NCBI NO: 40714684 NR Description: expressed protein [Oryza sativa (japonica
  misc_feature (1)..(232): Homolog of NCBI NO: 21618155 NR Description: putative ripening-related protein-like
  misc_feature (1)..(232): Homolog of NCBI NO: 30697236 NR Description: haloacid dehalogenase-like hydrolase family
  misc_feature (1)..(232): Homolog of NCBI NO: 30697234 NR Description: haloacid dehalogenase-like hydrolase family
  misc_feature (1)..(236): Homolog of NCBI NO: 15238429 NR Description: putative ripening-related protein - like; protein
  misc_feature (1)..(236): Homolog of NCBI NO: 8885554 NR Description: ripening-related protein-like; hydrolase-like
  misc_feature (104)..(236): Homolog of NCBI NO: 7406669 NR Description: putative ripening-related protein [Vitis vinifera]
  misc_feature (1)..(118): Homolog of NCBI NO: 7406669 NR Description: putative ripening-related protein [Vitis vinifera]
  misc_feature (1)..(236): Homolog of NCBI NO: 21593165 NR Description: unknown [Arabidopsis thaliana]
  misc_feature (1)..(236): Homolog of NCBI NO: 15241720 NR Description: putative protein

SEQ ID NO: 33056 - DNA, 1252 bp, Arabidopsis thaliana; identical to SEQ ID NO: 29466
  misc_feature (1)..(1252): Ceres Seq. ID no. 13500119
  misc_feature: MA Experiment ID: 20001756 Result: Down-regulated in Transcription
  misc_feature: MA Experiment 20001756 PARAMETER Experiment Name: At_50mM_NH4NO3_L-to-H_P Parameter: Timepoint (hr) Value: 4
  misc_feature: MA Experiment 20001756 PARAMETER Experiment Name: At_50mM_NH4NO3_L-to-H_P Parameter: Tissue Value: Leaf
  misc_feature: MA Experiment 20001756 PARAMETER Experiment Name: At_50mM_NH4NO3_L-to-H_P Parameter: Treatment Value: 50mM NH4NO3 vs 100mM Mannitol
  misc_feature: MA Experiment ID: 20001757 Result: Down-regulated in Transcription
  misc_feature: MA Experiment 20001757 PARAMETER Experiment Name: At_50mM_NH4NO3_L-to-H_P Parameter: Timepoint (hr) Value: 6
  misc_feature: MA Experiment 20001757 PARAMETER Experiment Name: At_50mM_NH4NO3_L-to-H_P Parameter: Tissue Value: Leaf
  misc_feature: MA Experiment 20001757 PARAMETER Experiment Name: At_50mM_NH4NO3_L-to-H_P Parameter: Treatment Value: 50mM NH4NO3 vs 100mM Mannitol
  misc_feature: MA Experiment ID: 20001761 Result: Down-regulated in Transcription
  misc_feature: MA Experiment 20001761 PARAMETER Experiment Name: At_50mM_NH4NO3_L-to-H_P Parameter: Timepoint (hr) Value: 4
  misc_feature: MA Experiment 20001761 PARAMETER Experiment Name: At_50mM_NH4NO3_L-to-H_P Parameter: Tissue Value: Siliques
  misc_feature: MA Experiment 20001761 PARAMETER Experiment Name: At_50mM_NH4NO3_L-to-H_P Parameter: Treatment Value: 50mM NH4NO3 vs 100mM Mannitol
  misc_feature: MA Experiment ID: 20001904 Result: Up-regulated in Transcription
  misc_feature: MA Experiment 20001904 PARAMETER Experiment Name: At_Drought_Reproduction_P Parameter: Age (day) Value: 37
  misc_feature: MA Experiment 20001904 PARAMETER Experiment Name: At_Drought_Reproduction_P Parameter: Organism Value: A. thaliana
  misc_feature: MA Experiment 20001904 PARAMETER Experiment Name: At_Drought_Reproduction_P Parameter: Plant Line Value: WS
  misc_feature: MA Experiment 20001904 PARAMETER Experiment Name: At_Drought_Reproduction_P Parameter: Timepoint (day) Value: 7
  misc_feature: MA Experiment 20001904 PARAMETER Experiment Name: At_Drought_Reproduction_P Parameter: Tissue Value: Rosettes
  misc_feature: MA Experiment 20001904 PARAMETER Experiment Name: At_Drought_Reproduction_P Parameter: Treatment Value: Drought vs. No Drought
  misc_feature: MA Experiment ID: 20001905 Result: Up-regulated in Transcription
  misc_feature: MA Experiment 20001905 PARAMETER Experiment Name: At_Drought_Reproduction_P Parameter: Age (day) Value: 40
  misc_feature: MA Experiment 20001905 PARAMETER Experiment Name: At_Drought_Reproduction_P Parameter: Organism Value: A. thaliana
  misc_feature: MA Experiment 20001905 PARAMETER Experiment Name: At_Drought_Reproduction_P Parameter: Plant Line Value: WS
  misc_feature: MA Experiment 20001905 PARAMETER Experiment Name: At_Drought_Reproduction_P Parameter: Timepoint (day) Value: 10
  misc_feature: MA Experiment 20001905 PARAMETER Experiment Name: At_Drought_Reproduction_P Parameter: Tissue Value: Rosettes
  misc_feature: MA Experiment 20001905 PARAMETER Experiment Name: At_Drought_Reproduction_P Parameter: Treatment Value: Drought vs. No Drought
  misc_feature: MA Experiment ID: 20001906 Result: Up-regulated in Transcription
  misc_feature: MA Experiment 20001906 PARAMETER Experiment Name: At_Drought_Reproduction_P Parameter: Age (day) Value: 35
  misc_feature: MA Experiment 20001906 PARAMETER Experiment Name: At_Drought_Reproduction_P Parameter: Organism Value: A. thaliana
  misc_feature: MA Experiment 20001906 PARAMETER Experiment Name: At_Drought_Reproduction_P Parameter: Plant Line Value: WS
  misc_feature: MA Experiment 20001906 PARAMETER Experiment Name: At_Drought_Reproduction_P Parameter: Timepoint (day) Value: 5
  misc_feature: MA Experiment 20001906 PARAMETER Experiment Name: At_Drought_Reproduction_P Parameter: Tissue Value: Siliques
  misc_feature: MA Experiment 20001906 PARAMETER Experiment Name: At_Drought_Reproduction_P Parameter: Treatment Value: Drought vs. No Drought
  misc_feature: MA Experiment ID: 20001908 Result: Up-regulated in Transcription
  misc_feature: MA Experiment 20001908 PARAMETER Experiment Name: At_Drought_Reproduction_P Parameter: Age (day) Value: 40
  misc_feature: MA Experiment 20001908 PARAMETER Experiment Name: At_Drought_Reproduction_P Parameter: Organism Value: A. thaliana
  misc_feature: MA Experiment 20001908 PARAMETER Experiment Name: At_Drought_Reproduction_P Parameter: Plant Line Value: WS
  misc_feature: MA Experiment 20001908 PARAMETER Experiment Name: At_Drought_Reproduction_P Parameter: Timepoint (day) Value: 10
  misc_feature: MA Experiment 20001908 PARAMETER Experiment Name: At_Drought_Reproduction_P Parameter: Tissue Value: Siliques
  misc_feature: MA Experiment 20001908 PARAMETER Experiment Name: At_Drought_Reproduction_P Parameter: Treatment Value: Drought vs. No Drought
  misc_feature: MA Experiment ID: 20001911 Result: Down-regulated in Transcription
  misc_feature: MA Experiment 20001911 PARAMETER Experiment Name: At_Drought_Reproduction_P Parameter: Age (day) Value: 40
  misc_feature: MA Experiment 20001911 PARAMETER Experiment Name: At_Drought_Reproduction_P Parameter: Organism Value: A. thaliana
  misc_feature: MA Experiment 20001911 PARAMETER Experiment Name: At_Drought_Reproduction_P Parameter: Plant Line Value: WS
  misc_feature: MA Experiment 20001911 PARAMETER Experiment Name: At_Drought_Reproduction_P Parameter: Timepoint (day) Value: 10
  misc_feature: MA Experiment 20001911 PARAMETER Experiment Name: At_Drought_Reproduction_P Parameter: Tissue Value: Flowers
  misc_feature: MA Experiment 20001911 PARAMETER Experiment Name: At_Drought_Reproduction_P Parameter: Treatment Value: Drought vs. No Drought

SEQ ID NO: 33057 - protein, 367 aa, Arabidopsis thaliana; identical to SEQ ID NO: 29467
  peptide (1)..(367): Ceres Seq. ID no. 13500120
  misc_feature (155)..(261): Pfam Name: Matrixin Pfam Description: Matrixin
  misc_feature (49)..(367): Homolog of NCBI NO: 30688744 NR Description: metallo proteinase -related [Arabidopsis thaliana]
  misc_feature (49)..(367): Homolog of NCBI NO: 7488435 NR Description: zinc metalloproteinase homolog F3I6.6 -
  misc_feature (14)..(367): Homolog of NCBI NO: 15218963 NR Description: metallo proteinase -related [Arabidopsis
  misc_feature (40)..(325): Homolog of NCBI NO: 15223067 NR Description: matrix metallo proteinase -related [Arabidopsis
  misc_feature (73)..(367): Homolog of NCBI NO: 25455788 NR Description: metalloproteinase (EC 3.4.24.-) [imported] -
  misc_feature (73)..(367): Homolog of NCBI NO: 15225398 NR Description: metallo proteinase -related [Arabidopsis
  misc_feature (47)..(352): Homolog of NCBI NO: 37536782 NR Description: putative metalloproteinase
  misc_feature (4)..(367): Homolog of NCBI NO: 21553383 NR Description: proteinase like protein [Arabidopsis thaliana]
  misc_feature (4)..(367): Homolog of NCBI NO: 15235820 NR Description: proteinase like protein [Arabidopsis thaliana]
  misc_feature (4)..(367): Homolog of NCBI NO: 28393482 NR Description: putative proteinase [Arabidopsis thaliana]

SEQ ID NO: 33058 - protein, 364 aa, Arabidopsis thaliana; identical to SEQ ID NO: 29468
  peptide (1)..(364): Ceres Seq. ID no. 13500121
  misc_feature (152)..(258): Pfam Name: Matrixin Pfam Description: Matrixin
  misc_feature (46)..(364): Homolog of NCBI NO: 30688744 NR Description: metallo proteinase -related [Arabidopsis thaliana]
  misc_feature (46)..(364): Homolog of NCBI NO: 7488435 NR Description: zinc metalloproteinase homolog F3I6.6 -
  misc_feature (11)..(364): Homolog of NCBI NO: 15218963 NR Description: metallo proteinase -related [Arabidopsis
  misc_feature (37)..(322): Homolog of NCBI NO: 15223067 NR Description: matrix metallo proteinase -related [Arabidopsis
  misc_feature (70)..(364): Homolog of NCBI NO: 25455788 NR Description: metalloproteinase (EC 3.4.24.-) [imported] -
  misc_feature (70)..(364): Homolog of NCBI NO: 15225398 NR Description: metallo proteinase -related [Arabidopsis
  misc_feature (44)..(349): Homolog of NCBI NO: 37536782 NR Description: putative metalloproteinase
  misc_feature (1)..(364): Homolog of NCBI NO: 21553383 NR Description: proteinase like protein [Arabidopsis thaliana]
  misc_feature (1)..(364): Homolog of NCBI NO: 15235820 NR Description: proteinase like protein [Arabidopsis thaliana]
  misc_feature (1)..(364): Homolog of NCBI NO: 28393482 NR Description: putative proteinase [Arabidopsis thaliana]

SEQ ID NO: 33059 - protein, 240 aa, Arabidopsis thaliana; identical to SEQ ID NO: 29469
  peptide (1)..(240): Ceres Seq. ID no. 13500122
  misc_feature (28)..(134): Pfam Name: Matrixin Pfam Description: Matrixin
  misc_feature (1)..(240): Homolog of NCBI NO: 30688744 NR Description: metallo proteinase -related [Arabidopsis thaliana]
  misc_feature (1)..(240): Homolog of NCBI NO: 7488435 NR Description: zinc metalloproteinase homolog F3I6.6 -
  misc_feature (1)..(240): Homolog of NCBI NO: 15218963 NR Description: metallo proteinase -related [Arabidopsis
  misc_feature (1)..(198): Homolog of NCBI NO: 15223067 NR Description: matrix metallo proteinase -related [Arabidopsis
  misc_feature (1)..(240): Homolog of NCBI NO: 25455788 NR Description: metalloproteinase (EC 3.4.24.-) [imported] -
  misc_feature (1)..(240): Homolog of NCBI NO: 15225398 NR Description: metallo proteinase -related [Arabidopsis
  misc_feature (1)..(225): Homolog of NCBI NO: 37536782 NR Description: putative metalloproteinase
  misc_feature (1)..(240): Homolog of NCBI NO: 21553383 NR Description: proteinase like protein [Arabidopsis thaliana]
  misc_feature (1)..(240): Homolog of NCBI NO: 15235820 NR Description: proteinase like protein [Arabidopsis thaliana]
  misc_feature (1)..(240): Homolog of NCBI NO: 28393482 NR Description: putative proteinase [Arabidopsis thaliana]

SEQ ID NO: 33060 - DNA, 990 bp, Arabidopsis thaliana; identical to SEQ ID NO: 29470
  misc_feature (1)..(990): Ceres Seq. ID no. 12420633
  misc_feature: MA Experiment ID: 20000111 Result: Down-regulated in Transcription
  misc_feature: MA Experiment 20000111 PARAMETER Experiment Name: At_42deg_Heat_cDNA_P Parameter: Temperature (deg C) Value: 42 vs. 22
  misc_feature: MA Experiment 20000111 PARAMETER Experiment Name: At_42deg_Heat_cDNA_P Parameter: Timepoint (hr) Value: 6
  misc_feature: MA Experiment 20000111 PARAMETER Experiment Name: At_42deg_Heat_cDNA_P Parameter: Tissue Value: Aerial
  misc_feature: MA Experiment ID: 20000112 Result: Down-regulated in Transcription
  misc_feature: MA Experiment 20000112 PARAMETER Experiment Name: At_42deg_Heat_cDNA_P Parameter: Temperature (deg C) Value: 42 vs. 22
  misc_feature: MA Experiment 20000112 PARAMETER Experiment Name: At_42deg_Heat_cDNA_P Parameter: Timepoint (hr) Value: 2
  misc_feature: MA Experiment 20000112 PARAMETER Experiment Name: At_42deg_Heat_cDNA_P Parameter: Tissue Value: Aerial
  misc_feature: MA Experiment ID: 20000113 Result: Down-regulated in Transcription
  misc_feature: MA Experiment 20000113 PARAMETER Experiment Name: At_42deg_Heat_cDNA_P Parameter: Temperature (deg C) Value: 42 vs. 22
  misc_feature: MA Experiment 20000113 PARAMETER Experiment Name: At_42deg_Heat_cDNA_P Parameter: Timepoint (hr) Value: 8
  misc_feature: MA Experiment 20000113 PARAMETER Experiment Name: At_42deg_Heat_cDNA_P Parameter: Tissue Value: Aerial
  misc_feature: MA Experiment ID: 20000173 Result: Down-regulated in Transcription
  misc_feature: MA Experiment 20000173 PARAMETER Experiment Name: At_42deg_Heat_P Parameter: Age (day) Value: 14
  misc_feature: MA Experiment 20000173 PARAMETER Experiment Name: At_42deg_Heat_P Parameter: Organism Value: A. thaliana
  misc_feature: MA Experiment 20000173 PARAMETER Experiment Name: At_42deg_Heat_P Parameter: Plant Line Value: WS
  misc_feature: MA Experiment 20000173 PARAMETER Experiment Name: At_42deg_Heat_P Parameter: Temperature (deg C) Value: 42 vs. 22
  misc_feature: MA Experiment 20000173 PARAMETER Experiment Name: At_42deg_Heat_P Parameter: Timepoint (hr) Value: 6
  misc_feature: MA Experiment 20000173 PARAMETER Experiment Name: At_42deg_Heat_P Parameter: Tissue Value: Aerial
  misc_feature: MA Experiment ID: 20000224 Result: Down-regulated in Transcription

SEQ ID NO: 33061 - protein, 253 aa, Arabidopsis thaliana; identical to SEQ ID NO: 29471
  peptide (1)..(253): Ceres Seq. ID no. 12420634
  misc_feature (25)..(253): Pfam Name: HAD superfamily, subfamily IIIB (Acid phosphatase) Pfam Description: HAD superfamily, subfamily IIIB (Acid
  misc_feature (15)..(253): Homolog of NCBI NO: 15224907 NR Description: putative acid phosphatase; protein id:
  misc_feature (41)..(252): Homolog of NCBI NO: 445113 NR Description: acid phosphatase 1
  misc_feature (41)..(252): Homolog of NCBI NO: 130718 NR Description: Acid phosphatase precursor 1
  misc_feature (4)..(253): Homolog of NCBI NO: 15241412 NR Description: acid phosphatase; protein id: At5g51260.1
  misc_feature (40)..(253): Homolog of NCBI NO: 15234949 NR Description: acid phosphatase - like protein
  misc_feature (1)..(252): Homolog of NCBI NO: 15233526 NR Description: acid phosphatase-like protein
  misc_feature (1)..(253): Homolog of NCBI NO: 15233504 NR Description: acid phosphatase-like protein

SEQ ID NO: 33062 - DNA, 694 bp, Arabidopsis thaliana; identical to SEQ ID NO: 29472
  misc_feature (1)..(694): Ceres Seq. ID no. 13592873
  misc_feature: MA Experiment ID: 108462 Result: Down-regulated in Transcription
  misc_feature: MA Experiment 108462 PARAMETER Experiment Name: At_Germinating_Seeds_cDNA_P Parameter: Age (day) Value: 2 vs. 0
  misc_feature: MA Experiment 108462 PARAMETER Experiment Name: At_Germinating_Seeds_cDNA_P Parameter: Tissue Value: Germinating Seeds
  misc_feature: MA Experiment ID: 108463 Result: Down-regulated in Transcription
  misc_feature: MA Experiment 108463 PARAMETER Experiment Name: At_Germinating_Seeds_cDNA_P Parameter: Age (day) Value: 3 vs. 0
  misc_feature: MA Experiment 108463 PARAMETER Experiment Name: At_Germinating_Seeds_cDNA_P Parameter: Tissue Value: Germinating Seeds
  misc_feature: MA Experiment ID: 108464 Result: Down-regulated in Transcription
  misc_feature: MA Experiment 108464 PARAMETER Experiment Name: At_Germinating_Seeds_cDNA_P Parameter: Age (day) Value: 4 vs. 0
  misc_feature: MA Experiment 108464 PARAMETER Experiment Name: At_Germinating_Seeds_cDNA_P Parameter: Tissue Value: Germinating Seeds
  misc_feature: MA Experiment ID: 108605 Result: Down-regulated in Transcription
  misc_feature: MA Experiment 108605 PARAMETER Experiment Name: At_100uM_ABA_cDNA_P Parameter: Timepoint (hr) Value: 6
  misc_feature: MA Experiment 108605 PARAMETER Experiment Name: At_100uM_ABA_cDNA_P Parameter: Tissue Value: Aerial
  misc_feature: MA Experiment 108605 PARAMETER Experiment Name: At_100uM_ABA_cDNA_P Parameter: Treatment Value: 100uM ABA vs. No Treatment
  misc_feature: MA Experiment ID: 108607 Result: Down-regulated in Transcription
  misc_feature: MA Experiment 108607 PARAMETER Experiment Name: At_100uM_ABA_cDNA_P Parameter: Timepoint (hr) Value: 4
  misc_feature: MA Experiment 108607 PARAMETER Experiment Name: At_100uM_ABA_cDNA_P Parameter: Tissue Value: Aerial
  misc_feature: MA Experiment 108607 PARAMETER Experiment Name: At_100uM_ABA_cDNA_P Parameter: Treatment Value: 100uM ABA vs. No Treatment
  misc_feature: MA Experiment ID: 108609 Result: Down-regulated in Transcription
  misc_feature: MA Experiment 108609 PARAMETER Experiment Name: At_100uM_ABA_cDNA_P Parameter: Timepoint (hr) Value: 24
  misc_feature: MA Experiment 108609 PARAMETER Experiment Name: At_100uM_ABA_cDNA_P Parameter: Tissue Value: Aerial
  misc_feature: MA Experiment 108609 PARAMETER Experiment Name: At_100uM_ABA_cDNA_P Parameter: Treatment Value: 100uM ABA vs. No Treatment
  misc_feature: MA Experiment ID: 20000069 Result: Up-regulated in Transcription
  misc_feature: MA Experiment 20000069 PARAMETER Experiment Name: At_100uM_ABA_Mutants_cDNA_P Parameter: Plant Line Value: CS23
  misc_feature: MA Experiment 20000069 PARAMETER Experiment Name: At_100uM_ABA_Mutants_cDNA_P Parameter: Timepoint (hr) Value: 6
  misc_feature: MA Experiment 20000069 PARAMETER Experiment Name: At_100uM_ABA_Mutants_cDNA_P Parameter: Tissue Value: Aerial
  misc_feature: MA Experiment 20000069 PARAMETER Experiment Name: At_100uM_ABA_Mutants_cDNA_P Parameter: Treatment Value: 100uM ABA vs. No Treatment
  misc_feature: MA Experiment ID: 20000070 Result: Up-regulated in Transcription
  misc_feature: MA Experiment 20000070 PARAMETER Experiment Name: At_100uM_ABA_Mutants_cDNA_P Parameter: Plant Line Value: CS24
  misc_feature: MA Experiment 20000070 PARAMETER Experiment Name: At_100uM_ABA_Mutants_cDNA_P Parameter: Timepoint (hr) Value: 6
  misc_feature: MA Experiment 20000070 PARAMETER Experiment Name: At_100uM_ABA_Mutants_cDNA_P Parameter: Tissue Value: Aerial
  misc_feature: MA Experiment 20000070 PARAMETER Experiment Name: At_100uM_ABA_Mutants_cDNA_P Parameter: Treatment Value: 100uM ABA vs. No Treatment
  misc_feature: MA Experiment ID: 20000072 Result: Up-regulated in Transcription
  misc_feature: MA Experiment 20000072 PARAMETER Experiment Name: At_100uM_ABA_Mutants_cDNA_P Parameter: Plant Line Value: CS8105
  misc_feature: MA Experiment 20000072 PARAMETER Experiment Name: At_100uM_ABA_Mutants_cDNA_P Parameter: Timepoint (hr) Value: 6
  misc_feature: MA Experiment 20000072 PARAMETER Experiment Name: At_100uM_ABA_Mutants_cDNA_P Parameter: Tissue Value: Aerial
  misc_feature: MA Experiment 20000072 PARAMETER Experiment Name: At_100uM_ABA_Mutants_cDNA_P Parameter: Treatment Value: 100uM ABA vs. No Treatment
  misc_feature: MA Experiment ID: 20000086 Result: Up-regulated in Transcription
  misc_feature: MA Experiment 20000086 PARAMETER Experiment Name: At_100uM_ABA_Mutants_cDNA_P Parameter: Plant Line Value: CS22
  misc_feature: MA Experiment 20000086 PARAMETER Experiment Name: At_100uM_ABA_Mutants_cDNA_P Parameter: Timepoint (hr) Value: 6
  misc_feature: MA Experiment 20000086 PARAMETER Experiment Name: At_100uM_ABA_Mutants_cDNA_P Parameter: Tissue Value: Aerial
  misc_feature: MA Experiment 20000086 PARAMETER Experiment Name: At_100uM_ABA_Mutants_cDNA_P Parameter: Treatment Value: 100uM ABA vs. No Treatment
  misc_feature: MA Experiment ID: 20000087 Result: Up-regulated in Transcription
  misc_feature: MA Experiment 20000087 PARAMETER Experiment Name: At_100uM_ABA_Mutants_cDNA_P Parameter: Plant Line Value: WS
  misc_feature: MA Experiment 20000087 PARAMETER Experiment Name: At_100uM_ABA_Mutants_cDNA_P Parameter: Timepoint (hr) Value: 6
  misc_feature: MA Experiment 20000087 PARAMETER Experiment Name: At_100uM_ABA_Mutants_cDNA_P Parameter: Tissue Value: Aerial
  misc_feature: MA Experiment 20000087 PARAMETER Experiment Name: At_100uM_ABA_Mutants_cDNA_P Parameter: Treatment Value: 100uM ABA vs. No Treatment
  misc_feature: MA Experiment ID: 20000088 Result: Up-regulated in Transcription
  misc_feature: MA Experiment 20000088 PARAMETER Experiment Name: At_100uM_ABA_Mutants_cDNA_P Parameter: Plant Line Value: Landsberg
  misc_feature: MA Experiment 20000088 PARAMETER Experiment Name: At_100uM_ABA_Mutants_cDNA_P Parameter: Timepoint (hr) Value: 6
  misc_feature: MA Experiment 20000088 PARAMETER Experiment Name: At_100uM_ABA_Mutants_cDNA_P Parameter: Tissue Value: Aerial
  misc_feature: MA Experiment 20000088 PARAMETER Experiment Name: At_100uM_ABA_Mutants_cDNA_P Parameter: Treatment Value: 100uM ABA vs. No Treatment
  misc_feature: MA Experiment ID: 20000089 Result: Up-regulated in Transcription
  misc_feature: MA Experiment ID: 20000090 Result: Up-regulated in Transcription
  misc_feature: MA Experiment ID: 20000111 Result: Down-regulated in Transcription
  misc_feature: MA Experiment 20000111 PARAMETER Experiment Name: At_42deg_Heat_cDNA_P Parameter: Temperature (deg C) Value: 42 vs. 22
  misc_feature: MA Experiment 20000111 PARAMETER Experiment Name: At_42deg_Heat_cDNA_P Parameter: Timepoint (hr) Value: 6
  misc_feature: MA Experiment 20000111 PARAMETER Experiment Name: At_42deg_Heat_cDNA_P Parameter: Tissue Value: Aerial
  misc_feature: MA Experiment ID: 20000112 Result: Down-regulated in Transcription
  misc_feature: MA Experiment 20000112 PARAMETER Experiment Name: At_42deg_Heat_cDNA_P Parameter: Temperature (deg C) Value: 42 vs. 22
  misc_feature: MA Experiment 20000112 PARAMETER Experiment Name: At_42deg_Heat_cDNA_P Parameter: Timepoint (hr) Value: 2
  misc_feature: MA Experiment 20000112 PARAMETER Experiment Name: At_42deg_Heat_cDNA_P Parameter: Tissue Value: Aerial
  misc_feature: MA Experiment ID: 20000117 Result: Up-regulated in Transcription
  misc_feature: MA Experiment 20000117 PARAMETER Experiment Name: At_100uM_ABA_Mutants_cDNA_P Parameter: Plant Line Value: Columbia
  misc_feature: MA Experiment 20000117 PARAMETER Experiment Name: At_100uM_ABA_Mutants_cDNA_P Parameter: Timepoint (hr) Value: 6
  misc_feature: MA Experiment 20000117 PARAMETER Experiment Name: At_100uM_ABA_Mutants_cDNA_P Parameter: Tissue Value: Aerial
  misc_feature: MA Experiment 20000117 PARAMETER Experiment Name: At_100uM_ABA_Mutants_cDNA_P Parameter: Treatment Value: 100uM ABA vs. No Treatment
  misc_feature: MA Experiment ID: 20000314 Result: Down-regulated in Transcription
  misc_feature: MA Experiment 20000314 PARAMETER Experiment Name: At_14day_Shoots-Roots_Sub_P Parameter: Age (day) Value: 14
  misc_feature: MA Experiment 20000314 PARAMETER Experiment Name: At_14day_Shoots-Roots_Sub_P Parameter: Organism Value: A. thaliana
  misc_feature: MA Experiment 20000314 PARAMETER Experiment Name: At_14day_Shoots-Roots_Sub_P Parameter: Plant Line Value: WS
  misc_feature: MA Experiment 20000314 PARAMETER Experiment Name: At_14day_Shoots-Roots_Sub_P Parameter: Tissue Value: Roots vs. Whole Plant
  misc_feature: MA Experiment ID: 20000315 Result: Down-regulated in Transcription
  misc_feature: MA Experiment 20000315 PARAMETER Experiment Name: At_14day_Shoots-Roots_Sub_P Parameter: Age (day) Value: 14
  misc_feature: MA Experiment 20000315 PARAMETER Experiment Name: At_14day_Shoots-Roots_Sub_P Parameter: Organism Value: A. thaliana
  misc_feature: MA Experiment 20000315 PARAMETER Experiment Name: At_14day_Shoots-Roots_Sub_P Parameter: Plant Line Value: WS
  misc_feature: MA Experiment 20000315 PARAMETER Experiment Name: At_14day_Shoots-Roots_Sub_P Parameter: Tissue Value: Shoots vs. Whole Plant
  misc_feature: MA Experiment ID: 20000328 Result: Down-regulated in Transcription
  misc_feature: MA Experiment 20000328 PARAMETER Experiment Name: At_42deg_Heat_Sub_P Parameter: Age (day) Value: 14
  misc_feature: MA Experiment 20000328 PARAMETER Experiment Name: At_42deg_Heat_Sub_P Parameter: Organism Value: A. thaliana
  misc_feature: MA Experiment 20000328 PARAMETER Experiment Name: At_42deg_Heat_Sub_P Parameter: Plant Line Value: WS
  misc_feature: MA Experiment 20000328 PARAMETER Experiment Name: At_42deg_Heat_Sub_P Parameter: Temperature (deg C) Value: 42 vs. 22
  misc_feature: MA Experiment 20000328 PARAMETER Experiment Name: At_42deg_Heat_Sub_P Parameter: Timepoint (hr) Value: 6
  misc_feature: MA Experiment 20000328 PARAMETER Experiment Name: At_42deg_Heat_Sub_P Parameter: Tissue Value: Aerial

SEQ ID NO: 33063 - protein, 169 aa, Arabidopsis thaliana; identical to SEQ ID NO: 22059
  peptide (1)..(169): Ceres Seq. ID no. 13592874
  misc_feature (8)..(79): Pfam Name: RNA recognition motif. (a.k.a. RRM, RBD, or RNP domain) Pfam Description: RNA recognition motif. (a.k.a. RRM, RBD, or RNP
  misc_feature (3)..(169): Homolog of NCBI NO: 30681492 NR Description: glycine-rich RNA-binding protein (AtGRP7)
  misc_feature (2)..(168): Homolog of NCBI NO: 34851124 NR Description: putative glycine-rich RNA-binding protein [Prunus
  misc_feature (1)..(161): Homolog of NCBI NO: 544426 NR Description: Glycine-rich RNA-binding protein
  misc_feature (1)..(124): Homolog of NCBI NO: 30692254 NR Description: glycine-rich RNA-binding protein 8 (GRP8) (CCR1)
  misc_feature (3)..(169): Homolog of NCBI NO: 1346180 NR Description: Glycine-rich RNA-binding protein GRP1A
  misc_feature (3)..(169): Homolog of NCBI NO: 21553354 NR Description: glycine-rich RNA binding protein 7 [Arabidopsis
  misc_feature (3)..(169): Homolog of NCBI NO: 1346181 NR Description: Glycine-rich RNA-binding protein GRP2A
  misc_feature (1)..(169): Homolog of NCBI NO: 544416 NR Description: Glycine-rich RNA-binding protein 10
  misc_feature (3)..(169): Homolog of NCBI NO: 15226605 NR Description: glycine-rich RNA-binding protein (AtGRP7)
  misc_feature (1)..(169): Homolog of NCBI NO: 15235002 NR Description: glycine-rich RNA-binding protein 8 (GRP8) (CCR1)

SEQ ID NO: 33064 - protein, 110 aa, Arabidopsis thaliana; identical to SEQ ID NO: 22060
  peptide (1)..(110): Ceres Seq. ID no. 13592875
  misc_feature (30)..(109): Pfam Name: Herpesvirus large structural phosphoprotein UL32 Pfam Description: Herpesvirus large structural phosphoprotein UL32
  misc_feature (1)..(110): Homolog of NCBI NO: 30681492 NR Description: glycine-rich RNA-binding protein (AtGRP7)
  misc_feature (1)..(109): Homolog of NCBI NO: 34851124 NR Description: putative glycine-rich RNA-binding protein [Prunus
  misc_feature (1)..(102): Homolog of NCBI NO: 544426 NR Description: Glycine-rich RNA-binding protein
  misc_feature (1)..(65): Homolog of NCBI NO: 30692254 NR Description: glycine-rich RNA-binding protein 8 (GRP8) (CCR1)
  misc_feature (1)..(110): Homolog of NCBI NO: 1346180 NR Description: Glycine-rich RNA-binding protein GRP1A
  misc_feature (1)..(110): Homolog of NCBI NO: 21553354 NR Description: glycine-rich RNA binding protein 7 [Arabidopsis
  misc_feature (1)..(110): Homolog of NCBI NO: 1346181 NR Description: Glycine-rich RNA-binding protein GRP2A
  misc_feature (1)..(110): Homolog of NCBI NO: 544416 NR Description: Glycine-rich RNA-binding protein 10
  misc_feature (1)..(110): Homolog of NCBI NO: 15226605 NR Description: glycine-rich RNA-binding protein (AtGRP7)
  misc_feature (1)..(110): Homolog of NCBI NO: 15235002 NR Description: glycine-rich RNA-binding protein 8 (GRP8) (CCR1)

SEQ ID NO: 33065 - protein, 103 aa, Arabidopsis thaliana; identical to SEQ ID NO: 22061
  peptide (1)..(103): Ceres Seq. ID no. 13592876
  misc_feature (23)..(102): Pfam Name: Herpesvirus large structural phosphoprotein UL32 Pfam Description: Herpesvirus large structural phosphoprotein UL32
  misc_feature (1)..(103): Homolog of NCBI NO: 30681492 NR Description: glycine-rich RNA-binding protein (AtGRP7)
  misc_feature (1)..(102): Homolog of NCBI NO: 34851124 NR Description: putative glycine-rich RNA-binding protein [Prunus
  misc_feature (1)..(95): Homolog of NCBI NO: 544426 NR Description: Glycine-rich RNA-binding protein
  misc_feature (1)..(58): Homolog of NCBI NO: 30692254 NR Description: glycine-rich RNA-binding protein 8 (GRP8) (CCR1)
  misc_feature (1)..(103): Homolog of NCBI NO: 1346180 NR Description: Glycine-rich RNA-binding protein GRP1A
  misc_feature (1)..(103): Homolog of NCBI NO: 21553354 NR Description: glycine-rich RNA binding protein 7 [Arabidopsis
  misc_feature (1)..(103): Homolog of NCBI NO: 1346181 NR Description: Glycine-rich RNA-binding protein GRP2A
  misc_feature (1)..(103): Homolog of NCBI NO: 544416 NR Description: Glycine-rich RNA-binding protein 10
  misc_feature (1)..(103): Homolog of NCBI NO: 15226605 NR Description: glycine-rich RNA-binding protein (AtGRP7)
  misc_feature (1)..(103): Homolog of NCBI NO: 15235002 NR Description: glycine-rich RNA-binding protein 8 (GRP8) (CCR1)

SEQ ID NO: 33066 - DNA, 935 bp, Arabidopsis thaliana; identical to SEQ ID NO: 29476
  misc_feature (1)..(935): Ceres Seq. ID no. 13495661
  misc_feature: MA Experiment ID: 108434 Result: Down-regulated in Transcription
  misc_feature: MA Experiment 108434 PARAMETER Experiment Name: At_Root_Tips_cDNA_P Parameter: Tissue Value: Root Tips
  misc_feature: MA Experiment ID: 108464 Result: Up-regulated in Transcription
  misc_feature: MA Experiment 108464 PARAMETER Experiment Name: At_Germinating_Seeds_cDNA_P Parameter: Age (day) Value: 4 vs. 0
  misc_feature: MA Experiment 108464 PARAMETER Experiment Name: At_Germinating_Seeds_cDNA_P Parameter: Tissue Value: Germinating Seeds
  misc_feature: MA Experiment ID: 108488 Result: Down-regulated in Transcription
  misc_feature: MA Experiment ID: 108573 Result: Up-regulated in Transcription
  misc_feature: MA Experiment 108573 PARAMETER Experiment Name: At_Drought_cDNA_P Parameter: Timepoint (hr) Value: 6
  misc_feature: MA Experiment 108573 PARAMETER Experiment Name: At_Drought_cDNA_P Parameter: Tissue Value: Aerial
  misc_feature: MA Experiment 108573 PARAMETER Experiment Name: At_Drought_cDNA_P Parameter: Treatment Value: Drought vs. No Drought
  misc_feature: MA Experiment ID: 108576 Result: Up-regulated in Transcription
  misc_feature: MA Experiment 108576 PARAMETER Experiment Name: At_42deg_Heat_cDNA_P Parameter: Temperature (deg C) Value: 42 vs. 22
  misc_feature: MA Experiment 108576 PARAMETER Experiment Name: At_42deg_Heat_cDNA_P Parameter: Timepoint (hr) Value: 1
  misc_feature: MA Experiment 108576 PARAMETER Experiment Name: At_42deg_Heat_cDNA_P Parameter: Tissue Value: Aerial
  misc_feature: MA Experiment ID: 20000093 Result: Up-regulated in Transcription
  misc_feature: MA Experiment 20000093 PARAMETER Experiment Name: At_42deg_Heat_cDNA_P Parameter: Temperature (deg C) Value: 42 vs. 22
  misc_feature: MA Experiment 20000093 PARAMETER Experiment Name: At_42deg_Heat_cDNA_P Parameter: Timepoint (hr) Value: 0.5
  misc_feature: MA Experiment 20000093 PARAMETER Experiment Name: At_42deg_Heat_cDNA_P Parameter: Tissue Value: Aerial
  misc_feature: MA Experiment ID: 20000111 Result: Up-regulated in Transcription
  misc_feature: MA Experiment 20000111 PARAMETER Experiment Name: At_42deg_Heat_cDNA_P Parameter: Temperature (deg C) Value: 42 vs. 22
  misc_feature: MA Experiment 20000111 PARAMETER Experiment Name: At_42deg_Heat_cDNA_P Parameter: Timepoint (hr) Value: 6
  misc_feature: MA Experiment 20000111 PARAMETER Experiment Name: At_42deg_Heat_cDNA_P Parameter: Tissue Value: Aerial
  misc_feature: MA Experiment ID: 20000112 Result: Up-regulated in Transcription
  misc_feature: MA Experiment 20000112 PARAMETER Experiment Name: At_42deg_Heat_cDNA_P Parameter: Temperature (deg C) Value: 42 vs. 22
  misc_feature: MA Experiment 20000112 PARAMETER Experiment Name: At_42deg_Heat_cDNA_P Parameter: Timepoint (hr) Value: 2
  misc_feature: MA Experiment 20000112 PARAMETER Experiment Name: At_42deg_Heat_cDNA_P Parameter: Tissue Value: Aerial
  misc_feature: MA Experiment ID: 20000113 Result: Up-regulated in Transcription
  misc_feature: MA Experiment 20000113 PARAMETER Experiment Name: At_42deg_Heat_cDNA_P Parameter: Temperature (deg C) Value: 42 vs. 22
  misc_feature: MA Experiment 20000113 PARAMETER Experiment Name: At_42deg_Heat_cDNA_P Parameter: Timepoint (hr) Value: 8
  misc_feature: MA Experiment 20000113 PARAMETER Experiment Name: At_42deg_Heat_cDNA_P Parameter: Tissue Value: Aerial
  misc_feature: MA Experiment ID: 20000144 Result: Up-regulated in Transcription
  misc_feature: MA Experiment 20000144 PARAMETER Experiment Name: At_42deg_Heat_cDNA_P Parameter: Temperature (deg C) Value: 42 vs. 22
  misc_feature: MA Experiment 20000144 PARAMETER Experiment Name: At_42deg_Heat_cDNA_P Parameter: Timepoint (hr) Value: 1
  misc_feature: MA Experiment 20000144 PARAMETER Experiment Name: At_42deg_Heat_cDNA_P Parameter: Tissue Value: Aerial
  misc_feature: MA Experiment ID: 20000171 Result: Up-regulated in Transcription
  misc_feature: MA Experiment 20000171 PARAMETER Experiment Name: At_42deg_Heat_P Parameter: Age (day) Value: 14
  misc_feature: MA Experiment 20000171 PARAMETER Experiment Name: At_42deg_Heat_P Parameter: Organism Value: A. thaliana
  misc_feature: MA Experiment 20000171 PARAMETER Experiment Name: At_42deg_Heat_P Parameter: Plant Line Value: WS
  misc_feature: MA Experiment 20000171 PARAMETER Experiment Name: At_42deg_Heat_P Parameter: Temperature (deg C) Value: 42 vs. 22
  misc_feature: MA Experiment 20000171 PARAMETER Experiment Name: At_42deg_Heat_P Parameter: Timepoint (hr) Value: 1
  misc_feature: MA Experiment 20000171 PARAMETER Experiment Name: At_42deg_Heat_P Parameter: Tissue Value: Aerial
  misc_feature: MA Experiment ID: 20000182 Result: Up-regulated in Transcription
  misc_feature: MA Experiment 20000182 PARAMETER Experiment Name: At_2mM_SA_P Parameter: Age (day) Value: 14
  misc_feature: MA Experiment 20000182 PARAMETER Experiment Name: At_2mM_SA_P Parameter: Organism Value: A. thaliana
  misc_feature: MA Experiment 20000182 PARAMETER Experiment Name: At_2mM_SA_P Parameter: Plant Line Value: WS
  misc_feature: MA Experiment 20000182 PARAMETER Experiment Name: At_2mM_SA_P Parameter: Timepoint (hr) Value: 6
  misc_feature: MA Experiment 20000182 PARAMETER Experiment Name: At_2mM_SA_P Parameter: Tissue Value: Aerial
  misc_feature: MA Experiment 20000182 PARAMETER Experiment Name: At_2mM_SA_P Parameter: Treatment Value: 2mM SA vs. No Treatment
  misc_feature: MA Experiment ID: 20001557 Result: Up-regulated in Transcription
  misc_feature: MA Experiment 20001557 PARAMETER Experiment Name: At_Drought_Soil_Dry_P Parameter: Age (day) Value: 27
  misc_feature: MA Experiment 20001557 PARAMETER Experiment Name: At_Drought_Soil_Dry_P Parameter: Organism Value: A. thaliana
  misc_feature: MA Experiment 20001557 PARAMETER Experiment Name: At_Drought_Soil_Dry_P Parameter: Plant Line Value: WS
  misc_feature: MA Experiment 20001557 PARAMETER Experiment Name: At_Drought_Soil_Dry_P Parameter: Post Timepoint (hr) Value: 3
  misc_feature: MA Experiment 20001557 PARAMETER Experiment Name: At_Drought_Soil_Dry_P Parameter: Post-Treatment Value: Re-Water vs. No Drought
  misc_feature: MA Experiment 20001557 PARAMETER Experiment Name: At_Drought_Soil_Dry_P Parameter: Timepoint (day) Value: 13
  misc_feature: MA Experiment 20001557 PARAMETER Experiment Name: At_Drought_Soil_Dry_P Parameter: Treatment Value: Drought vs. No Drought
  misc_feature: MA Experiment ID: 20001560 Result: Up-regulated in Transcription
  misc_feature: MA Experiment 20001560 PARAMETER Experiment Name: At_Drought_Soil_Dry_P Parameter: Age (day) Value: 28
  misc_feature: MA Experiment 20001560 PARAMETER Experiment Name: At_Drought_Soil_Dry_P Parameter: Organism Value: A. thaliana
  misc_feature: MA Experiment 20001560 PARAMETER Experiment Name: At_Drought_Soil_Dry_P Parameter: Plant Line Value: WS
  misc_feature: MA Experiment 20001560 PARAMETER Experiment Name: At_Drought_Soil_Dry_P Parameter: Post Timepoint (hr) Value: None
  misc_feature: MA Experiment 20001560 PARAMETER Experiment Name: At_Drought_Soil_Dry_P Parameter: Post-Treatment Value: None
  misc_feature: MA Experiment 20001560 PARAMETER Experiment Name: At_Drought_Soil_Dry_P Parameter: Timepoint (day) Value: 14
  misc_feature: MA Experiment 20001560 PARAMETER Experiment Name: At_Drought_Soil_Dry_P Parameter: Treatment Value: Drought vs. No Drought
  misc_feature: MA Experiment ID: 20001904 Result: Up-regulated in Transcription
  misc_feature: MA Experiment 20001904 PARAMETER Experiment Name: At_Drought_Reproduction_P Parameter: Age (day) Value: 37
  misc_feature: MA Experiment 20001904 PARAMETER Experiment Name: At_Drought_Reproduction_P Parameter: Organism Value: A. thaliana
  misc_feature: MA Experiment 20001904 PARAMETER Experiment Name: At_Drought_Reproduction_P Parameter: Plant Line Value: WS
  misc_feature: MA Experiment 20001904 PARAMETER Experiment Name: At_Drought_Reproduction_P Parameter: Timepoint (day) Value: 7
  misc_feature: MA Experiment 20001904 PARAMETER Experiment Name: At_Drought_Reproduction_P Parameter: Tissue Value: Rosettes
  misc_feature: MA Experiment 20001904 PARAMETER Experiment Name: At_Drought_Reproduction_P Parameter: Treatment Value: Drought vs. No Drought

SEQ ID NO: 33067 - protein, 163 aa, Arabidopsis thaliana; identical to SEQ ID NO: 29477
  peptide (1)..(163): Ceres Seq. ID no. 13495662
  misc_feature (104)..(144): Pfam Name: AN1-like Zinc finger Pfam Description: AN1-like Zinc finger
  misc_feature (10)..(163): Homolog of NCBI NO: 18403408 NR Description: expressed protein [Arabidopsis thaliana]
  misc_feature (5)..(163): Homolog of NCBI NO: 30908921 NR Description: putative zinc finger transcription factor ZFP33
  misc_feature (4)..(162): Homolog of NCBI NO: 15235819 NR Description: zinc finger -related protein [Arabidopsis
  misc_feature (9)..(163): Homolog of NCBI NO: 15221329 NR Description: expressed protein [Arabidopsis thaliana]
  misc_feature (9)..(163): Homolog of NCBI NO: 8778645 NR Description: F5O11.17 [Arabidopsis thaliana]
  misc_feature (9)..(163): Homolog of NCBI NO: 15234402 NR Description: expressed protein [Arabidopsis thaliana]
  misc_feature (1)..(163): Homolog of NCBI NO: 18404102 NR Description: expressed protein [Arabidopsis thaliana]
  misc_feature (1)..(163): Homolog of NCBI NO: 14596167 NR Description: zinc finger-like protein [Arabidopsis thaliana]
  misc_feature (1)..(163): Homolog of NCBI NO: 15231686 NR Description: zinc finger - like protein [Arabidopsis thaliana]
  misc_feature (1)..(163): Homolog of NCBI NO: 15225894 NR Description: zinc finger protein -related [Arabidopsis

SEQ ID NO: 33068 - DNA, 1236 bp, Arabidopsis thaliana; identical to SEQ ID NO: 29478
  misc_feature (1)..(1236): Ceres Seq. ID no. 12321712
  misc_feature: MA Experiment ID: 108434 Result: Down-regulated in Transcription
  misc_feature: MA Experiment 108434 PARAMETER Experiment Name: At_Root_Tips_cDNA_P Parameter: Tissue Value: Root Tips
  misc_feature: MA Experiment ID: 108435 Result: Up-regulated in Transcription
  misc_feature: MA Experiment 108435 PARAMETER Experiment Name: At_stm_Mutants_cDNA_P Parameter: Plant Line Value: wt Landsburg vs stm
  misc_feature: MA Experiment 108435 PARAMETER Experiment Name: At_stm_Mutants_cDNA_P Parameter: Tissue Value: Shoot Apical Meristem Region
  misc_feature: MA Experiment ID: 108463 Result: Up-regulated in Transcription
  misc_feature: MA Experiment 108463 PARAMETER Experiment Name: At_Germinating_Seeds_cDNA_P Parameter: Age (day) Value: 3 vs. 0
  misc_feature: MA Experiment 108463 PARAMETER Experiment Name: At_Germinating_Seeds_cDNA_P Parameter: Tissue Value: Germinating Seeds
  misc_feature: MA Experiment ID: 108469 Result: Down-regulated in Transcription
  misc_feature: MA Experiment ID: 108573 Result: Down-regulated in Transcription
  misc_feature: MA Experiment 108573 PARAMETER Experiment Name: At_Drought_cDNA_P Parameter: Timepoint (hr) Value: 6
  misc_feature: MA Experiment 108573 PARAMETER Experiment Name: At_Drought_cDNA_P Parameter: Tissue Value: Aerial
  misc_feature: MA Experiment 108573 PARAMETER Experiment Name: At_Drought_cDNA_P Parameter: Treatment Value: Drought vs. No Drought
  misc_feature: MA Experiment ID: 108574 Result: Up-regulated in Transcription
  misc_feature: MA Experiment 108574 PARAMETER Experiment Name: At_Wounding__cDNA_P Parameter: Timepoint (hr) Value: 1
  misc_feature: MA Experiment 108574 PARAMETER Experiment Name: At_Wounding__cDNA_P Parameter: Tissue Value: Aerial
  misc_feature: MA Experiment 108574 PARAMETER Experiment Name: At_Wounding__cDNA_P Parameter: Treatment Value: Wounding vs. No Wounding
  misc_feature: MA Experiment ID: 108576 Result: Down-regulated in Transcription
  misc_feature: MA Experiment 108576 PARAMETER Experiment Name: At_42deg_Heat_cDNA_P Parameter: Temperature (deg C) Value: 42 vs. 22
  misc_feature: MA Experiment 108576 PARAMETER Experiment Name: At_42deg_Heat_cDNA_P Parameter: Timepoint (hr) Value: 1
  misc_feature: MA Experiment 108576 PARAMETER Experiment Name: At_42deg_Heat_cDNA_P Parameter: Tissue Value: Aerial
  misc_feature: MA Experiment ID: 108579 Result: Up-regulated in Transcription
  misc_feature: MA Experiment 108579 PARAMETER Experiment Name: At_4deg_Cold_cDNA_P Parameter: Temperature (deg C) Value: 4 vs. 22
  misc_feature: MA Experiment 108579 PARAMETER Experiment Name: At_4deg_Cold_cDNA_P Parameter: Timepoint (hr) Value: 6
  misc_feature: MA Experiment 108579 PARAMETER Experiment Name: At_4deg_Cold_cDNA_P Parameter: Tissue Value: Aerial
  misc_feature: MA Experiment ID: 108585 Result: Down-regulated in Transcription
  misc_feature: MA Experiment 108585 PARAMETER Experiment Name: At_5mM_NaNP_cDNA_P Parameter: Timepoint (hr) Value: 6
  misc_feature: MA Experiment 108585 PARAMETER Experiment Name: At_5mM_NaNP_cDNA_P Parameter: Tissue Value: Aerial
  misc_feature: MA Experiment 108585 PARAMETER Experiment Name: At_5mM_NaNP_cDNA_P Parameter: Treatment Value: null
  misc_feature: MA Experiment ID: 108595 Result: Down-regulated in Transcription
  misc_feature: MA Experiment 108595 PARAMETER Experiment Name: At_Ler-pi_Ovule_cDNA_P Parameter: Plant Line Value: null
  misc_feature: MA Experiment ID: 108668 Result: Down-regulated in Transcription
  misc_feature: MA Experiment 108668 PARAMETER Experiment Name: At_2mM_SA_cDNA_P Parameter: Plant Line Value: WS
  misc_feature: MA Experiment 108668 PARAMETER Experiment Name: At_2mM_SA_cDNA_P Parameter: Timepoint (hr) Value: 6
  misc_feature: MA Experiment 108668 PARAMETER Experiment Name: At_2mM_SA_cDNA_P Parameter: Treatment Value: 2mM SA vs. No Treatment
  misc_feature: MA Experiment ID: 20000090 Result: Down-regulated in Transcription
  misc_feature: MA Experiment ID: 20000111 Result: Down-regulated in Transcription
  misc_feature: MA Experiment 20000111 PARAMETER Experiment Name: At_42deg_Heat_cDNA_P Parameter: Temperature (deg C) Value: 42 vs. 22
  misc_feature: MA Experiment 20000111 PARAMETER Experiment Name: At_42deg_Heat_cDNA_P Parameter: Timepoint (hr) Value: 6
  misc_feature: MA Experiment 20000111 PARAMETER Experiment Name: At_42deg_Heat_cDNA_P Parameter: Tissue Value: Aerial
  misc_feature: MA Experiment ID: 20000112 Result: Down-regulated in Transcription
  misc_feature: MA Experiment 20000112 PARAMETER Experiment Name: At_42deg_Heat_cDNA_P Parameter: Temperature (deg C) Value: 42 vs. 22
  misc_feature: MA Experiment 20000112 PARAMETER Experiment Name: At_42deg_Heat_cDNA_P Parameter: Timepoint (hr) Value: 2
  misc_feature: MA Experiment 20000112 PARAMETER Experiment Name: At_42deg_Heat_cDNA_P Parameter: Tissue Value: Aerial
  misc_feature: MA Experiment ID: 20000113 Result: Down-regulated in Transcription
  misc_feature: MA Experiment 20000113 PARAMETER Experiment Name: At_42deg_Heat_cDNA_P Parameter: Temperature (deg C) Value: 42 vs. 22
  misc_feature: MA Experiment 20000113 PARAMETER Experiment Name: At_42deg_Heat_cDNA_P Parameter: Timepoint (hr) Value: 8
  misc_feature: MA Experiment 20000113 PARAMETER Experiment Name: At_42deg_Heat_cDNA_P Parameter: Tissue Value: Aerial
  misc_feature: MA Experiment ID: 20000173 Result: Down-regulated in Transcription
  misc_feature: MA Experiment 20000173 PARAMETER Experiment Name: At_42deg_Heat_P Parameter: Age (day) Value: 14
  misc_feature: MA Experiment 20000173 PARAMETER Experiment Name: At_42deg_Heat_P Parameter: Organism Value: A. thaliana
  misc_feature: MA Experiment 20000173 PARAMETER Experiment Name: At_42deg_Heat_P Parameter: Plant Line Value: WS
  misc_feature: MA Experiment 20000173 PARAMETER Experiment Name: At_42deg_Heat_P Parameter: Temperature (deg C) Value: 42 vs. 22
  misc_feature: MA Experiment 20000173 PARAMETER Experiment Name: At_42deg_Heat_P Parameter: Timepoint (hr) Value: 6
  misc_feature: MA Experiment 20000173 PARAMETER Experiment Name: At_42deg_Heat_P Parameter: Tissue Value: Aerial
  misc_feature: MA Experiment ID: 20000180 Result: Up-regulated in Transcription
  misc_feature: MA Experiment 20000180 PARAMETER Experiment Name: At_Germinating_Seeds_P Parameter: Age (hr) Value: 24 vs. 0
  misc_feature: MA Experiment 20000180 PARAMETER Experiment Name: At_Germinating_Seeds_P Parameter: Tissue Value: Germinating Seeds
  misc_feature: MA Experiment ID: 20000182 Result: Down-regulated in Transcription
  misc_feature: MA Experiment 20000182 PARAMETER Experiment Name: At_2mM_SA_P Parameter: Age (day) Value: 14
  misc_feature: MA Experiment 20000182 PARAMETER Experiment Name: At_2mM_SA_P Parameter: Organism Value: A. thaliana
  misc_feature: MA Experiment 20000182 PARAMETER Experiment Name: At_2mM_SA_P Parameter: Plant Line Value: WS
  misc_feature: MA Experiment 20000182 PARAMETER Experiment Name: At_2mM_SA_P Parameter: Timepoint (hr) Value: 6
  misc_feature: MA Experiment 20000182 PARAMETER Experiment Name: At_2mM_SA_P Parameter: Tissue Value: Aerial
  misc_feature: MA Experiment 20000182 PARAMETER Experiment Name: At_2mM_SA_P Parameter: Treatment Value: 2mM SA vs. No Treatment
  misc_feature: MA Experiment ID: 20000184 Result: Down-regulated in Transcription
  misc_feature: MA Experiment 20000184 PARAMETER Experiment Name: At_Shoots__P Parameter: Age (day) Value: 7
  misc_feature: MA Experiment 20000184 PARAMETER Experiment Name: At_Shoots__P Parameter: Tissue Value: Shoots vs. Whole Plant
  misc_feature: MA Experiment ID: 20000227 Result: Down-regulated in Transcription
  misc_feature: MA Experiment 20000227 PARAMETER Experiment Name: At_Root-Tips-vs-Tops_P Parameter: Tissue Value: Root Tips vs. Root Tops
  misc_feature: MA Experiment ID: 20000234 Result: Down-regulated in Transcription
  misc_feature: MA Experiment 20000234 PARAMETER Experiment Name: At_Siliques_P Parameter: Age (day) Value: 21
  misc_feature: MA Experiment 20000234 PARAMETER Experiment Name: At_Siliques_P Parameter: Organism Value: A. thaliana
  misc_feature: MA Experiment 20000234 PARAMETER Experiment Name: At_Siliques_P Parameter: Plant Line Value: WS
  misc_feature: MA Experiment 20000234 PARAMETER Experiment Name: At_Siliques_P Parameter: Tissue Value: Less Than 5mm Siliques vs. Whole Plant
  misc_feature: MA Experiment ID: 20000235 Result: Down-regulated in Transcription
  misc_feature: MA Experiment 20000235 PARAMETER Experiment Name: At_Siliques_P Parameter: Age (day) Value: 21
  misc_feature: MA Experiment 20000235 PARAMETER Experiment Name: At_Siliques_P Parameter: Organism Value: A. thaliana
  misc_feature: MA Experiment 20000235 PARAMETER Experiment Name: At_Siliques_P Parameter: Plant Line Value: WS
  misc_feature: MA Experiment 20000235 PARAMETER Experiment Name: At_Siliques_P Parameter: Tissue Value: 5-10mm Siliques vs. Whole Plant
  misc_feature: MA Experiment ID: 20000265 Result: Down-regulated in Transcription
  misc_feature: MA Experiment 20000265 PARAMETER Experiment Name: At_Open_Flower_P Parameter: Age (day) Value: 21
  misc_feature: MA Experiment 20000265 PARAMETER Experiment Name: At_Open_Flower_P Parameter: Plant Line Value: WS
  misc_feature: MA Experiment 20000265 PARAMETER Experiment Name: At_Open_Flower_P Parameter: Tissue Value: Closed Flower vs. Whole Plant
  misc_feature: MA Experiment ID: 20000286 Result: Down-regulated in Transcription
  misc_feature: MA Experiment 20000286 PARAMETER Experiment Name: At_Open_Flower_P Parameter: Age (day) Value: 21
  misc_feature: MA Experiment 20000286 PARAMETER Experiment Name: At_Open_Flower_P Parameter: Plant Line Value: WS
  misc_feature: MA Experiment 20000286 PARAMETER Experiment Name: At_Open_Flower_P Parameter: Tissue Value: Half Open vs. Whole Plant
  misc_feature: MA Experiment ID: 20000437 Result: Down-regulated in Transcription
  misc_feature: MA Experiment 20000437 PARAMETER Experiment Name: At_Drought_P Parameter: Age (day) Value: 8
  misc_feature: MA Experiment 20000437 PARAMETER Experiment Name: At_Drought_P Parameter: Organism Value: A. thaliana
  misc_feature: MA Experiment 20000437 PARAMETER Experiment Name: At_Drought_P Parameter: Plant Line Value: WS
  misc_feature: MA Experiment 20000437 PARAMETER Experiment Name: At_Drought_P Parameter: Timepoint (hr) Value: 24
  misc_feature: MA Experiment 20000437 PARAMETER Experiment Name: At_Drought_P Parameter: Tissue Value: Whole Plant
  misc_feature: MA Experiment 20000437 PARAMETER Experiment Name: At_Drought_P Parameter: Treatment Value: Drought vs. No Drought
  misc_feature: MA Experiment ID: 20001247 Result: Down-regulated in Transcription
  misc_feature: MA Experiment 20001247 PARAMETER Experiment Name: At_Far-red-induction_P Parameter: Age (day) Value: 7
  misc_feature: MA Experiment 20001247 PARAMETER Experiment Name: At_Far-red-induction_P Parameter: Light Value: Far-red vs. White
  misc_feature: MA Experiment 20001247 PARAMETER Experiment Name: At_Far-red-induction_P Parameter: Organism Value: A. thaliana
  misc_feature: MA Experiment 20001247 PARAMETER Experiment Name: At_Far-red-induction_P Parameter: Plant Line Value: Columbia
  misc_feature: MA Experiment 20001247 PARAMETER Experiment Name: At_Far-red-induction_P Parameter: Timepoint (hr) Value: 1
  misc_feature: MA Experiment 20001247 PARAMETER Experiment Name: At_Far-red-induction_P Parameter: Tissue Value: Whole Plant
  misc_feature: MA Experiment ID: 20001248 Result: Down-regulated in Transcription
  misc_feature: MA Experiment 20001248 PARAMETER Experiment Name: At_Far-red-induction_P Parameter: Age (day) Value: 7
  misc_feature: MA Experiment 20001248 PARAMETER Experiment Name: At_Far-red-induction_P Parameter: Light Value: Far-red vs. White
  misc_feature: MA Experiment 20001248 PARAMETER Experiment Name: At_Far-red-induction_P Parameter: Organism Value: A. thaliana
  misc_feature: MA Experiment 20001248 PARAMETER Experiment Name: At_Far-red-induction_P Parameter: Plant Line Value: Columbia
  misc_feature: MA Experiment 20001248 PARAMETER Experiment Name: At_Far-red-induction_P Parameter: Timepoint (hr) Value: 4
  misc_feature: MA Experiment 20001248 PARAMETER Experiment Name: At_Far-red-induction_P Parameter: Tissue Value: Whole Plant
  misc_feature: MA Experiment ID: 20001450 Result: Down-regulated in Transcription
  misc_feature: MA Experiment 20001450 PARAMETER Experiment Name: At_Far-red-induction_P Parameter: Age (day) Value: 7
  misc_feature: MA Experiment 20001450 PARAMETER Experiment Name: At_Far-red-induction_P Parameter: Light Value: Far-red vs. White
  misc_feature: MA Experiment 20001450 PARAMETER Experiment Name: At_Far-red-induction_P Parameter: Organism Value: A. thaliana
  misc_feature: MA Experiment 20001450 PARAMETER Experiment Name: At_Far-red-induction_P Parameter: Plant Line Value: Columbia
  misc_feature: MA Experiment 20001450 PARAMETER Experiment Name: At_Far-red-induction_P Parameter: Timepoint (hr) Value: 8
  misc_feature: MA Experiment 20001450 PARAMETER Experiment Name: At_Far-red-induction_P Parameter: Tissue Value: Whole Plant
  misc_feature: MA Experiment ID: 20001451 Result: Down-regulated in Transcription
  misc_feature: MA Experiment 20001451 PARAMETER Experiment Name: At_Far-red-induction_P Parameter: Age (day) Value: 7
  misc_feature: MA Experiment 20001451 PARAMETER Experiment Name: At_Far-red-induction_P Parameter: Light Value: Far-red vs. White
  misc_feature: MA Experiment 20001451 PARAMETER Experiment Name: At_Far-red-induction_P Parameter: Organism Value: A. thaliana
  misc_feature: MA Experiment 20001451 PARAMETER Experiment Name: At_Far-red-induction_P Parameter: Plant Line Value: Columbia
  misc_feature: MA Experiment 20001451 PARAMETER Experiment Name: At_Far-red-induction_P Parameter: Timepoint (hr) Value: 24
  misc_feature: MA Experiment 20001451 PARAMETER Experiment Name: At_Far-red-induction_P Parameter: Tissue Value: Whole Plant
  misc_feature: MA Experiment ID: 20001558 Result: Down-regulated in Transcription
  misc_feature: MA Experiment 20001558 PARAMETER Experiment Name: At_Drought_Soil_Dry_P Parameter: Age (day) Value: 27
  misc_feature: MA Experiment 20001558 PARAMETER Experiment Name: At_Drought_Soil_Dry_P Parameter: Organism Value: A. thaliana
  misc_feature: MA Experiment 20001558 PARAMETER Experiment Name: At_Drought_Soil_Dry_P Parameter: Plant Line Value: WS
  misc_feature: MA Experiment 20001558 PARAMETER Experiment Name: At_Drought_Soil_Dry_P Parameter: Post Timepoint (hr) Value: 6
  misc_feature: MA Experiment 20001558 PARAMETER Experiment Name: At_Drought_Soil_Dry_P Parameter: Post-Treatment Value: Re-Water vs. No Drought
  misc_feature: MA Experiment 20001558 PARAMETER Experiment Name: At_Drought_Soil_Dry_P Parameter: Timepoint (day) Value: 13
  misc_feature: MA Experiment 20001558 PARAMETER Experiment Name: At_Drought_Soil_Dry_P Parameter: Treatment Value: Drought vs. No Drought

SEQ ID NO: 33069 - protein, 276 aa, Arabidopsis thaliana; identical to SEQ ID NO: 29479
  peptide (1)..(276): Ceres Seq. ID no. 12321713
  misc_feature (100)..(256): Pfam Name: Adenylylsulphate kinase Pfam Description: Adenylylsulphate kinase
  misc_feature (10)..(256): Homolog of NCBI NO: 21537248 NR Description: adenylylsulfate kinase-like protein [Arabidopsis
  misc_feature (54)..(274): Homolog of NCBI NO: 6563285 NR Description: adenosine-5'-phosphosulfate kinase [Zea mays]
  misc_feature (2)..(256): Homolog of NCBI NO: 18425199 NR Description: adenylylsulfate kinase-like protein
  misc_feature (73)..(274): Homolog of NCBI NO: 34393551 NR Description: putative adenosine-5'-phosphosulfate kinase
  misc_feature (10)..(276): Homolog of NCBI NO: 9757873 NR Description: adenylylsulfate kinase-like protein [Arabidopsis
  misc_feature (72)..(275): Homolog of NCBI NO: 15228666 NR Description: putative adenylylsulfate kinase; protein id:
  misc_feature (68)..(275): Homolog of NCBI NO: 15236087 NR Description: adenosine-5-phosphosulfate-kinase
  misc_feature (50)..(276): Homolog of NCBI NO: 7387809 NR Description: Adenylylsulfate kinase, chloroplast precursor kinase) (Adenosine-5'phosphosulfate kinase) (ATP
  misc_feature (1)..(276): Homolog of NCBI NO: 21553403 NR Description: putative adenosine phosphosulfate kinase
  misc_feature (1)..(276): Homolog of NCBI NO: 15225999 NR Description: putative adenosine phosphosulfate kinase

SEQ ID NO: 33070 - protein, 263 aa, Arabidopsis thaliana; identical to SEQ ID NO: 29480
  peptide (1)..(263): Ceres Seq. ID no. 12321714
  misc_feature (87)..(243): Pfam Name: Adenylylsulphate kinase Pfam Description: Adenylylsulphate kinase
  misc_feature (1)..(243): Homolog of NCBI NO: 21537248 NR Description: adenylylsulfate kinase-like protein [Arabidopsis
  misc_feature (41)..(261): Homolog of NCBI NO: 6563285 NR Description: adenosine-5'-phosphosulfate kinase [Zea mays]
  misc_feature (1)..(243): Homolog of NCBI NO: 18425199 NR Description: adenylylsulfate kinase-like protein
  misc_feature (60)..(261): Homolog of NCBI NO: 34393551 NR Description: putative adenosine-5'-phosphosulfate kinase
  misc_feature (1)..(263): Homolog of NCBI NO: 9757873 NR Description: adenylylsulfate kinase-like protein [Arabidopsis
  misc_feature (59)..(262): Homolog of NCBI NO: 15228666 NR Description: putative adenylylsulfate kinase; protein id:
  misc_feature (55)..(262): Homolog of NCBI NO: 15236087 NR Description: adenosine-5-phosphosulfate-kinase
  misc_feature (37)..(263): Homolog of NCBI NO: 7387809 NR Description: Adenylylsulfate kinase, chloroplast precursor kinase) (Adenosine-5'phosphosulfate kinase) (ATP
  misc_feature (1)..(263): Homolog of NCBI NO: 21553403 NR Description: putative adenosine phosphosulfate kinase
  misc_feature (1)..(263): Homolog of NCBI NO: 15225999 NR Description: putative adenosine phosphosulfate kinase

SEQ ID NO: 33071 - protein, 251 aa, Arabidopsis thaliana; identical to SEQ ID NO: 29481
  peptide (1)..(251): Ceres Seq. ID no. 12321715
  misc_feature (75)..(231): Pfam Name: Adenylylsulphate kinase Pfam Description: Adenylylsulphate kinase
  misc_feature (1)..(231): Homolog of NCBI NO: 21537248 NR Description: adenylylsulfate kinase-like protein [Arabidopsis
  misc_feature (29)..(249): Homolog of NCBI NO: 6563285 NR Description: adenosine-5'-phosphosulfate kinase [Zea mays]
  misc_feature (1)..(231): Homolog of NCBI NO: 18425199 NR Description: adenylylsulfate kinase-like protein
  misc_feature (48)..(249): Homolog of NCBI NO: 34393551 NR Description: putative adenosine-5'-phosphosulfate kinase
  misc_feature (1)..(251): Homolog of NCBI NO: 9757873 NR Description: adenylylsulfate kinase-like protein [Arabidopsis
  misc_feature (47)..(250): Homolog of NCBI NO: 15228666 NR Description: putative adenylylsulfate kinase; protein id:
  misc_feature (43)..(250): Homolog of NCBI NO: 15236087 NR Description: adenosine-5-phosphosulfate-kinase
  misc_feature (25)..(251): Homolog of NCBI NO: 7387809 NR Description: Adenylylsulfate kinase, chloroplast precursor kinase) (Adenosine-5'phosphosulfate kinase) (ATP
  misc_feature (1)..(251): Homolog of NCBI NO: 21553403 NR Description: putative adenosine phosphosulfate kinase
  misc_feature (1)..(251): Homolog of NCBI NO: 15225999 NR Description: putative adenosine phosphosulfate kinase

SEQ ID NO: 33072 - DNA, 630 bp, Arabidopsis thaliana; identical to SEQ ID NO: 29482
  misc_feature (1)..(630): Ceres Seq. ID no. 12396845
  misc_feature: MA Experiment ID: 108434 Result: Up-regulated in Transcription
  misc_feature: MA Experiment 108434 PARAMETER Experiment Name: At_Root_Tips_cDNA_P Parameter: Tissue Value: Root Tips
  misc_feature: MA Experiment ID: 108463 Result: Down-regulated in Transcription
  misc_feature: MA Experiment 108463 PARAMETER Experiment Name: At_Germinating_Seeds_cDNA_P Parameter: Age (day) Value: 3 vs. 0
  misc_feature: MA Experiment 108463 PARAMETER Experiment Name: At_Germinating_Seeds_cDNA_P Parameter: Tissue Value: Germinating Seeds
  misc_feature: MA Experiment ID: 108464 Result: Down-regulated in Transcription
  misc_feature: MA Experiment 108464 PARAMETER Experiment Name: At_Germinating_Seeds_cDNA_P Parameter: Age (day) Value: 4 vs. 0
  misc_feature: MA Experiment 108464 PARAMETER Experiment Name: At_Germinating_Seeds_cDNA_P Parameter: Tissue Value: Germinating Seeds
  misc_feature: MA Experiment ID: 108594 Result: Up-regulated in Transcription
  misc_feature: MA Experiment 108594 PARAMETER Experiment Name: At_Ler-rhl_Root_cDNA_P Parameter: Plant Line Value: null
  misc_feature: MA Experiment ID: 20000227 Result: Up-regulated in Transcription
  misc_feature: MA Experiment 20000227 PARAMETER Experiment Name: At_Root-Tips-vs-Tops_P Parameter: Tissue Value: Root Tips vs. Root Tops
  misc_feature: MA Experiment ID: 20000234 Result: Up-regulated in Transcription
  misc_feature: MA Experiment 20000234 PARAMETER Experiment Name: At_Siliques_P Parameter: Age (day) Value: 21
  misc_feature: MA Experiment 20000234 PARAMETER Experiment Name: At_Siliques_P Parameter: Organism Value: A. thaliana
  misc_feature: MA Experiment 20000234 PARAMETER Experiment Name: At_Siliques_P Parameter: Plant Line Value: WS
  misc_feature: MA Experiment 20000234 PARAMETER Experiment Name: At_Siliques_P Parameter: Tissue Value: Less Than 5mm Siliques vs. Whole Plant
  misc_feature: MA Experiment ID: 20000264 Result: Up-regulated in Transcription
  misc_feature: MA Experiment 20000264 PARAMETER Experiment Name: At_Open_Flower_P Parameter: Age (day) Value: 21
  misc_feature: MA Experiment 20000264 PARAMETER Experiment Name: At_Open_Flower_P Parameter: Plant Line Value: WS
  misc_feature: MA Experiment 20000264 PARAMETER Experiment Name: At_Open_Flower_P Parameter: Tissue Value: Open Flower vs. Whole Plant
  misc_feature: MA Experiment ID: 20000265 Result: Up-regulated in Transcription
  misc_feature: MA Experiment 20000265 PARAMETER Experiment Name: At_Open_Flower_P Parameter: Age (day) Value: 21
  misc_feature: MA Experiment 20000265 PARAMETER Experiment Name: At_Open_Flower_P Parameter: Plant Line Value: WS
  misc_feature: MA Experiment 20000265 PARAMETER Experiment Name: At_Open_Flower_P Parameter: Tissue Value: Closed Flower vs. Whole Plant

SEQ ID NO: 33073 - protein, 179 aa, Arabidopsis thaliana; identical to SEQ ID NO: 29483
  peptide (1)..(179): Ceres Seq. ID no. 12396846
  misc_feature (44)..(157): Homolog of NCBI NO: 11994768 NR Description: gene_id:MMF24.3~unknown protein [Arabidopsis
  misc_feature (2)..(179): Homolog of NCBI NO: 15228659 NR Description: hypothetical protein; protein id: At3g29280.1

SEQ ID NO: 33074 - protein, 178 aa, Arabidopsis thaliana; identical to SEQ ID NO: 29484
  peptide (1)..(178): Ceres Seq. ID no. 12396847
  misc_feature (43)..(156): Homolog of NCBI NO: 11994768 NR Description: gene_id:MMF24.3~unknown protein [Arabidopsis
  misc_feature (1)..(178): Homolog of NCBI NO: 15228659 NR Description: hypothetical protein; protein id: At3g29280.1

SEQ ID NO: 33075 - protein, 136 aa, Arabidopsis thaliana; identical to SEQ ID NO: 29485
  peptide (1)..(136): Ceres Seq. ID no. 12396848
  misc_feature (1)..(114): Homolog of NCBI NO: 11994768 NR Description: gene_id:MMF24.3~unknown protein [Arabidopsis
  misc_feature (1)..(136): Homolog of NCBI NO: 15228659 NR Description: hypothetical protein; protein id: At3g29280.1

SEQ ID NO: 33076 - DNA, 2369 bp, Arabidopsis thaliana; identical to SEQ ID NO: 29486
  misc_feature (1)..(2369): Ceres Seq. ID no. 13495969
  misc_feature: MA Experiment ID: 108434 Result: Down-regulated in Transcription
  misc_feature: MA Experiment 108434 PARAMETER Experiment Name: At_Root_Tips_cDNA_P Parameter: Tissue Value: Root Tips
  misc_feature: MA Experiment ID: 20000224 Result: Down-regulated in Transcription

SEQ ID NO: 33077 - protein, 575 aa, Arabidopsis thaliana; identical to SEQ ID NO: 29487
  peptide (1)..(575): Ceres Seq. ID no. 15222970
  misc_feature (16)..(575): Homolog of NCBI NO: 15239979 NR Description: pentatricopeptide (PPR) repeat-containing protein
  misc_feature (68)..(575): Homolog of NCBI NO: 15226200 NR Description: pentatricopeptide (PPR) repeat-containing protein
  misc_feature (1)..(575): Homolog of NCBI NO: 34896896 NR Description: hypothetical protein [Oryza sativa (japonica
  misc_feature (1)..(575): Homolog of NCBI NO: 15223594 NR Description: pentatricopeptide (PPR) repeat-containing protein
  misc_feature (1)..(575): Homolog of NCBI NO: 15217508 NR Description: pentatricopeptide (PPR) repeat-containing protein
  misc_feature (7)..(575): Homolog of NCBI NO: 15235498 NR Description: pentatricopeptide (PPR) repeat-containing protein
  misc_feature (1)..(325): Homolog of NCBI NO: 7485181 NR Description: hypothetical protein - Arabidopsis thaliana
  misc_feature (4)..(575): Homolog of NCBI NO: 27817913 NR Description: OJ1066_B03.8 [Oryza sativa (japonica
  misc_feature (26)..(535): Homolog of NCBI NO: 7485181 NR Description: hypothetical protein - Arabidopsis thaliana
  misc_feature (1)..(575): Homolog of NCBI NO: 22328738 NR Description: pentatricopeptide (PPR) repeat-containing protein

SEQ ID NO: 33078 - protein, 553 aa, Arabidopsis thaliana; identical to SEQ ID NO: 29488
  peptide (1)..(553): Ceres Seq. ID no. 15222971
  misc_feature (1)..(553): Homolog of NCBI NO: 15239979 NR Description: pentatricopeptide (PPR) repeat-containing protein
  misc_feature (46)..(553): Homolog of NCBI NO: 15226200 NR Description: pentatricopeptide (PPR) repeat-containing protein
  misc_feature (1)..(553): Homolog of NCBI NO: 34896896 NR Description: hypothetical protein [Oryza sativa (japonica
  misc_feature (1)..(553): Homolog of NCBI NO: 15223594 NR Description: pentatricopeptide (PPR) repeat-containing protein
  misc_feature (1)..(553): Homolog of NCBI NO: 15217508 NR Description: pentatricopeptide (PPR) repeat-containing protein
  misc_feature (1)..(553): Homolog of NCBI NO: 15235498 NR Description: pentatricopeptide (PPR) repeat-containing protein
  misc_feature (1)..(303): Homolog of NCBI NO: 7485181 NR Description: hypothetical protein - Arabidopsis thaliana
  misc_feature (1)..(553): Homolog of NCBI NO: 27817913 NR Description: OJ1066_B03.8 [Oryza sativa (japonica
  misc_feature (4)..(513): Homolog of NCBI NO: 7485181 NR Description: hypothetical protein - Arabidopsis thaliana
  misc_feature (1)..(553): Homolog of NCBI NO: 22328738 NR Description: pentatricopeptide (PPR) repeat-containing protein

SEQ ID NO: 33079 - protein, 552 aa, Arabidopsis thaliana; identical to SEQ ID NO: 29489
  peptide (1)..(552): Ceres Seq. ID no. 15222972
  misc_feature (1)..(552): Homolog of NCBI NO: 15239979 NR Description: pentatricopeptide (PPR) repeat-containing protein
  misc_feature (45)..(552): Homolog of NCBI NO: 15226200 NR Description: pentatricopeptide (PPR) repeat-containing protein
  misc_feature (1)..(552): Homolog of NCBI NO: 34896896 NR Description: hypothetical protein [Oryza sativa (japonica
  misc_feature (1)..(552): Homolog of NCBI NO: 15223594 NR Description: pentatricopeptide (PPR) repeat-containing protein
  misc_feature (1)..(552): Homolog of NCBI NO: 15217508 NR Description: pentatricopeptide (PPR) repeat-containing protein
  misc_feature (1)..(552): Homolog of NCBI NO: 15235498 NR Description: pentatricopeptide (PPR) repeat-containing protein
  misc_feature (1)..(302): Homolog of NCBI NO: 7485181 NR Description: hypothetical protein - Arabidopsis thaliana
  misc_feature (1)..(552): Homolog of NCBI NO: 27817913 NR Description: OJ1066_B03.8 [Oryza sativa (japonica
  misc_feature (3)..(512): Homolog of NCBI NO: 7485181 NR Description: hypothetical protein - Arabidopsis thaliana
  misc_feature (1)..(552): Homolog of NCBI NO: 22328738 NR Description: pentatricopeptide (PPR) repeat-containing protein

SEQ ID NO: 33080 - DNA, 909 bp, Arabidopsis thaliana; identical to SEQ ID NO: 29490
  misc_feature (1)..(909): Ceres Seq. ID no. 12333026
  misc_feature: MA Experiment ID: 108462 Result: Up-regulated in Transcription
  misc_feature: MA Experiment 108462 PARAMETER Experiment Name: At_Germinating_Seeds_cDNA_P Parameter: Age (day) Value: 2 vs. 0
  misc_feature: MA Experiment 108462 PARAMETER Experiment Name: At_Germinating_Seeds_cDNA_P Parameter: Tissue Value: Germinating Seeds
  misc_feature: MA Experiment ID: 108464 Result: Up-regulated in Transcription
  misc_feature: MA Experiment 108464 PARAMETER Experiment Name: At_Germinating_Seeds_cDNA_P Parameter: Age (day) Value: 4 vs. 0
  misc_feature: MA Experiment 108464 PARAMETER Experiment Name: At_Germinating_Seeds_cDNA_P Parameter: Tissue Value: Germinating Seeds
  misc_feature: MA Experiment ID: 108561 Result: Up-regulated in Transcription
  misc_feature: MA Experiment 108561 PARAMETER Experiment Name: At_100uM_ABA_cDNA_P Parameter: Timepoint (hr) Value: 6
  misc_feature: MA Experiment 108561 PARAMETER Experiment Name: At_100uM_ABA_cDNA_P Parameter: Tissue Value: Aerial
  misc_feature: MA Experiment 108561 PARAMETER Experiment Name: At_100uM_ABA_cDNA_P Parameter: Treatment Value: 100uM ABA vs. No Treatment
  misc_feature: MA Experiment ID: 108573 Result: Up-regulated in Transcription
  misc_feature: MA Experiment 108573 PARAMETER Experiment Name: At_Drought_cDNA_P Parameter: Timepoint (hr) Value: 6
  misc_feature: MA Experiment 108573 PARAMETER Experiment Name: At_Drought_cDNA_P Parameter: Tissue Value: Aerial
  misc_feature: MA Experiment 108573 PARAMETER Experiment Name: At_Drought_cDNA_P Parameter: Treatment Value: Drought vs. No Drought
  misc_feature: MA Experiment ID: 108605 Result: Up-regulated in Transcription
  misc_feature: MA Experiment 108605 PARAMETER Experiment Name: At_100uM_ABA_cDNA_P Parameter: Timepoint (hr) Value: 6
  misc_feature: MA Experiment 108605 PARAMETER Experiment Name: At_100uM_ABA_cDNA_P Parameter: Tissue Value: Aerial
  misc_feature: MA Experiment 108605 PARAMETER Experiment Name: At_100uM_ABA_cDNA_P Parameter: Treatment Value: 100uM ABA vs. No Treatment
  misc_feature: MA Experiment ID: 108607 Result: Up-regulated in Transcription
  misc_feature: MA Experiment 108607 PARAMETER Experiment Name: At_100uM_ABA_cDNA_P Parameter: Timepoint (hr) Value: 4
  misc_feature: MA Experiment 108607 PARAMETER Experiment Name: At_100uM_ABA_cDNA_P Parameter: Tissue Value: Aerial
  misc_feature: MA Experiment 108607 PARAMETER Experiment Name: At_100uM_ABA_cDNA_P Parameter: Treatment Value: 100uM ABA vs. No Treatment
  misc_feature: MA Experiment ID: 108609 Result: Up-regulated in Transcription
  misc_feature: MA Experiment 108609 PARAMETER Experiment Name: At_100uM_ABA_cDNA_P Parameter: Timepoint (hr) Value: 24
  misc_feature: MA Experiment 108609 PARAMETER Experiment Name: At_100uM_ABA_cDNA_P Parameter: Tissue Value: Aerial
  misc_feature: MA Experiment 108609 PARAMETER Experiment Name: At_100uM_ABA_cDNA_P Parameter: Treatment Value: 100uM ABA vs. No Treatment
  misc_feature: MA Experiment ID: 20000069 Result: Up-regulated in Transcription
  misc_feature: MA Experiment 20000069 PARAMETER Experiment Name: At_100uM_ABA_Mutants_cDNA_P Parameter: Plant Line Value: CS23
  misc_feature: MA Experiment 20000069 PARAMETER Experiment Name: At_100uM_ABA_Mutants_cDNA_P Parameter: Timepoint (hr) Value: 6
  misc_feature: MA Experiment 20000069 PARAMETER Experiment Name: At_100uM_ABA_Mutants_cDNA_P Parameter: Tissue Value: Aerial
  misc_feature: MA Experiment 20000069 PARAMETER Experiment Name: At_100uM_ABA_Mutants_cDNA_P Parameter: Treatment Value: 100uM ABA vs. No Treatment
  misc_feature: MA Experiment ID: 20000070 Result: Up-regulated in Transcription
  misc_feature: MA Experiment 20000070 PARAMETER Experiment Name: At_100uM_ABA_Mutants_cDNA_P Parameter: Plant Line Value: CS24
  misc_feature: MA Experiment 20000070 PARAMETER Experiment Name: At_100uM_ABA_Mutants_cDNA_P Parameter: Timepoint (hr) Value: 6
  misc_feature: MA Experiment 20000070 PARAMETER Experiment Name: At_100uM_ABA_Mutants_cDNA_P Parameter: Tissue Value: Aerial
  misc_feature: MA Experiment 20000070 PARAMETER Experiment Name: At_100uM_ABA_Mutants_cDNA_P Parameter: Treatment Value: 100uM ABA vs. No Treatment
  misc_feature: MA Experiment ID: 20000071 Result: Up-regulated in Transcription
  misc_feature: MA Experiment 20000071 PARAMETER Experiment Name: At_100uM_ABA_Mutants_cDNA_P Parameter: Plant Line Value: CS8104
  misc_feature: MA Experiment 20000071 PARAMETER Experiment Name: At_100uM_ABA_Mutants_cDNA_P Parameter: Timepoint (hr) Value: 6
  misc_feature: MA Experiment 20000071 PARAMETER Experiment Name: At_100uM_ABA_Mutants_cDNA_P Parameter: Tissue Value: Aerial
  misc_feature: MA Experiment 20000071 PARAMETER Experiment Name: At_100uM_ABA_Mutants_cDNA_P Parameter: Treatment Value: 100uM ABA vs. No Treatment
  misc_feature: MA Experiment ID: 20000072 Result: Up-regulated in Transcription
  misc_feature: MA Experiment 20000072 PARAMETER Experiment Name: At_100uM_ABA_Mutants_cDNA_P Parameter: Plant Line Value: CS8105
  misc_feature: MA Experiment 20000072 PARAMETER Experiment Name: At_100uM_ABA_Mutants_cDNA_P Parameter: Timepoint (hr) Value: 6
  misc_feature: MA Experiment 20000072 PARAMETER Experiment Name: At_100uM_ABA_Mutants_cDNA_P Parameter: Tissue Value: Aerial
  misc_feature: MA Experiment 20000072 PARAMETER Experiment Name: At_100uM_ABA_Mutants_cDNA_P Parameter: Treatment Value: 100uM ABA vs. No Treatment
  misc_feature: MA Experiment ID: 20000086 Result: Up-regulated in Transcription
  misc_feature: MA Experiment 20000086 PARAMETER Experiment Name: At_100uM_ABA_Mutants_cDNA_P Parameter: Plant Line Value: CS22
  misc_feature: MA Experiment 20000086 PARAMETER Experiment Name: At_100uM_ABA_Mutants_cDNA_P Parameter: Timepoint (hr) Value: 6
  misc_feature: MA Experiment 20000086 PARAMETER Experiment Name: At_100uM_ABA_Mutants_cDNA_P Parameter: Tissue Value: Aerial
  misc_feature: MA Experiment 20000086 PARAMETER Experiment Name: At_100uM_ABA_Mutants_cDNA_P Parameter: Treatment Value: 100uM ABA vs. No Treatment
  misc_feature: MA Experiment ID: 20000087 Result: Up-regulated in Transcription
  misc_feature: MA Experiment 20000087 PARAMETER Experiment Name: At_100uM_ABA_Mutants_cDNA_P Parameter: Plant Line Value: WS
  misc_feature: MA Experiment 20000087 PARAMETER Experiment Name: At_100uM_ABA_Mutants_cDNA_P Parameter: Timepoint (hr) Value: 6
  misc_feature: MA Experiment 20000087 PARAMETER Experiment Name: At_100uM_ABA_Mutants_cDNA_P Parameter: Tissue Value: Aerial
  misc_feature: MA Experiment 20000087 PARAMETER Experiment Name: At_100uM_ABA_Mutants_cDNA_P Parameter: Treatment Value: 100uM ABA vs. No Treatment
  misc_feature: MA Experiment ID: 20000117 Result: Up-regulated in Transcription
  misc_feature: MA Experiment 20000117 PARAMETER Experiment Name: At_100uM_ABA_Mutants_cDNA_P Parameter: Plant Line Value: Columbia
  misc_feature: MA Experiment 20000117 PARAMETER Experiment Name: At_100uM_ABA_Mutants_cDNA_P Parameter: Timepoint (hr) Value: 6
  misc_feature: MA Experiment 20000117 PARAMETER Experiment Name: At_100uM_ABA_Mutants_cDNA_P Parameter: Tissue Value: Aerial
  misc_feature: MA Experiment 20000117 PARAMETER Experiment Name: At_100uM_ABA_Mutants_cDNA_P Parameter: Treatment Value: 100uM ABA vs. No Treatment
  misc_feature: MA Experiment ID: 20000184 Result: Down-regulated in Transcription
  misc_feature: MA Experiment 20000184 PARAMETER Experiment Name: At_Shoots__P Parameter: Age (day) Value: 7
  misc_feature: MA Experiment 20000184 PARAMETER Experiment Name: At_Shoots__P Parameter: Tissue Value: Shoots vs. Whole Plant
  misc_feature: MA Experiment ID: 20000438 Result: Down-regulated in Transcription
  misc_feature: MA Experiment 20000438 PARAMETER Experiment Name: At_Shoots__P Parameter: Age (day) Value: 14
  misc_feature: MA Experiment 20000438 PARAMETER Experiment Name: At_Shoots__P Parameter: Tissue Value: Shoots vs. Whole Plant
  misc_feature: MA Experiment ID: 20000453 Result: Up-regulated in Transcription
  misc_feature: MA Experiment 20000453 PARAMETER Experiment Name: At_100uM_ABA_P Parameter: Age (day) Value: 15
  misc_feature: MA Experiment 20000453 PARAMETER Experiment Name: At_100uM_ABA_P Parameter: Organism Value: A. thaliana
  misc_feature: MA Experiment 20000453 PARAMETER Experiment Name: At_100uM_ABA_P Parameter: Plant Line Value: WS
  misc_feature: MA Experiment 20000453 PARAMETER Experiment Name: At_100uM_ABA_P Parameter: Timepoint (hr) Value: 24
  misc_feature: MA Experiment 20000453 PARAMETER Experiment Name: At_100uM_ABA_P Parameter: Tissue Value: Aerial
  misc_feature: MA Experiment 20000453 PARAMETER Experiment Name: At_100uM_ABA_P Parameter: Treatment Value: 100uM ABA vs. No Treatment
  misc_feature: MA Experiment ID: 20001247 Result: Up-regulated in Transcription
  misc_feature: MA Experiment 20001247 PARAMETER Experiment Name: At_Far-red-induction_P Parameter: Age (day) Value: 7
  misc_feature: MA Experiment 20001247 PARAMETER Experiment Name: At_Far-red-induction_P Parameter: Light Value: Far-red vs. White
  misc_feature: MA Experiment 20001247 PARAMETER Experiment Name: At_Far-red-induction_P Parameter: Organism Value: A. thaliana
  misc_feature: MA Experiment 20001247 PARAMETER Experiment Name: At_Far-red-induction_P Parameter: Plant Line Value: Columbia
  misc_feature: MA Experiment 20001247 PARAMETER Experiment Name: At_Far-red-induction_P Parameter: Timepoint (hr) Value: 1
  misc_feature: MA Experiment 20001247 PARAMETER Experiment Name: At_Far-red-induction_P Parameter: Tissue Value: Whole Plant
  misc_feature: MA Experiment ID: 20001248 Result: Up-regulated in Transcription
  misc_feature: MA Experiment 20001248 PARAMETER Experiment Name: At_Far-red-induction_P Parameter: Age (day) Value: 7
  misc_feature: MA Experiment 20001248 PARAMETER Experiment Name: At_Far-red-induction_P Parameter: Light Value: Far-red vs. White
  misc_feature: MA Experiment 20001248 PARAMETER Experiment Name: At_Far-red-induction_P Parameter: Organism Value: A. thaliana
  misc_feature: MA Experiment 20001248 PARAMETER Experiment Name: At_Far-red-induction_P Parameter: Plant Line Value: Columbia
  misc_feature: MA Experiment 20001248 PARAMETER Experiment Name: At_Far-red-induction_P Parameter: Timepoint (hr) Value: 4
  misc_feature: MA Experiment 20001248 PARAMETER Experiment Name: At_Far-red-induction_P Parameter: Tissue Value: Whole Plant
  misc_feature: MA Experiment ID: 20001450 Result: Up-regulated in Transcription
  misc_feature: MA Experiment 20001450 PARAMETER Experiment Name: At_Far-red-induction_P Parameter: Age (day) Value: 7
  misc_feature: MA Experiment 20001450 PARAMETER Experiment Name: At_Far-red-induction_P Parameter: Light Value: Far-red vs. White
  misc_feature: MA Experiment 20001450 PARAMETER Experiment Name: At_Far-red-induction_P Parameter: Organism Value: A. thaliana
  misc_feature: MA Experiment 20001450 PARAMETER Experiment Name: At_Far-red-induction_P Parameter: Plant Line Value: Columbia
  misc_feature: MA Experiment 20001450 PARAMETER Experiment Name: At_Far-red-induction_P Parameter: Timepoint (hr) Value: 8
  misc_feature: MA Experiment 20001450 PARAMETER Experiment Name: At_Far-red-induction_P Parameter: Tissue Value: Whole Plant

SEQ ID NO: 33081 - protein, 220 aa, Arabidopsis thaliana; identical to SEQ ID NO: 21397
  peptide (1)..(220): Ceres Seq. ID no. 12333027
  misc_feature (149)..(215): Homolog of NCBI NO: 11288305 NR Description: hypothetical protein T4C21.10 - Arabidopsis
  misc_feature (1)..(143): Homolog of NCBI NO: 11288305 NR Description: hypothetical protein T4C21.10 - Arabidopsis
  misc_feature (149)..(215): Homolog of NCBI NO: 21554053 NR Description: putative VAMP-associated protein [Arabidopsis
  misc_feature (4)..(143): Homolog of NCBI NO: 21554053 NR Description: putative VAMP-associated protein [Arabidopsis
  misc_feature (149)..(215): Homolog of NCBI NO: 18411661 NR Description: putative protein
  misc_feature (1)..(143): Homolog of NCBI NO: 18411661 NR Description: putative protein
  misc_feature (8)..(219): Homolog of NCBI NO: 37536644 NR Description: putative membrane protein
  misc_feature (5)..(219): Homolog of NCBI NO: 14140121 NR Description: putative vesicle-associated membrane protein
  misc_feature (54)..(220): Homolog of NCBI NO: 28207603 NR Description: putative VAMP-associated protein [Brassica rapa
  misc_feature (1)..(220): Homolog of NCBI NO: 15238034 NR Description: VAMP (vesicle-associated membrane

SEQ ID NO: 33082 - protein, 137 aa, Arabidopsis thaliana; identical to SEQ ID NO: 21398
  peptide (1)..(137): Ceres Seq. ID no. 12333028
  misc_feature (66)..(132): Homolog of NCBI NO: 11288305 NR Description: hypothetical protein T4C21.10 - Arabidopsis
  misc_feature (1)..(60): Homolog of NCBI NO: 11288305 NR Description: hypothetical protein T4C21.10 - Arabidopsis
  misc_feature (66)..(132): Homolog of NCBI NO: 21554053 NR Description: putative VAMP-associated protein [Arabidopsis
  misc_feature (1)..(60): Homolog of NCBI NO: 21554053 NR Description: putative VAMP-associated protein [Arabidopsis
  misc_feature (66)..(132): Homolog of NCBI NO: 18411661 NR Description: putative protein
  misc_feature (1)..(60): Homolog of NCBI NO: 18411661 NR Description: putative protein
  misc_feature (1)..(136): Homolog of NCBI NO: 37536644 NR Description: putative membrane protein
  misc_feature (1)..(136): Homolog of NCBI NO: 14140121 NR Description: putative vesicle-associated membrane protein
  misc_feature (1)..(137): Homolog of NCBI NO: 28207603 NR Description: putative VAMP-associated protein [Brassica rapa
  misc_feature (1)..(137): Homolog of NCBI NO: 15238034 NR Description: VAMP (vesicle-associated membrane

SEQ ID NO: 33083 - DNA, 818 bp, Arabidopsis thaliana; identical to SEQ ID NO: 29493
  misc_feature (1)..(818): Ceres Seq. ID no. 12338666
  misc_feature: MA Experiment ID: 108434 Result: Down-regulated in Transcription
  misc_feature: MA Experiment 108434 PARAMETER Experiment Name: At_Root_Tips_cDNA_P Parameter: Tissue Value: Root Tips
  misc_feature: MA Experiment ID: 108462 Result: Up-regulated in Transcription
  misc_feature: MA Experiment 108462 PARAMETER Experiment Name: At_Germinating_Seeds_cDNA_P Parameter: Age (day) Value: 2 vs. 0
  misc_feature: MA Experiment 108462 PARAMETER Experiment Name: At_Germinating_Seeds_cDNA_P Parameter: Tissue Value: Germinating Seeds
  misc_feature: MA Experiment ID: 108463 Result: Up-regulated in Transcription
  misc_feature: MA Experiment 108463 PARAMETER Experiment Name: At_Germinating_Seeds_cDNA_P Parameter: Age (day) Value: 3 vs. 0
  misc_feature: MA Experiment 108463 PARAMETER Experiment Name: At_Germinating_Seeds_cDNA_P Parameter: Tissue Value: Germinating Seeds
  misc_feature: MA Experiment ID: 108577 Result: Down-regulated in Transcription
  misc_feature: MA Experiment 108577 PARAMETER Experiment Name: At_42deg_Heat_cDNA_P Parameter: Temperature (deg C) Value: 42 vs. 22
  misc_feature: MA Experiment 108577 PARAMETER Experiment Name: At_42deg_Heat_cDNA_P Parameter: Timepoint (hr) Value: 6
  misc_feature: MA Experiment 108577 PARAMETER Experiment Name: At_42deg_Heat_cDNA_P Parameter: Tissue Value: Aerial
  misc_feature: MA Experiment ID: 108579 Result: Down-regulated in Transcription
  misc_feature: MA Experiment 108579 PARAMETER Experiment Name: At_4deg_Cold_cDNA_P Parameter: Temperature (deg C) Value: 4 vs. 22
  misc_feature: MA Experiment 108579 PARAMETER Experiment Name: At_4deg_Cold_cDNA_P Parameter: Timepoint (hr) Value: 6
  misc_feature: MA Experiment 108579 PARAMETER Experiment Name: At_4deg_Cold_cDNA_P Parameter: Tissue Value: Aerial
  misc_feature: MA Experiment ID: 108595 Result: Down-regulated in Transcription
  misc_feature: MA Experiment 108595 PARAMETER Experiment Name: At_Ler-pi_Ovule_cDNA_P Parameter: Plant Line Value: null
  misc_feature: MA Experiment ID: 20000179 Result: Up-regulated in Transcription
  misc_feature: MA Experiment 20000179 PARAMETER Experiment Name: At_Germinating_Seeds_P Parameter: Age (hr) Value: 6 vs. 0
  misc_feature: MA Experiment 20000179 PARAMETER Experiment Name: At_Germinating_Seeds_P Parameter: Tissue Value: Germinating Seeds
  misc_feature: MA Experiment ID: 20000180 Result: Up-regulated in Transcription
  misc_feature: MA Experiment 20000180 PARAMETER Experiment Name: At_Germinating_Seeds_P Parameter: Age (hr) Value: 24 vs. 0
  misc_feature: MA Experiment 20000180 PARAMETER Experiment Name: At_Germinating_Seeds_P Parameter: Tissue Value: Germinating Seeds
  misc_feature: MA Experiment ID: 20000214 Result: Down-regulated in Transcription
  misc_feature: MA Experiment 20000214 PARAMETER Experiment Name: At_4deg_Cold_P Parameter: Timepoint (hr) Value: 6
  misc_feature: MA Experiment ID: 20000224 Result: Down-regulated in Transcription
  misc_feature: MA Experiment ID: 20000227 Result: Down-regulated in Transcription
  misc_feature: MA Experiment 20000227 PARAMETER Experiment Name: At_Root-Tips-vs-Tops_P Parameter: Tissue Value: Root Tips vs. Root Tops
  misc_feature: MA Experiment ID: 20000234 Result: Down-regulated in Transcription
  misc_feature: MA Experiment 20000234 PARAMETER Experiment Name: At_Siliques_P Parameter: Age (day) Value: 21
  misc_feature: MA Experiment 20000234 PARAMETER Experiment Name: At_Siliques_P Parameter: Organism Value: A. thaliana
  misc_feature: MA Experiment 20000234 PARAMETER Experiment Name: At_Siliques_P Parameter: Plant Line Value: WS
  misc_feature: MA Experiment 20000234 PARAMETER Experiment Name: At_Siliques_P Parameter: Tissue Value: Less Than 5mm Siliques vs. Whole Plant
  misc_feature: MA Experiment ID: 20000235 Result: Down-regulated in Transcription
  misc_feature: MA Experiment 20000235 PARAMETER Experiment Name: At_Siliques_P Parameter: Age (day) Value: 21
  misc_feature: MA Experiment 20000235 PARAMETER Experiment Name: At_Siliques_P Parameter: Organism Value: A. thaliana
  misc_feature: MA Experiment 20000235 PARAMETER Experiment Name: At_Siliques_P Parameter: Plant Line Value: WS
  misc_feature: MA Experiment 20000235 PARAMETER Experiment Name: At_Siliques_P Parameter: Tissue Value: 5-10mm Siliques vs. Whole Plant
  misc_feature: MA Experiment ID: 20000264 Result: Down-regulated in Transcription
  misc_feature: MA Experiment 20000264 PARAMETER Experiment Name: At_Open_Flower_P Parameter: Age (day) Value: 21
  misc_feature: MA Experiment 20000264 PARAMETER Experiment Name: At_Open_Flower_P Parameter: Plant Line Value: WS
  misc_feature: MA Experiment 20000264 PARAMETER Experiment Name: At_Open_Flower_P Parameter: Tissue Value: Open Flower vs. Whole Plant
  misc_feature: MA Experiment ID: 20000439 Result: Down-regulated in Transcription
  misc_feature: MA Experiment 20000439 PARAMETER Experiment Name: At_Roots__P Parameter: Age (day) Value: 14 vs. 21
  misc_feature: MA Experiment 20000439 PARAMETER Experiment Name: At_Roots__P Parameter: Organism Value: A. thaliana
  misc_feature: MA Experiment 20000439 PARAMETER Experiment Name: At_Roots__P Parameter: Tissue Value: Roots vs. Whole Plant
  misc_feature: MA Experiment ID: 20001905 Result: Down-regulated in Transcription
  misc_feature: MA Experiment 20001905 PARAMETER Experiment Name: At_Drought_Reproduction_P Parameter: Age (day) Value: 40
  misc_feature: MA Experiment 20001905 PARAMETER Experiment Name: At_Drought_Reproduction_P Parameter: Organism Value: A. thaliana
  misc_feature: MA Experiment 20001905 PARAMETER Experiment Name: At_Drought_Reproduction_P Parameter: Plant Line Value: WS
  misc_feature: MA Experiment 20001905 PARAMETER Experiment Name: At_Drought_Reproduction_P Parameter: Timepoint (day) Value: 10
  misc_feature: MA Experiment 20001905 PARAMETER Experiment Name: At_Drought_Reproduction_P Parameter: Tissue Value: Rosettes
  misc_feature: MA Experiment 20001905 PARAMETER Experiment Name: At_Drought_Reproduction_P Parameter: Treatment Value: Drought vs. No Drought

SEQ ID NO: 33084 - protein, 169 aa, Arabidopsis thaliana; identical to SEQ ID NO: 29494
  peptide (1)..(169): Ceres Seq. ID no. 12338668
  misc_feature (52)..(169): Homolog of NCBI NO: 23306438 NR Description: Unknown protein [Arabidopsis thaliana]
  misc_feature (23)..(169): Homolog of NCBI NO: 21553414 NR Description: unknown [Arabidopsis thaliana]
  misc_feature (23)..(169): Homolog of NCBI NO: 18406916 NR Description: expressed protein

SEQ ID NO: 33085 - protein, 147 aa, Arabidopsis thaliana; identical to SEQ ID NO: 29495
  peptide (1)..(147): Ceres Seq. ID no. 12338669
  misc_feature (30)..(147): Homolog of NCBI NO: 23306438 NR Description: Unknown protein [Arabidopsis thaliana]
  misc_feature (1)..(147): Homolog of NCBI NO: 21553414 NR Description: unknown [Arabidopsis thaliana]
  misc_feature (1)..(147): Homolog of NCBI NO: 18406916 NR Description: expressed protein

SEQ ID NO: 33086 - protein, 118 aa, Arabidopsis thaliana; identical to SEQ ID NO: 29496
  peptide (1)..(118): Ceres Seq. ID no. 12338670
  misc_feature (1)..(118): Homolog of NCBI NO: 23306438 NR Description: Unknown protein [Arabidopsis thaliana]
  misc_feature (1)..(118): Homolog of NCBI NO: 21553414 NR Description: unknown [Arabidopsis thaliana]
  misc_feature (1)..(118): Homolog of NCBI NO: 18406916 NR Description: expressed protein

SEQ ID NO: 33087 - DNA, 1449 bp, Arabidopsis thaliana; identical to SEQ ID NO: 29497
  misc_feature (1)..(1449): Ceres Seq. ID no. 12325319
  misc_feature: MA Experiment ID: 108462 Result: Down-regulated in Transcription
  misc_feature: MA Experiment 108462 PARAMETER Experiment Name: At_Germinating_Seeds_cDNA_P Parameter: Age (day) Value: 2 vs. 0
  misc_feature: MA Experiment 108462 PARAMETER Experiment Name: At_Germinating_Seeds_cDNA_P Parameter: Tissue Value: Germinating Seeds
  misc_feature: MA Experiment ID: 108463 Result: Down-regulated in Transcription
  misc_feature: MA Experiment 108463 PARAMETER Experiment Name: At_Germinating_Seeds_cDNA_P Parameter: Age (day) Value: 3 vs. 0
  misc_feature: MA Experiment 108463 PARAMETER Experiment Name: At_Germinating_Seeds_cDNA_P Parameter: Tissue Value: Germinating Seeds
  misc_feature: MA Experiment ID: 108488 Result: Up-regulated in Transcription
  misc_feature: MA Experiment ID: 108561 Result: Down-regulated in Transcription
  misc_feature: MA Experiment 108561 PARAMETER Experiment Name: At_100uM_ABA_cDNA_P Parameter: Timepoint (hr) Value: 6
  misc_feature: MA Experiment 108561 PARAMETER Experiment Name: At_100uM_ABA_cDNA_P Parameter: Tissue Value: Aerial
  misc_feature: MA Experiment 108561 PARAMETER Experiment Name: At_100uM_ABA_cDNA_P Parameter: Treatment Value: 100uM ABA vs. No Treatment
  misc_feature: MA Experiment ID: 108579 Result: Up-regulated in Transcription
  misc_feature: MA Experiment 108579 PARAMETER Experiment Name: At_4deg_Cold_cDNA_P Parameter: Temperature (deg C) Value: 4 vs. 22
  misc_feature: MA Experiment 108579 PARAMETER Experiment Name: At_4deg_Cold_cDNA_P Parameter: Timepoint (hr) Value: 6
  misc_feature: MA Experiment 108579 PARAMETER Experiment Name: At_4deg_Cold_cDNA_P Parameter: Tissue Value: Aerial
  misc_feature: MA Experiment ID: 108585 Result: Down-regulated in Transcription
  misc_feature: MA Experiment 108585 PARAMETER Experiment Name: At_5mM_NaNP_cDNA_P Parameter: Timepoint (hr) Value: 6
  misc_feature: MA Experiment 108585 PARAMETER Experiment Name: At_5mM_NaNP_cDNA_P Parameter: Tissue Value: Aerial
  misc_feature: MA Experiment 108585 PARAMETER Experiment Name: At_5mM_NaNP_cDNA_P Parameter: Treatment Value: null
  misc_feature: MA Experiment ID: 108595 Result: Down-regulated in Transcription
  misc_feature: MA Experiment 108595 PARAMETER Experiment Name: At_Ler-pi_Ovule_cDNA_P Parameter: Plant Line Value: null
  misc_feature: MA Experiment ID: 108605 Result: Down-regulated in Transcription
  misc_feature: MA Experiment 108605 PARAMETER Experiment Name: At_100uM_ABA_cDNA_P Parameter: Timepoint (hr) Value: 6
  misc_feature: MA Experiment 108605 PARAMETER Experiment Name: At_100uM_ABA_cDNA_P Parameter: Tissue Value: Aerial
  misc_feature: MA Experiment 108605 PARAMETER Experiment Name: At_100uM_ABA_cDNA_P Parameter: Treatment Value: 100uM ABA vs. No Treatment
  misc_feature: MA Experiment ID: 108607 Result: Down-regulated in Transcription
  misc_feature: MA Experiment 108607 PARAMETER Experiment Name: At_100uM_ABA_cDNA_P Parameter: Timepoint (hr) Value: 4
  misc_feature: MA Experiment 108607 PARAMETER Experiment Name: At_100uM_ABA_cDNA_P Parameter: Tissue Value: Aerial
  misc_feature: MA Experiment 108607 PARAMETER Experiment Name: At_100uM_ABA_cDNA_P Parameter: Treatment Value: 100uM ABA vs. No Treatment
  misc_feature: MA Experiment ID: 108668 Result: Down-regulated in Transcription
  misc_feature: MA Experiment 108668 PARAMETER Experiment Name: At_2mM_SA_cDNA_P Parameter: Plant Line Value: WS
  misc_feature: MA Experiment 108668 PARAMETER Experiment Name: At_2mM_SA_cDNA_P Parameter: Timepoint (hr) Value: 6
  misc_feature: MA Experiment 108668 PARAMETER Experiment Name: At_2mM_SA_cDNA_P Parameter: Treatment Value: 2mM SA vs. No Treatment
  misc_feature: MA Experiment ID: 20000070 Result: Down-regulated in Transcription
  misc_feature: MA Experiment 20000070 PARAMETER Experiment Name: At_100uM_ABA_Mutants_cDNA_P Parameter: Plant Line Value: CS24
  misc_feature: MA Experiment 20000070 PARAMETER Experiment Name: At_100uM_ABA_Mutants_cDNA_P Parameter: Timepoint (hr) Value: 6
  misc_feature: MA Experiment 20000070 PARAMETER Experiment Name: At_100uM_ABA_Mutants_cDNA_P Parameter: Tissue Value: Aerial
  misc_feature: MA Experiment 20000070 PARAMETER Experiment Name: At_100uM_ABA_Mutants_cDNA_P Parameter: Treatment Value: 100uM ABA vs. No Treatment
  misc_feature: MA Experiment ID: 20000071 Result: Down-regulated in Transcription
  misc_feature: MA Experiment 20000071 PARAMETER Experiment Name: At_100uM_ABA_Mutants_cDNA_P Parameter: Plant Line Value: CS8104
  misc_feature: MA Experiment 20000071 PARAMETER Experiment Name: At_100uM_ABA_Mutants_cDNA_P Parameter: Timepoint (hr) Value: 6
  misc_feature: MA Experiment 20000071 PARAMETER Experiment Name: At_100uM_ABA_Mutants_cDNA_P Parameter: Tissue Value: Aerial
  misc_feature: MA Experiment 20000071 PARAMETER Experiment Name: At_100uM_ABA_Mutants_cDNA_P Parameter: Treatment Value: 100uM ABA vs. No Treatment
  misc_feature: MA Experiment ID: 20000072 Result: Down-regulated in Transcription
  misc_feature: MA Experiment 20000072 PARAMETER Experiment Name: At_100uM_ABA_Mutants_cDNA_P Parameter: Plant Line Value: CS8105
  misc_feature: MA Experiment 20000072 PARAMETER Experiment Name: At_100uM_ABA_Mutants_cDNA_P Parameter: Timepoint (hr) Value: 6
  misc_feature: MA Experiment 20000072 PARAMETER Experiment Name: At_100uM_ABA_Mutants_cDNA_P Parameter: Tissue Value: Aerial
  misc_feature: MA Experiment 20000072 PARAMETER Experiment Name: At_100uM_ABA_Mutants_cDNA_P Parameter: Treatment Value: 100uM ABA vs. No Treatment
  misc_feature: MA Experiment ID: 20000087 Result: Down-regulated in Transcription
  misc_feature: MA Experiment 20000087 PARAMETER Experiment Name: At_100uM_ABA_Mutants_cDNA_P Parameter: Plant Line Value: WS
  misc_feature: MA Experiment 20000087 PARAMETER Experiment Name: At_100uM_ABA_Mutants_cDNA_P Parameter: Timepoint (hr) Value: 6
  misc_feature: MA Experiment 20000087 PARAMETER Experiment Name: At_100uM_ABA_Mutants_cDNA_P Parameter: Tissue Value: Aerial
  misc_feature: MA Experiment 20000087 PARAMETER Experiment Name: At_100uM_ABA_Mutants_cDNA_P Parameter: Treatment Value: 100uM ABA vs. No Treatment
  misc_feature: MA Experiment ID: 20000117 Result: Down-regulated in Transcription
  misc_feature: MA Experiment 20000117 PARAMETER Experiment Name: At_100uM_ABA_Mutants_cDNA_P Parameter: Plant Line Value: Columbia
  misc_feature: MA Experiment 20000117 PARAMETER Experiment Name: At_100uM_ABA_Mutants_cDNA_P Parameter: Timepoint (hr) Value: 6
  misc_feature: MA Experiment 20000117 PARAMETER Experiment Name: At_100uM_ABA_Mutants_cDNA_P Parameter: Tissue Value: Aerial
  misc_feature: MA Experiment 20000117 PARAMETER Experiment Name: At_100uM_ABA_Mutants_cDNA_P Parameter: Treatment Value: 100uM ABA vs. No Treatment
  misc_feature: MA Experiment ID: 20000169 Result: Down-regulated in Transcription
  misc_feature: MA Experiment 20000169 PARAMETER Experiment Name: At_100uM_ABA_P Parameter: Age (day) Value: 14
  misc_feature: MA Experiment 20000169 PARAMETER Experiment Name: At_100uM_ABA_P Parameter: Organism Value: A. thaliana
  misc_feature: MA Experiment 20000169 PARAMETER Experiment Name: At_100uM_ABA_P Parameter: Plant Line Value: WS
  misc_feature: MA Experiment 20000169 PARAMETER Experiment Name: At_100uM_ABA_P Parameter: Timepoint (hr) Value: 6
  misc_feature: MA Experiment 20000169 PARAMETER Experiment Name: At_100uM_ABA_P Parameter: Tissue Value: Aerial
  misc_feature: MA Experiment 20000169 PARAMETER Experiment Name: At_100uM_ABA_P Parameter: Treatment Value: 100uM ABA vs. No Treatment
  misc_feature: MA Experiment ID: 20000180 Result: Up-regulated in Transcription
  misc_feature: MA Experiment 20000180 PARAMETER Experiment Name: At_Germinating_Seeds_P Parameter: Age (hr) Value: 24 vs. 0
  misc_feature: MA Experiment 20000180 PARAMETER Experiment Name: At_Germinating_Seeds_P Parameter: Tissue Value: Germinating Seeds
  misc_feature: MA Experiment ID: 20000185 Result: Down-regulated in Transcription
  misc_feature: MA Experiment 20000185 PARAMETER Experiment Name: At_Roots__P Parameter: Age (day) Value: 7 vs. 21
  misc_feature: MA Experiment 20000185 PARAMETER Experiment Name: At_Roots__P Parameter: Organism Value: A. thaliana
  misc_feature: MA Experiment 20000185 PARAMETER Experiment Name: At_Roots__P Parameter: Tissue Value: Roots vs. Whole Plant
  misc_feature: MA Experiment ID: 20000224 Result: Up-regulated in Transcription
  misc_feature: MA Experiment ID: 20000234 Result: Up-regulated in Transcription
  misc_feature: MA Experiment 20000234 PARAMETER Experiment Name: At_Siliques_P Parameter: Age (day) Value: 21
  misc_feature: MA Experiment 20000234 PARAMETER Experiment Name: At_Siliques_P Parameter: Organism Value: A. thaliana
  misc_feature: MA Experiment 20000234 PARAMETER Experiment Name: At_Siliques_P Parameter: Plant Line Value: WS
  misc_feature: MA Experiment 20000234 PARAMETER Experiment Name: At_Siliques_P Parameter: Tissue Value: Less Than 5mm Siliques vs. Whole Plant
  misc_feature: MA Experiment ID: 20000436 Result: Down-regulated in Transcription
  misc_feature: MA Experiment 20000436 PARAMETER Experiment Name: At_Drought_P Parameter: Age (day) Value: 7
  misc_feature: MA Experiment 20000436 PARAMETER Experiment Name: At_Drought_P Parameter: Organism Value: A. thaliana
  misc_feature: MA Experiment 20000436 PARAMETER Experiment Name: At_Drought_P Parameter: Plant Line Value: WS
  misc_feature: MA Experiment 20000436 PARAMETER Experiment Name: At_Drought_P Parameter: Timepoint (hr) Value: 12
  misc_feature: MA Experiment 20000436 PARAMETER Experiment Name: At_Drought_P Parameter: Tissue Value: Whole Plant
  misc_feature: MA Experiment 20000436 PARAMETER Experiment Name: At_Drought_P Parameter: Treatment Value: Drought vs. No Drought
  misc_feature: MA Experiment ID: 20000437 Result: Down-regulated in Transcription
  misc_feature: MA Experiment 20000437 PARAMETER Experiment Name: At_Drought_P Parameter: Age (day) Value: 8
  misc_feature: MA Experiment 20000437 PARAMETER Experiment Name: At_Drought_P Parameter: Organism Value: A. thaliana
  misc_feature: MA Experiment 20000437 PARAMETER Experiment Name: At_Drought_P Parameter: Plant Line Value: WS
  misc_feature: MA Experiment 20000437 PARAMETER Experiment Name: At_Drought_P Parameter: Timepoint (hr) Value: 24
  misc_feature: MA Experiment 20000437 PARAMETER Experiment Name: At_Drought_P Parameter: Tissue Value: Whole Plant
  misc_feature: MA Experiment 20000437 PARAMETER Experiment Name: At_Drought_P Parameter: Treatment Value: Drought vs. No Drought
  misc_feature: MA Experiment ID: 20000439 Result: Down-regulated in Transcription
  misc_feature: MA Experiment 20000439 PARAMETER Experiment Name: At_Roots__P Parameter: Age (day) Value: 14 vs. 21
  misc_feature: MA Experiment 20000439 PARAMETER Experiment Name: At_Roots__P Parameter: Organism Value: A. thaliana
  misc_feature: MA Experiment 20000439 PARAMETER Experiment Name: At_Roots__P Parameter: Tissue Value: Roots vs. Whole Plant
  misc_feature: MA Experiment ID: 20001248 Result: Down-regulated in Transcription
  misc_feature: MA Experiment 20001248 PARAMETER Experiment Name: At_Far-red-induction_P Parameter: Age (day) Value: 7
  misc_feature: MA Experiment 20001248 PARAMETER Experiment Name: At_Far-red-induction_P Parameter: Light Value: Far-red vs. White
  misc_feature: MA Experiment 20001248 PARAMETER Experiment Name: At_Far-red-induction_P Parameter: Organism Value: A. thaliana
  misc_feature: MA Experiment 20001248 PARAMETER Experiment Name: At_Far-red-induction_P Parameter: Plant Line Value: Columbia
  misc_feature: MA Experiment 20001248 PARAMETER Experiment Name: At_Far-red-induction_P Parameter: Timepoint (hr) Value: 4
  misc_feature: MA Experiment 20001248 PARAMETER Experiment Name: At_Far-red-induction_P Parameter: Tissue Value: Whole Plant
  misc_feature: MA Experiment ID: 20001450 Result: Down-regulated in Transcription
  misc_feature: MA Experiment 20001450 PARAMETER Experiment Name: At_Far-red-induction_P Parameter: Age (day) Value: 7
  misc_feature: MA Experiment 20001450 PARAMETER Experiment Name: At_Far-red-induction_P Parameter: Light Value: Far-red vs. White
  misc_feature: MA Experiment 20001450 PARAMETER Experiment Name: At_Far-red-induction_P Parameter: Organism Value: A. thaliana
  misc_feature: MA Experiment 20001450 PARAMETER Experiment Name: At_Far-red-induction_P Parameter: Plant Line Value: Columbia
  misc_feature: MA Experiment 20001450 PARAMETER Experiment Name: At_Far-red-induction_P Parameter: Timepoint (hr) Value: 8
  misc_feature: MA Experiment 20001450 PARAMETER Experiment Name: At_Far-red-induction_P Parameter: Tissue Value: Whole Plant
  misc_feature: MA Experiment ID: 20001458 Result: Up-regulated in Transcription
  misc_feature: MA Experiment 20001458 PARAMETER Experiment Name: At_50mM_NH4NO3_L-to-H_P Parameter: Age (day) Value: Undefined
  misc_feature: MA Experiment 20001458 PARAMETER Experiment Name: At_50mM_NH4NO3_L-to-H_P Parameter: Organism Value: Undefined
  misc_feature: MA Experiment 20001458 PARAMETER Experiment Name: At_50mM_NH4NO3_L-to-H_P Parameter: Plant Line Value: Undefined
  misc_feature: MA Experiment 20001458 PARAMETER Experiment Name: At_50mM_NH4NO3_L-to-H_P Parameter: Timepoint (hr) Value: 2
  misc_feature: MA Experiment 20001458 PARAMETER Experiment Name: At_50mM_NH4NO3_L-to-H_P Parameter: Tissue Value: Siliques
  misc_feature: MA Experiment 20001458 PARAMETER Experiment Name: At_50mM_NH4NO3_L-to-H_P Parameter: Treatment Value: 50mM NH4NO3 vs. 100mM Manitol
  misc_feature: MA Experiment ID: 20001560 Result: Up-regulated in Transcription
  misc_feature: MA Experiment 20001560 PARAMETER Experiment Name: At_Drought_Soil_Dry_P Parameter: Age (day) Value: 28
  misc_feature: MA Experiment 20001560 PARAMETER Experiment Name: At_Drought_Soil_Dry_P Parameter: Organism Value: A. thaliana
  misc_feature: MA Experiment 20001560 PARAMETER Experiment Name: At_Drought_Soil_Dry_P Parameter: Plant Line Value: WS
  misc_feature: MA Experiment 20001560 PARAMETER Experiment Name: At_Drought_Soil_Dry_P Parameter: Post Timepoint (hr) Value: None
  misc_feature: MA Experiment 20001560 PARAMETER Experiment Name: At_Drought_Soil_Dry_P Parameter: Post-Treatment Value: None
  misc_feature: MA Experiment 20001560 PARAMETER Experiment Name: At_Drought_Soil_Dry_P Parameter: Timepoint (day) Value: 14
  misc_feature: MA Experiment 20001560 PARAMETER Experiment Name: At_Drought_Soil_Dry_P Parameter: Treatment Value: Drought vs. No Drought
  misc_feature: MA Experiment ID: 20001757 Result: Up-regulated in Transcription
  misc_feature: MA Experiment 20001757 PARAMETER Experiment Name: At_50mM_NH4NO3_L-to-H_P Parameter: Timepoint (hr) Value: 6
  misc_feature: MA Experiment 20001757 PARAMETER Experiment Name: At_50mM_NH4NO3_L-to-H_P Parameter: Tissue Value: Leaf
  misc_feature: MA Experiment 20001757 PARAMETER Experiment Name: At_50mM_NH4NO3_L-to-H_P Parameter: Treatment Value: 50mM NH4NO3 vs 100mM Mannitol

SEQ ID NO: 33088 - protein, 329 aa, Arabidopsis thaliana; identical to SEQ ID NO: 29498
  peptide (1)..(329): Ceres Seq. ID no. 12325320
  misc_feature (221)..(292): Pfam Name: RNA recognition motif. (a.k.a. RRM, RBD, or RNP domain) Pfam Description: RNA recognition motif. (a.k.a. RRM, RBD, or RNP
  misc_feature (4)..(298): Homolog of NCBI NO: 7446358 NR Description: cp31AHv protein - barley
  misc_feature (4)..(298): Homolog of NCBI NO: 7446356 NR Description: Ps16 protein - wheat
  misc_feature (69)..(329): Homolog of NCBI NO: 34394882 NR Description: putative RNA-binding protein
  misc_feature (17)..(329): Homolog of NCBI NO: 7446339 NR Description: probable RNA-binding protein cp33 precursor -
  misc_feature (30)..(283): Homolog of NCBI NO: 100376 NR Description: ribonucleoprotein precursor - common tobacco
  misc_feature (3)..(329): Homolog of NCBI NO: 133249 NR Description: 33 kDa ribonucleoprotein, chloroplast precursor
  misc_feature (1)..(329): Homolog of NCBI NO: 7446342 NR Description: RNA-binding protein precursor, 33K - wood tobacco
  misc_feature (9)..(329): Homolog of NCBI NO: 681912 NR Description: cp33 [Arabidopsis thaliana]
  misc_feature (1)..(329): Homolog of NCBI NO: 17064758 NR Description: ubiquitin / ribosomal protein CEP52 [Arabidopsis
  misc_feature (1)..(329): Homolog of NCBI NO: 15231200 NR Description: chloroplast RNA-binding protein cp33

SEQ ID NO: 33089 - protein, 166 aa, Arabidopsis thaliana; identical to SEQ ID NO: 29499
  peptide (1)..(166): Ceres Seq. ID no. 12325321
  misc_feature (58)..(129): Pfam Name: RNA recognition motif. (a.k.a. RRM, RBD, or RNP domain) Pfam Description: RNA recognition motif. (a.k.a. RRM, RBD, or RNP
  misc_feature (1)..(135): Homolog of NCBI NO: 7446358 NR Description: cp31AHv protein - barley
  misc_feature (1)..(135): Homolog of NCBI NO: 7446356 NR Description: Ps16 protein - wheat
  misc_feature (1)..(166): Homolog of NCBI NO: 34394882 NR Description: putative RNA-binding protein
  misc_feature (1)..(166): Homolog of NCBI NO: 7446339 NR Description: probable RNA-binding protein cp33 precursor -
  misc_feature (1)..(120): Homolog of NCBI NO: 100376 NR Description: ribonucleoprotein precursor - common tobacco
  misc_feature (1)..(166): Homolog of NCBI NO: 133249 NR Description: 33 kDa ribonucleoprotein, chloroplast precursor
  misc_feature (1)..(166): Homolog of NCBI NO: 7446342 NR Description: RNA-binding protein precursor, 33K - wood tobacco
  misc_feature (1)..(166): Homolog of NCBI NO: 681912 NR Description: cp33 [Arabidopsis thaliana]
  misc_feature (1)..(166): Homolog of NCBI NO: 17064758 NR Description: ubiquitin / ribosomal protein CEP52 [Arabidopsis
  misc_feature (1)..(166): Homolog of NCBI NO: 15231200 NR Description: chloroplast RNA-binding protein cp33

SEQ ID NO: 33090 - DNA, 836 bp, Arabidopsis thaliana; identical to SEQ ID NO: 29500
  misc_feature (1)..(836): Ceres Seq. ID no. 12738757
  misc_feature: MA Experiment ID: 108434 Result: Up-regulated in Transcription
  misc_feature: MA Experiment 108434 PARAMETER Experiment Name: At_Root_Tips_cDNA_P Parameter: Tissue Value: Root Tips
  misc_feature: MA Experiment ID: 108595 Result: Down-regulated in Transcription
  misc_feature: MA Experiment 108595 PARAMETER Experiment Name: At_Ler-pi_Ovule_cDNA_P Parameter: Plant Line Value: null
  misc_feature: MA Experiment ID: 20000179 Result: Up-regulated in Transcription
  misc_feature: MA Experiment 20000179 PARAMETER Experiment Name: At_Germinating_Seeds_P Parameter: Age (hr) Value: 6 vs. 0
  misc_feature: MA Experiment 20000179 PARAMETER Experiment Name: At_Germinating_Seeds_P Parameter: Tissue Value: Germinating Seeds
  misc_feature: MA Experiment ID: 20000180 Result: Up-regulated in Transcription
  misc_feature: MA Experiment 20000180 PARAMETER Experiment Name: At_Germinating_Seeds_P Parameter: Age (hr) Value: 24 vs. 0
  misc_feature: MA Experiment 20000180 PARAMETER Experiment Name: At_Germinating_Seeds_P Parameter: Tissue Value: Germinating Seeds

SEQ ID NO: 33091 - protein, 201 aa, Arabidopsis thaliana; identical to SEQ ID NO: 29501
  peptide (1)..(201): Ceres Seq. ID no. 12738758
  misc_feature (30)..(174): Pfam Name: Clathrin adaptor complex small chain Pfam Description: Clathrin adaptor complex small chain
  misc_feature (26)..(200): Homolog of NCBI NO: 7259352 NR Description: nonclathrin coat protein zeta1-COP [Lycopersicon
  misc_feature (26)..(185): Homolog of NCBI NO: 6681338 NR Description: putative coatomer zeta subunit (zeta-coat
  misc_feature (26)..(201): Homolog of NCBI NO: 30681014 NR Description: coatomer zeta subunit (zeta-coat protein)
  misc_feature (23)..(201): Homolog of NCBI NO: 7259346 NR Description: nonclathrin coat protein zeta1-COP [Brassica rapa]
  misc_feature (21)..(201): Homolog of NCBI NO: 18491175 NR Description: putative coatomer protein [Arabidopsis thaliana]
  misc_feature (21)..(201): Homolog of NCBI NO: 18413126 NR Description: putative coatomer protein
  misc_feature (21)..(201): Homolog of NCBI NO: 21553419 NR Description: putative coatomer protein [Arabidopsis thaliana]

SEQ ID NO: 33092 - protein, 181 aa, Arabidopsis thaliana; identical to SEQ ID NO: 29502
  peptide (1)..(181): Ceres Seq. ID no. 12738759
  misc_feature (10)..(154): Pfam Name: Clathrin adaptor complex small chain Pfam Description: Clathrin adaptor complex small chain
  misc_feature (6)..(180): Homolog of NCBI NO: 7259352 NR Description: nonclathrin coat protein zeta1-COP [Lycopersicon
  misc_feature (6)..(165): Homolog of NCBI NO: 6681338 NR Description: putative coatomer zeta subunit (zeta-coat
  misc_feature (6)..(181): Homolog of NCBI NO: 30681014 NR Description: coatomer zeta subunit (zeta-coat protein)
  misc_feature (3)..(181): Homolog of NCBI NO: 7259346 NR Description: nonclathrin coat protein zeta1-COP [Brassica rapa]
  misc_feature (1)..(181): Homolog of NCBI NO: 18491175 NR Description: putative coatomer protein [Arabidopsis thaliana]
  misc_feature (1)..(181): Homolog of NCBI NO: 18413126 NR Description: putative coatomer protein
  misc_feature (1)..(181): Homolog of NCBI NO: 21553419 NR Description: putative coatomer protein [Arabidopsis thaliana]

SEQ ID NO: 33093 - DNA, 607 bp, Arabidopsis thaliana; identical to SEQ ID NO: 29503
  misc_feature (1)..(607): Ceres Seq. ID no. 12333324
  misc_feature: MA Experiment ID: 20001451 Result: Up-regulated in Transcription
  misc_feature: MA Experiment 20001451 PARAMETER Experiment Name: At_Far-red-induction_P Parameter: Age (day) Value: 7
  misc_feature: MA Experiment 20001451 PARAMETER Experiment Name: At_Far-red-induction_P Parameter: Light Value: Far-red vs. White
  misc_feature: MA Experiment 20001451 PARAMETER Experiment Name: At_Far-red-induction_P Parameter: Organism Value: A. thaliana
  misc_feature: MA Experiment 20001451 PARAMETER Experiment Name: At_Far-red-induction_P Parameter: Plant Line Value: Columbia
  misc_feature: MA Experiment 20001451 PARAMETER Experiment Name: At_Far-red-induction_P Parameter: Timepoint (hr) Value: 24
  misc_feature: MA Experiment 20001451 PARAMETER Experiment Name: At_Far-red-induction_P Parameter: Tissue Value: Whole Plant

SEQ ID NO: 33094 - protein, 153 aa, Arabidopsis thaliana; identical to SEQ ID NO: 29504
  peptide (1)..(153): Ceres Seq. ID no. 12333325
  misc_feature (3)..(137): Homolog of NCBI NO: 21537271 NR Description: putative thioredoxin-like U5 small
  misc_feature (3)..(137): Homolog of NCBI NO: 15241574 NR Description: putative protein
  misc_feature (3)..(137): Homolog of NCBI NO: 37535532 NR Description: putative thioredoxin-like U5 small
  misc_feature (3)..(153): Homolog of NCBI NO: 28316734 NR Description: RIKEN cDNA D530025J19 gene
  misc_feature (3)..(153): Homolog of NCBI NO: 27659170 NR Description: similar to hypothetical protein FLJ20511
  misc_feature (3)..(153): Homolog of NCBI NO: 8923475 NR Description: hypothetical protein FLJ20511 [Homo sapiens]
  misc_feature (1)..(153): Homolog of NCBI NO: 15230169 NR Description: hypothetical protein; protein id: At3g24730.1

SEQ ID NO: 33095 - protein, 151 aa, Arabidopsis thaliana; identical to SEQ ID NO: 29505
  peptide (1)..(151): Ceres Seq. ID no. 12333326
  misc_feature (1)..(135): Homolog of NCBI NO: 21537271 NR Description: putative thioredoxin-like U5 small
  misc_feature (1)..(135): Homolog of NCBI NO: 15241574 NR Description: putative protein
  misc_feature (1)..(135): Homolog of NCBI NO: 37535532 NR Description: putative thioredoxin-like U5 small
  misc_feature (1)..(151): Homolog of NCBI NO: 28316734 NR Description: RIKEN cDNA D530025J19 gene
  misc_feature (1)..(151): Homolog of NCBI NO: 27659170 NR Description: similar to hypothetical protein FLJ20511
  misc_feature (1)..(151): Homolog of NCBI NO: 8923475 NR Description: hypothetical protein FLJ20511 [Homo sapiens]
  misc_feature (1)..(151): Homolog of NCBI NO: 15230169 NR Description: hypothetical protein; protein id: At3g24730.1

SEQ ID NO: 33096 - DNA, 628 bp, Arabidopsis thaliana; identical to SEQ ID NO: 29506
  misc_feature (1)..(628): Ceres Seq. ID no. 12420685
  misc_feature: MA Experiment ID: 20000173 Result: Down-regulated in Transcription
  misc_feature: MA Experiment 20000173 PARAMETER Experiment Name: At_42deg_Heat_P Parameter: Age (day) Value: 14
  misc_feature: MA Experiment 20000173 PARAMETER Experiment Name: At_42deg_Heat_P Parameter: Organism Value: A. thaliana
  misc_feature: MA Experiment 20000173 PARAMETER Experiment Name: At_42deg_Heat_P Parameter: Plant Line Value: WS
  misc_feature: MA Experiment 20000173 PARAMETER Experiment Name: At_42deg_Heat_P Parameter: Temperature (deg C) Value: 42 vs. 22
  misc_feature: MA Experiment 20000173 PARAMETER Experiment Name: At_42deg_Heat_P Parameter: Timepoint (hr) Value: 6
  misc_feature: MA Experiment 20000173 PARAMETER Experiment Name: At_42deg_Heat_P Parameter: Tissue Value: Aerial
  misc_feature: MA Experiment ID: 20000180 Result: Down-regulated in Transcription
  misc_feature: MA Experiment 20000180 PARAMETER Experiment Name: At_Germinating_Seeds_P Parameter: Age (hr) Value: 24 vs. 0
  misc_feature: MA Experiment 20000180 PARAMETER Experiment Name: At_Germinating_Seeds_P Parameter: Tissue Value: Germinating Seeds
  misc_feature: MA Experiment ID: 20000224 Result: Down-regulated in Transcription

SEQ ID NO: 33097 - protein, 131 aa, Arabidopsis thaliana; identical to SEQ ID NO: 29507
  peptide (1)..(131): Ceres Seq. ID no. 12420686
  misc_feature (48)..(115): Homolog of NCBI NO: 10176748 NR Description: gene_id:K18I23.16~pir||T02500~similar to unknown
  misc_feature (48)..(128): Homolog of NCBI NO: 30680897 NR Description: expressed protein [Arabidopsis thaliana]
  misc_feature (48)..(128): Homolog of NCBI NO: 28393833 NR Description: unknown protein [Arabidopsis thaliana]
  misc_feature (1)..(131): Homolog of NCBI NO: 7452461 NR Description: hypothetical protein At2g38450 [imported] -
  misc_feature (27)..(131): Homolog of NCBI NO: 18404754 NR Description: expressed protein
  misc_feature (27)..(131): Homolog of NCBI NO: 21553434 NR Description: unknown [Arabidopsis thaliana]

SEQ ID NO: 33098 - protein, 105 aa, Arabidopsis thaliana; identical to SEQ ID NO: 29508
  peptide (1)..(105): Ceres Seq. ID no. 12420687
  misc_feature (22)..(89): Homolog of NCBI NO: 10176748 NR Description: gene_id:K18I23.16~pir||T02500~similar to unknown
  misc_feature (22)..(102): Homolog of NCBI NO: 30680897 NR Description: expressed protein [Arabidopsis thaliana]
  misc_feature (22)..(102): Homolog of NCBI NO: 28393833 NR Description: unknown protein [Arabidopsis thaliana]
  misc_feature (1)..(105): Homolog of NCBI NO: 7452461 NR Description: hypothetical protein At2g38450 [imported] -
  misc_feature (1)..(105): Homolog of NCBI NO: 18404754 NR Description: expressed protein
  misc_feature (1)..(105): Homolog of NCBI NO: 21553434 NR Description: unknown [Arabidopsis thaliana]

SEQ ID NO: 33099 - DNA, 1110 bp, Arabidopsis thaliana; identical to SEQ ID NO: 29509
  misc_feature (1)..(1110): Ceres Seq. ID no. 13491279
  misc_feature: MA Experiment ID: 108488 Result: Down-regulated in Transcription
  misc_feature: MA Experiment ID: 108561 Result: Up-regulated in Transcription
  misc_feature: MA Experiment 108561 PARAMETER Experiment Name: At_100uM_ABA_cDNA_P Parameter: Timepoint (hr) Value: 6
  misc_feature: MA Experiment 108561 PARAMETER Experiment Name: At_100uM_ABA_cDNA_P Parameter: Tissue Value: Aerial
  misc_feature: MA Experiment 108561 PARAMETER Experiment Name: At_100uM_ABA_cDNA_P Parameter: Treatment Value: 100uM ABA vs. No Treatment
  misc_feature: MA Experiment ID: 108573 Result: Up-regulated in Transcription
  misc_feature: MA Experiment 108573 PARAMETER Experiment Name: At_Drought_cDNA_P Parameter: Timepoint (hr) Value: 6
  misc_feature: MA Experiment 108573 PARAMETER Experiment Name: At_Drought_cDNA_P Parameter: Tissue Value: Aerial
  misc_feature: MA Experiment 108573 PARAMETER Experiment Name: At_Drought_cDNA_P Parameter: Treatment Value: Drought vs. No Drought
  misc_feature: MA Experiment ID: 108585 Result: Up-regulated in Transcription
  misc_feature: MA Experiment 108585 PARAMETER Experiment Name: At_5mM_NaNP_cDNA_P Parameter: Timepoint (hr) Value: 6
  misc_feature: MA Experiment 108585 PARAMETER Experiment Name: At_5mM_NaNP_cDNA_P Parameter: Tissue Value: Aerial
  misc_feature: MA Experiment 108585 PARAMETER Experiment Name: At_5mM_NaNP_cDNA_P Parameter: Treatment Value: null
  misc_feature: MA Experiment ID: 108609 Result: Up-regulated in Transcription
  misc_feature: MA Experiment 108609 PARAMETER Experiment Name: At_100uM_ABA_cDNA_P Parameter: Timepoint (hr) Value: 24
  misc_feature: MA Experiment 108609 PARAMETER Experiment Name: At_100uM_ABA_cDNA_P Parameter: Tissue Value: Aerial
  misc_feature: MA Experiment 108609 PARAMETER Experiment Name: At_100uM_ABA_cDNA_P Parameter: Treatment Value: 100uM ABA vs. No Treatment
  misc_feature: MA Experiment ID: 20000069 Result: Up-regulated in Transcription
  misc_feature: MA Experiment 20000069 PARAMETER Experiment Name: At_100uM_ABA_Mutants_cDNA_P Parameter: Plant Line Value: CS23
  misc_feature: MA Experiment 20000069 PARAMETER Experiment Name: At_100uM_ABA_Mutants_cDNA_P Parameter: Timepoint (hr) Value: 6
  misc_feature: MA Experiment 20000069 PARAMETER Experiment Name: At_100uM_ABA_Mutants_cDNA_P Parameter: Tissue Value: Aerial
  misc_feature: MA Experiment 20000069 PARAMETER Experiment Name: At_100uM_ABA_Mutants_cDNA_P Parameter: Treatment Value: 100uM ABA vs. No Treatment
  misc_feature: MA Experiment ID: 20000087 Result: Up-regulated in Transcription
  misc_feature: MA Experiment 20000087 PARAMETER Experiment Name: At_100uM_ABA_Mutants_cDNA_P Parameter: Plant Line Value: WS
  misc_feature: MA Experiment 20000087 PARAMETER Experiment Name: At_100uM_ABA_Mutants_cDNA_P Parameter: Timepoint (hr) Value: 6
  misc_feature: MA Experiment 20000087 PARAMETER Experiment Name: At_100uM_ABA_Mutants_cDNA_P Parameter: Tissue Value: Aerial
  misc_feature: MA Experiment 20000087 PARAMETER Experiment Name: At_100uM_ABA_Mutants_cDNA_P Parameter: Treatment Value: 100uM ABA vs. No Treatment
  misc_feature: MA Experiment ID: 20000112 Result: Up-regulated in Transcription
  misc_feature: MA Experiment 20000112 PARAMETER Experiment Name: At_42deg_Heat_cDNA_P Parameter: Temperature (deg C) Value: 42 vs. 22
  misc_feature: MA Experiment 20000112 PARAMETER Experiment Name: At_42deg_Heat_cDNA_P Parameter: Timepoint (hr) Value: 2
  misc_feature: MA Experiment 20000112 PARAMETER Experiment Name: At_42deg_Heat_cDNA_P Parameter: Tissue Value: Aerial
  misc_feature: MA Experiment ID: 20000113 Result: Up-regulated in Transcription
  misc_feature: MA Experiment 20000113 PARAMETER Experiment Name: At_42deg_Heat_cDNA_P Parameter: Temperature (deg C) Value: 42 vs. 22
  misc_feature: MA Experiment 20000113 PARAMETER Experiment Name: At_42deg_Heat_cDNA_P Parameter: Timepoint (hr) Value: 8
  misc_feature: MA Experiment 20000113 PARAMETER Experiment Name: At_42deg_Heat_cDNA_P Parameter: Tissue Value: Aerial
  misc_feature: MA Experiment ID: 20000117 Result: Up-regulated in Transcription
  misc_feature: MA Experiment 20000117 PARAMETER Experiment Name: At_100uM_ABA_Mutants_cDNA_P Parameter: Plant Line Value: Columbia
  misc_feature: MA Experiment 20000117 PARAMETER Experiment Name: At_100uM_ABA_Mutants_cDNA_P Parameter: Timepoint (hr) Value: 6
  misc_feature: MA Experiment 20000117 PARAMETER Experiment Name: At_100uM_ABA_Mutants_cDNA_P Parameter: Tissue Value: Aerial
  misc_feature: MA Experiment 20000117 PARAMETER Experiment Name: At_100uM_ABA_Mutants_cDNA_P Parameter: Treatment Value: 100uM ABA vs. No Treatment
  misc_feature: MA Experiment ID: 20000173 Result: Up-regulated in Transcription
  misc_feature: MA Experiment 20000173 PARAMETER Experiment Name: At_42deg_Heat_P Parameter: Age (day) Value: 14
  misc_feature: MA Experiment 20000173 PARAMETER Experiment Name: At_42deg_Heat_P Parameter: Organism Value: A. thaliana
  misc_feature: MA Experiment 20000173 PARAMETER Experiment Name: At_42deg_Heat_P Parameter: Plant Line Value: WS
  misc_feature: MA Experiment 20000173 PARAMETER Experiment Name: At_42deg_Heat_P Parameter: Temperature (deg C) Value: 42 vs. 22
  misc_feature: MA Experiment 20000173 PARAMETER Experiment Name: At_42deg_Heat_P Parameter: Timepoint (hr) Value: 6
  misc_feature: MA Experiment 20000173 PARAMETER Experiment Name: At_42deg_Heat_P Parameter: Tissue Value: Aerial
  misc_feature: MA Experiment ID: 20000185 Result: Up-regulated in Transcription
  misc_feature: MA Experiment 20000185 PARAMETER Experiment Name: At_Roots__P Parameter: Age (day) Value: 7 vs. 21
  misc_feature: MA Experiment 20000185 PARAMETER Experiment Name: At_Roots__P Parameter: Organism Value: A. thaliana
  misc_feature: MA Experiment 20000185 PARAMETER Experiment Name: At_Roots__P Parameter: Tissue Value: Roots vs. Whole Plant
  misc_feature: MA Experiment ID: 20000264 Result: Up-regulated in Transcription
  misc_feature: MA Experiment 20000264 PARAMETER Experiment Name: At_Open_Flower_P Parameter: Age (day) Value: 21
  misc_feature: MA Experiment 20000264 PARAMETER Experiment Name: At_Open_Flower_P Parameter: Plant Line Value: WS
  misc_feature: MA Experiment 20000264 PARAMETER Experiment Name: At_Open_Flower_P Parameter: Tissue Value: Open Flower vs. Whole Plant
  misc_feature: MA Experiment ID: 20000286 Result: Up-regulated in Transcription
  misc_feature: MA Experiment 20000286 PARAMETER Experiment Name: At_Open_Flower_P Parameter: Age (day) Value: 21
  misc_feature: MA Experiment 20000286 PARAMETER Experiment Name: At_Open_Flower_P Parameter: Plant Line Value: WS
  misc_feature: MA Experiment 20000286 PARAMETER Experiment Name: At_Open_Flower_P Parameter: Tissue Value: Half Open vs. Whole Plant
  misc_feature: MA Experiment ID: 20000437 Result: Up-regulated in Transcription
  misc_feature: MA Experiment 20000437 PARAMETER Experiment Name: At_Drought_P Parameter: Age (day) Value: 8
  misc_feature: MA Experiment 20000437 PARAMETER Experiment Name: At_Drought_P Parameter: Organism Value: A. thaliana
  misc_feature: MA Experiment 20000437 PARAMETER Experiment Name: At_Drought_P Parameter: Plant Line Value: WS
  misc_feature: MA Experiment 20000437 PARAMETER Experiment Name: At_Drought_P Parameter: Timepoint (hr) Value: 24
  misc_feature: MA Experiment 20000437 PARAMETER Experiment Name: At_Drought_P Parameter: Tissue Value: Whole Plant
  misc_feature: MA Experiment 20000437 PARAMETER Experiment Name: At_Drought_P Parameter: Treatment Value: Drought vs. No Drought
  misc_feature: MA Experiment ID: 20000439 Result: Up-regulated in Transcription
  misc_feature: MA Experiment 20000439 PARAMETER Experiment Name: At_Roots__P Parameter: Age (day) Value: 14 vs. 21
  misc_feature: MA Experiment 20000439 PARAMETER Experiment Name: At_Roots__P Parameter: Organism Value: A. thaliana
  misc_feature: MA Experiment 20000439 PARAMETER Experiment Name: At_Roots__P Parameter: Tissue Value: Roots vs. Whole Plant
  misc_feature: MA Experiment ID: 20000453 Result: Up-regulated in Transcription
  misc_feature: MA Experiment 20000453 PARAMETER Experiment Name: At_100uM_ABA_P Parameter: Age (day) Value: 15
  misc_feature: MA Experiment 20000453 PARAMETER Experiment Name: At_100uM_ABA_P Parameter: Organism Value: A. thaliana
  misc_feature: MA Experiment 20000453 PARAMETER Experiment Name: At_100uM_ABA_P Parameter: Plant Line Value: WS
  misc_feature: MA Experiment 20000453 PARAMETER Experiment Name: At_100uM_ABA_P Parameter: Timepoint (hr) Value: 24
  misc_feature: MA Experiment 20000453 PARAMETER Experiment Name: At_100uM_ABA_P Parameter: Tissue Value: Aerial
  misc_feature: MA Experiment 20000453 PARAMETER Experiment Name: At_100uM_ABA_P Parameter: Treatment Value: 100uM ABA vs. No Treatment
  misc_feature: MA Experiment ID: 20000527 Result: Down-regulated in Transcription
  misc_feature: MA Experiment 20000527 PARAMETER Experiment Name: At_10percent_PEG_P Parameter: Age (day) Value: 20
  misc_feature: MA Experiment 20000527 PARAMETER Experiment Name: At_10percent_PEG_P Parameter: Organism Value: A. thaliana
  misc_feature: MA Experiment 20000527 PARAMETER Experiment Name: At_10percent_PEG_P Parameter: Plant Line Value: WS
  misc_feature: MA Experiment 20000527 PARAMETER Experiment Name: At_10percent_PEG_P Parameter: Timepoint (day) Value: 20
  misc_feature: MA Experiment 20000527 PARAMETER Experiment Name: At_10percent_PEG_P Parameter: Tissue Value: Whole Plant
  misc_feature: MA Experiment 20000527 PARAMETER Experiment Name: At_10percent_PEG_P Parameter: Treatment Value: 10percent PEG vs. No Treatment
  misc_feature: MA Experiment ID: 20000794 Result: Up-regulated in Transcription
  misc_feature: MA Experiment 20000794 PARAMETER Experiment Name: At_Petals_P Parameter: Age (day) Value: 23-25 days
  misc_feature: MA Experiment 20000794 PARAMETER Experiment Name: At_Petals_P Parameter: Plant Line Value: WS
  misc_feature: MA Experiment 20000794 PARAMETER Experiment Name: At_Petals_P Parameter: Tissue Value: Petals vs. Whole plant
  misc_feature: MA Experiment ID: 20001905 Result: Up-regulated in Transcription
  misc_feature: MA Experiment 20001905 PARAMETER Experiment Name: At_Drought_Reproduction_P Parameter: Age (day) Value: 40
  misc_feature: MA Experiment 20001905 PARAMETER Experiment Name: At_Drought_Reproduction_P Parameter: Organism Value: A. thaliana
  misc_feature: MA Experiment 20001905 PARAMETER Experiment Name: At_Drought_Reproduction_P Parameter: Plant Line Value: WS
  misc_feature: MA Experiment 20001905 PARAMETER Experiment Name: At_Drought_Reproduction_P Parameter: Timepoint (day) Value: 10
  misc_feature: MA Experiment 20001905 PARAMETER Experiment Name: At_Drought_Reproduction_P Parameter: Tissue Value: Rosettes
  misc_feature: MA Experiment 20001905 PARAMETER Experiment Name: At_Drought_Reproduction_P Parameter: Treatment Value: Drought vs. No Drought
  misc_feature: MA Experiment ID: 20001908 Result: Up-regulated in Transcription
  misc_feature: MA Experiment 20001908 PARAMETER Experiment Name: At_Drought_Reproduction_P Parameter: Age (day) Value: 40
  misc_feature: MA Experiment 20001908 PARAMETER Experiment Name: At_Drought_Reproduction_P Parameter: Organism Value: A. thaliana
  misc_feature: MA Experiment 20001908 PARAMETER Experiment Name: At_Drought_Reproduction_P Parameter: Plant Line Value: WS
  misc_feature: MA Experiment 20001908 PARAMETER Experiment Name: At_Drought_Reproduction_P Parameter: Timepoint (day) Value: 10
  misc_feature: MA Experiment 20001908 PARAMETER Experiment Name: At_Drought_Reproduction_P Parameter: Tissue Value: Siliques
  misc_feature: MA Experiment 20001908 PARAMETER Experiment Name: At_Drought_Reproduction_P Parameter: Treatment Value: Drought vs. No Drought

SEQ ID NO: 33100 - protein, 285 aa, Arabidopsis thaliana; identical to SEQ ID NO: 29510
  peptide (1)..(285): Ceres Seq. ID no. 13491280
  misc_feature (69)..(133): Pfam Name: 2Fe-2S iron-sulfur cluster binding domain Pfam Description: 2Fe-2S iron-sulfur cluster binding domain
  misc_feature (7)..(283): Homolog of NCBI NO: 3851612 NR Description: succinate dehydrogenase Ip subunit [Gallus gallus]
  misc_feature (7)..(284): Homolog of NCBI NO: 4803711 NR Description: iron sulfur subunit of succinate dehydrogenase
  misc_feature (24)..(284): Homolog of NCBI NO: 5688947 NR Description: succinate dehydrogenase iron-protein subunit
  misc_feature (24)..(284): Homolog of NCBI NO: 28611029 NR Description: succinate dehydrogenase [Triticum aestivum]
  misc_feature (7)..(285): Homolog of NCBI NO: 12049600 NR Description: mitochondrial succinate dehydrogenase
  misc_feature (7)..(285): Homolog of NCBI NO: 15237464 NR Description: succinate dehydrogenase, iron-sulphur subunit,
  misc_feature (7)..(285): Homolog of NCBI NO: 21593098 NR Description: succinate dehydrogenase iron-protein subunit-like
  misc_feature (7)..(285): Homolog of NCBI NO: 21555840 NR Description: succinate dehydrogenase iron-protein subunit,
  misc_feature (7)..(285): Homolog of NCBI NO: 12049598 NR Description: mitochondrial succinate dehydrogenase
  misc_feature (7)..(285): Homolog of NCBI NO: 15232149 NR Description: succinate dehydrogenase, iron-sulphur subunit,

SEQ ID NO: 33101 - protein, 279 aa, Arabidopsis thaliana; identical to SEQ ID NO: 29511
  peptide (1)..(279): Ceres Seq. ID no. 13491281
  misc_feature (63)..(127): Pfam Name: 2Fe-2S iron-sulfur cluster binding domain Pfam Description: 2Fe-2S iron-sulfur cluster binding domain
  misc_feature (1)..(277): Homolog of NCBI NO: 3851612 NR Description: succinate dehydrogenase Ip subunit [Gallus gallus]
  misc_feature (1)..(278): Homolog of NCBI NO: 4803711 NR Description: iron sulfur subunit of succinate dehydrogenase
  misc_feature (18)..(278): Homolog of NCBI NO: 5688947 NR Description: succinate dehydrogenase iron-protein subunit
  misc_feature (18)..(278): Homolog of NCBI NO: 28611029 NR Description: succinate dehydrogenase [Triticum aestivum]
  misc_feature (1)..(279): Homolog of NCBI NO: 12049600 NR Description: mitochondrial succinate dehydrogenase
  misc_feature (1)..(279): Homolog of NCBI NO: 15237464 NR Description: succinate dehydrogenase, iron-sulphur subunit,
  misc_feature (1)..(279): Homolog of NCBI NO: 21593098 NR Description: succinate dehydrogenase iron-protein subunit-like
  misc_feature (1)..(279): Homolog of NCBI NO: 21555840 NR Description: succinate dehydrogenase iron-protein subunit,
  misc_feature (1)..(279): Homolog of NCBI NO: 12049598 NR Description: mitochondrial succinate dehydrogenase
  misc_feature (1)..(279): Homolog of NCBI NO: 15232149 NR Description: succinate dehydrogenase, iron-sulphur subunit,

SEQ ID NO: 33102 - protein, 200 aa, Arabidopsis thaliana; identical to SEQ ID NO: 29512
  peptide (1)..(200): Ceres Seq. ID no. 13491282
  misc_feature (1)..(48): Pfam Name: 2Fe-2S iron-sulfur cluster binding domain Pfam Description: 2Fe-2S iron-sulfur cluster binding domain
  misc_feature (1)..(198): Homolog of NCBI NO: 3851612 NR Description: succinate dehydrogenase Ip subunit [Gallus gallus]
  misc_feature (1)..(199): Homolog of NCBI NO: 4803711 NR Description: iron sulfur subunit of succinate dehydrogenase
  misc_feature (1)..(199): Homolog of NCBI NO: 5688947 NR Description: succinate dehydrogenase iron-protein subunit
  misc_feature (1)..(199): Homolog of NCBI NO: 28611029 NR Description: succinate dehydrogenase [Triticum aestivum]
  misc_feature (1)..(200): Homolog of NCBI NO: 12049600 NR Description: mitochondrial succinate dehydrogenase
  misc_feature (1)..(200): Homolog of NCBI NO: 15237464 NR Description: succinate dehydrogenase, iron-sulphur subunit,
  misc_feature (1)..(200): Homolog of NCBI NO: 21593098 NR Description: succinate dehydrogenase iron-protein subunit-like
  misc_feature (1)..(200): Homolog of NCBI NO: 21555840 NR Description: succinate dehydrogenase iron-protein subunit,
  misc_feature (1)..(200): Homolog of NCBI NO: 12049598 NR Description: mitochondrial succinate dehydrogenase
  misc_feature (1)..(200): Homolog of NCBI NO: 15232149 NR Description: succinate dehydrogenase, iron-sulphur subunit,

SEQ ID NO: 33103 - DNA, 998 bp, Arabidopsis thaliana; identical to SEQ ID NO: 29513
  misc_feature (1)..(998): Ceres Seq. ID no. 12389197
  misc_feature: MA Experiment ID: 108461 Result: Up-regulated in Transcription
  misc_feature: MA Experiment 108461 PARAMETER Experiment Name: At_Germinating_Seeds_cDNA_P Parameter: Age (day) Value: 1 vs. 0
  misc_feature: MA Experiment 108461 PARAMETER Experiment Name: At_Germinating_Seeds_cDNA_P Parameter: Tissue Value: Germinating Seeds
  misc_feature: MA Experiment ID: 108463 Result: Up-regulated in Transcription
  misc_feature: MA Experiment 108463 PARAMETER Experiment Name: At_Germinating_Seeds_cDNA_P Parameter: Age (day) Value: 3 vs. 0
  misc_feature: MA Experiment 108463 PARAMETER Experiment Name: At_Germinating_Seeds_cDNA_P Parameter: Tissue Value: Germinating Seeds
  misc_feature: MA Experiment ID: 108585 Result: Down-regulated in Transcription
  misc_feature: MA Experiment 108585 PARAMETER Experiment Name: At_5mM_NaNP_cDNA_P Parameter: Timepoint (hr) Value: 6
  misc_feature: MA Experiment 108585 PARAMETER Experiment Name: At_5mM_NaNP_cDNA_P Parameter: Tissue Value: Aerial
  misc_feature: MA Experiment 108585 PARAMETER Experiment Name: At_5mM_NaNP_cDNA_P Parameter: Treatment Value: null
  misc_feature: MA Experiment ID: 20001905 Result: Down-regulated in Transcription
  misc_feature: MA Experiment 20001905 PARAMETER Experiment Name: At_Drought_Reproduction_P Parameter: Age (day) Value: 40
  misc_feature: MA Experiment 20001905 PARAMETER Experiment Name: At_Drought_Reproduction_P Parameter: Organism Value: A. thaliana
  misc_feature: MA Experiment 20001905 PARAMETER Experiment Name: At_Drought_Reproduction_P Parameter: Plant Line Value: WS
  misc_feature: MA Experiment 20001905 PARAMETER Experiment Name: At_Drought_Reproduction_P Parameter: Timepoint (day) Value: 10
  misc_feature: MA Experiment 20001905 PARAMETER Experiment Name: At_Drought_Reproduction_P Parameter: Tissue Value: Rosettes
  misc_feature: MA Experiment 20001905 PARAMETER Experiment Name: At_Drought_Reproduction_P Parameter: Treatment Value: Drought vs. No Drought

SEQ ID NO: 33104 - protein, 267 aa, Arabidopsis thaliana; identical to SEQ ID NO: 29514
  peptide (1)..(267): Ceres Seq. ID no. 12389198
  misc_feature (20)..(183): Pfam Name: Metallo-beta-lactamase superfamily Pfam Description: Metallo-beta-lactamase superfamily
  misc_feature (10)..(265): Homolog of NCBI NO: 29841459 NR Description: similar to probable hydroxyacylglutathione
  misc_feature (3)..(266): Homolog of NCBI NO: 24667703 NR Description: CG4365-PC [Drosophila melanogaster]
  misc_feature (3)..(266): Homolog of NCBI NO: 24667711 NR Description: CG4365-PB [Drosophila melanogaster]
  misc_feature (3)..(266): Homolog of NCBI NO: 21356335 NR Description: CG4365-PA [Drosophila melanogaster]
  misc_feature (10)..(266): Homolog of NCBI NO: 2494848 NR Description: Hydroxyacylglutathione hydrolase (Glyoxalase II)
  misc_feature (10)..(266): Homolog of NCBI NO: 4885389 NR Description: hydroxyacyl glutathione hydrolase
  misc_feature (10)..(266): Homolog of NCBI NO: 15375320 NR Description: hydroxyacyl glutathione hydrolase
  misc_feature (10)..(266): Homolog of NCBI NO: 21729786 NR Description: hydroxyacyl glutathione hydrolase
  misc_feature (10)..(267): Homolog of NCBI NO: 2570342 NR Description: glyoxalase II cytoplasmic isozyme [Arabidopsis
  misc_feature (10)..(267): Homolog of NCBI NO: 15228389 NR Description: glyoxalase II (hydroxyacylglutathione

SEQ ID NO: 33105 - protein, 258 aa, Arabidopsis thaliana; identical to SEQ ID NO: 29515
  peptide (1)..(258): Ceres Seq. ID no. 12389199
  misc_feature (11)..(174): Pfam Name: Metallo-beta-lactamase superfamily Pfam Description: Metallo-beta-lactamase superfamily
  misc_feature (1)..(256): Homolog of NCBI NO: 29841459 NR Description: similar to probable hydroxyacylglutathione
  misc_feature (1)..(257): Homolog of NCBI NO: 24667711 NR Description: CG4365-PB [Drosophila melanogaster]
  misc_feature (1)..(257): Homolog of NCBI NO: 24667703 NR Description: CG4365-PC [Drosophila melanogaster]
  misc_feature (1)..(257): Homolog of NCBI NO: 21356335 NR Description: CG4365-PA [Drosophila melanogaster]
  misc_feature (1)..(257): Homolog of NCBI NO: 2494848 NR Description: Hydroxyacylglutathione hydrolase (Glyoxalase II)
  misc_feature (1)..(257): Homolog of NCBI NO: 4885389 NR Description: hydroxyacyl glutathione hydrolase
  misc_feature (1)..(257): Homolog of NCBI NO: 15375320 NR Description: hydroxyacyl glutathione hydrolase
  misc_feature (1)..(257): Homolog of NCBI NO: 21729786 NR Description: hydroxyacyl glutathione hydrolase
  misc_feature (1)..(258): Homolog of NCBI NO: 2570342 NR Description: glyoxalase II cytoplasmic isozyme [Arabidopsis
  misc_feature (1)..(258): Homolog of NCBI NO: 15228389 NR Description: glyoxalase II (hydroxyacylglutathione

SEQ ID NO: 33106 - DNA, 843 bp, Arabidopsis thaliana; identical to SEQ ID NO: 29516
  misc_feature (1)..(843): Ceres Seq. ID no. 13496878
  misc_feature: MA Experiment ID: 108435 Result: Up-regulated in Transcription
  misc_feature: MA Experiment 108435 PARAMETER Experiment Name: At_stm_Mutants_cDNA_P Parameter: Plant Line Value: wt Landsburg vs stm
  misc_feature: MA Experiment 108435 PARAMETER Experiment Name: At_stm_Mutants_cDNA_P Parameter: Tissue Value: Shoot Apical Meristem Region
  misc_feature: MA Experiment ID: 108461 Result: Down-regulated in Transcription
  misc_feature: MA Experiment 108461 PARAMETER Experiment Name: At_Germinating_Seeds_cDNA_P Parameter: Age (day) Value: 1 vs. 0
  misc_feature: MA Experiment 108461 PARAMETER Experiment Name: At_Germinating_Seeds_cDNA_P Parameter: Tissue Value: Germinating Seeds
  misc_feature: MA Experiment ID: 108462 Result: Down-regulated in Transcription
  misc_feature: MA Experiment 108462 PARAMETER Experiment Name: At_Germinating_Seeds_cDNA_P Parameter: Age (day) Value: 2 vs. 0
  misc_feature: MA Experiment 108462 PARAMETER Experiment Name: At_Germinating_Seeds_cDNA_P Parameter: Tissue Value: Germinating Seeds
  misc_feature: MA Experiment ID: 108463 Result: Down-regulated in Transcription
  misc_feature: MA Experiment 108463 PARAMETER Experiment Name: At_Germinating_Seeds_cDNA_P Parameter: Age (day) Value: 3 vs. 0
  misc_feature: MA Experiment 108463 PARAMETER Experiment Name: At_Germinating_Seeds_cDNA_P Parameter: Tissue Value: Germinating Seeds
  misc_feature: MA Experiment ID: 108594 Result: Up-regulated in Transcription
  misc_feature: MA Experiment 108594 PARAMETER Experiment Name: At_Ler-rhl_Root_cDNA_P Parameter: Plant Line Value: null
  misc_feature: MA Experiment ID: 108668 Result: Up-regulated in Transcription
  misc_feature: MA Experiment 108668 PARAMETER Experiment Name: At_2mM_SA_cDNA_P Parameter: Plant Line Value: WS
  misc_feature: MA Experiment 108668 PARAMETER Experiment Name: At_2mM_SA_cDNA_P Parameter: Timepoint (hr) Value: 6
  misc_feature: MA Experiment 108668 PARAMETER Experiment Name: At_2mM_SA_cDNA_P Parameter: Treatment Value: 2mM SA vs. No Treatment
  misc_feature: MA Experiment ID: 20000182 Result: Up-regulated in Transcription
  misc_feature: MA Experiment 20000182 PARAMETER Experiment Name: At_2mM_SA_P Parameter: Age (day) Value: 14
  misc_feature: MA Experiment 20000182 PARAMETER Experiment Name: At_2mM_SA_P Parameter: Organism Value: A. thaliana
  misc_feature: MA Experiment 20000182 PARAMETER Experiment Name: At_2mM_SA_P Parameter: Plant Line Value: WS
  misc_feature: MA Experiment 20000182 PARAMETER Experiment Name: At_2mM_SA_P Parameter: Timepoint (hr) Value: 6
  misc_feature: MA Experiment 20000182 PARAMETER Experiment Name: At_2mM_SA_P Parameter: Tissue Value: Aerial
  misc_feature: MA Experiment 20000182 PARAMETER Experiment Name: At_2mM_SA_P Parameter: Treatment Value: 2mM SA vs. No Treatment
  misc_feature: MA Experiment ID: 20000184 Result: Down-regulated in Transcription
  misc_feature: MA Experiment 20000184 PARAMETER Experiment Name: At_Shoots__P Parameter: Age (day) Value: 7
  misc_feature: MA Experiment 20000184 PARAMETER Experiment Name: At_Shoots__P Parameter: Tissue Value: Shoots vs. Whole Plant
  misc_feature: MA Experiment ID: 20000234 Result: Up-regulated in Transcription
  misc_feature: MA Experiment 20000234 PARAMETER Experiment Name: At_Siliques_P Parameter: Age (day) Value: 21
  misc_feature: MA Experiment 20000234 PARAMETER Experiment Name: At_Siliques_P Parameter: Organism Value: A. thaliana
  misc_feature: MA Experiment 20000234 PARAMETER Experiment Name: At_Siliques_P Parameter: Plant Line Value: WS
  misc_feature: MA Experiment 20000234 PARAMETER Experiment Name: At_Siliques_P Parameter: Tissue Value: Less Than 5mm Siliques vs. Whole Plant
  misc_feature: MA Experiment ID: 20000264 Result: Up-regulated in Transcription
  misc_feature: MA Experiment 20000264 PARAMETER Experiment Name: At_Open_Flower_P Parameter: Age (day) Value: 21
  misc_feature: MA Experiment 20000264 PARAMETER Experiment Name: At_Open_Flower_P Parameter: Plant Line Value: WS
  misc_feature: MA Experiment 20000264 PARAMETER Experiment Name: At_Open_Flower_P Parameter: Tissue Value: Open Flower vs. Whole Plant
  misc_feature: MA Experiment ID: 20000265 Result: Up-regulated in Transcription
  misc_feature: MA Experiment 20000265 PARAMETER Experiment Name: At_Open_Flower_P Parameter: Age (day) Value: 21
  misc_feature: MA Experiment 20000265 PARAMETER Experiment Name: At_Open_Flower_P Parameter: Plant Line Value: WS
  misc_feature: MA Experiment 20000265 PARAMETER Experiment Name: At_Open_Flower_P Parameter: Tissue Value: Closed Flower vs. Whole Plant
  misc_feature: MA Experiment ID: 20000286 Result: Up-regulated in Transcription
  misc_feature: MA Experiment 20000286 PARAMETER Experiment Name: At_Open_Flower_P Parameter: Age (day) Value: 21
  misc_feature: MA Experiment 20000286 PARAMETER Experiment Name: At_Open_Flower_P Parameter: Plant Line Value: WS
  misc_feature: MA Experiment 20000286 PARAMETER Experiment Name: At_Open_Flower_P Parameter: Tissue Value: Half Open vs. Whole Plant
  misc_feature: MA Experiment ID: 20000794 Result: Up-regulated in Transcription
  misc_feature: MA Experiment 20000794 PARAMETER Experiment Name: At_Petals_P Parameter: Age (day) Value: 23-25 days
  misc_feature: MA Experiment 20000794 PARAMETER Experiment Name: At_Petals_P Parameter: Plant Line Value: WS
  misc_feature: MA Experiment 20000794 PARAMETER Experiment Name: At_Petals_P Parameter: Tissue Value: Petals vs. Whole plant

SEQ ID NO: 33107 - protein, 213 aa, Arabidopsis thaliana; identical to SEQ ID NO: 29517
  peptide (1)..(213): Ceres Seq. ID no. 13496879
  misc_feature (58)..(203): Pfam Name: Cupin Pfam Description: Cupin
  misc_feature (8)..(213): Homolog of NCBI NO: 34904670 NR Description: putative germin protein [Oryza sativa (japonica
  misc_feature (23)..(213): Homolog of NCBI NO: 15228673 NR Description: germin-like protein (GLP10) [Arabidopsis
  misc_feature (23)..(213): Homolog of NCBI NO: 1934730 NR Description: germin-like protein [Arabidopsis thaliana]
  misc_feature (8)..(213): Homolog of NCBI NO: 18203442 NR Description: Rhicadhesin receptor precursor (Germin-like
  misc_feature (1)..(213): Homolog of NCBI NO: 15217561 NR Description: germin-like protein (GLP4) (GLP5) [Arabidopsis
  misc_feature (4)..(213): Homolog of NCBI NO: 21592538 NR Description: germin-like protein [Arabidopsis thaliana]
  misc_feature (1)..(213): Homolog of NCBI NO: 15230582 NR Description: germin-like protein (GLP8) [Arabidopsis thaliana]
  misc_feature (4)..(213): Homolog of NCBI NO: 7447332 NR Description: germin homolog F21E10.2 - Arabidopsis thaliana
  misc_feature (1)..(213): Homolog of NCBI NO: 21553437 NR Description: nectarin-like protein [Arabidopsis thaliana]
  misc_feature (1)..(213): Homolog of NCBI NO: 30690288 NR Description: germin-like protein, putative [Arabidopsis

SEQ ID NO: 33108 - protein, 200 aa, Arabidopsis thaliana; identical to SEQ ID NO: 29518
  peptide (1)..(200): Ceres Seq. ID no. 13496880
  misc_feature (45)..(190): Pfam Name: Cupin Pfam Description: Cupin
  misc_feature (1)..(200): Homolog of NCBI NO: 34904670 NR Description: putative germin protein [Oryza sativa (japonica
  misc_feature (10)..(200): Homolog of NCBI NO: 15228673 NR Description: germin-like protein (GLP10) [Arabidopsis
  misc_feature (10)..(200): Homolog of NCBI NO: 1934730 NR Description: germin-like protein [Arabidopsis thaliana]
  misc_feature (1)..(200): Homolog of NCBI NO: 18203442 NR Description: Rhicadhesin receptor precursor (Germin-like
  misc_feature (1)..(200): Homolog of NCBI NO: 15217561 NR Description: germin-like protein (GLP4) (GLP5) [Arabidopsis
  misc_feature (1)..(200): Homolog of NCBI NO: 21592538 NR Description: germin-like protein [Arabidopsis thaliana]
  misc_feature (1)..(200): Homolog of NCBI NO: 15230582 NR Description: germin-like protein (GLP8) [Arabidopsis thaliana]
  misc_feature (1)..(200): Homolog of NCBI NO: 7447332 NR Description: germin homolog F21E10.2 - Arabidopsis thaliana
  misc_feature (1)..(200): Homolog of NCBI NO: 21553437 NR Description: nectarin-like protein [Arabidopsis thaliana]
  misc_feature (1)..(200): Homolog of NCBI NO: 30690288 NR Description: germin-like protein, putative [Arabidopsis

SEQ ID NO: 33109 - protein, 195 aa, Arabidopsis thaliana; identical to SEQ ID NO: 29519
  peptide (1)..(195): Ceres Seq. ID no. 13496881
  misc_feature (40)..(185): Pfam Name: Cupin Pfam Description: Cupin
  misc_feature (1)..(195): Homolog of NCBI NO: 34904670 NR Description: putative germin protein [Oryza sativa (japonica
  misc_feature (5)..(195): Homolog of NCBI NO: 15228673 NR Description: germin-like protein (GLP10) [Arabidopsis
  misc_feature (5)..(195): Homolog of NCBI NO: 1934730 NR Description: germin-like protein [Arabidopsis thaliana]
  misc_feature (1)..(195): Homolog of NCBI NO: 18203442 NR Description: Rhicadhesin receptor precursor (Germin-like
  misc_feature (1)..(195): Homolog of NCBI NO: 15217561 NR Description: germin-like protein (GLP4) (GLP5) [Arabidopsis
  misc_feature (1)..(195): Homolog of NCBI NO: 21592538 NR Description: germin-like protein [Arabidopsis thaliana]
  misc_feature (1)..(195): Homolog of NCBI NO: 15230582 NR Description: germin-like protein (GLP8) [Arabidopsis thaliana]
  misc_feature (1)..(195): Homolog of NCBI NO: 7447332 NR Description: germin homolog F21E10.2 - Arabidopsis thaliana
  misc_feature (1)..(195): Homolog of NCBI NO: 21553437 NR Description: nectarin-like protein [Arabidopsis thaliana]
  misc_feature (1)..(195): Homolog of NCBI NO: 30690288 NR Description: germin-like protein, putative [Arabidopsis

SEQ ID NO: 33110 - DNA, 980 bp, Arabidopsis thaliana; identical to SEQ ID NO: 29520
  misc_feature (1)..(980): Ceres Seq. ID no. 13499491
  misc_feature: MA Experiment ID: 108501 Result: Down-regulated in Transcription
  misc_feature: MA Experiment 108501 PARAMETER Experiment Name: At_ap2_floral_buds_cDNA_P Parameter: Plant Line Value: ap2 (Ler.)
  misc_feature: MA Experiment 108501 PARAMETER Experiment Name: At_ap2_floral_buds_cDNA_P Parameter: Tissue Value: Closed Flower
  misc_feature: MA Experiment ID: 108573 Result: Up-regulated in Transcription
  misc_feature: MA Experiment 108573 PARAMETER Experiment Name: At_Drought_cDNA_P Parameter: Timepoint (hr) Value: 6
  misc_feature: MA Experiment 108573 PARAMETER Experiment Name: At_Drought_cDNA_P Parameter: Tissue Value: Aerial
  misc_feature: MA Experiment 108573 PARAMETER Experiment Name: At_Drought_cDNA_P Parameter: Treatment Value: Drought vs. No Drought
  misc_feature: MA Experiment ID: 108595 Result: Up-regulated in Transcription
  misc_feature: MA Experiment 108595 PARAMETER Experiment Name: At_Ler-pi_Ovule_cDNA_P Parameter: Plant Line Value: null
  misc_feature: MA Experiment ID: 20000112 Result: Up-regulated in Transcription
  misc_feature: MA Experiment 20000112 PARAMETER Experiment Name: At_42deg_Heat_cDNA_P Parameter: Temperature (deg C) Value: 42 vs. 22
  misc_feature: MA Experiment 20000112 PARAMETER Experiment Name: At_42deg_Heat_cDNA_P Parameter: Timepoint (hr) Value: 2
  misc_feature: MA Experiment 20000112 PARAMETER Experiment Name: At_42deg_Heat_cDNA_P Parameter: Tissue Value: Aerial
  misc_feature: MA Experiment ID: 20000113 Result: Up-regulated in Transcription
  misc_feature: MA Experiment 20000113 PARAMETER Experiment Name: At_42deg_Heat_cDNA_P Parameter: Temperature (deg C) Value: 42 vs. 22
  misc_feature: MA Experiment 20000113 PARAMETER Experiment Name: At_42deg_Heat_cDNA_P Parameter: Timepoint (hr) Value: 8
  misc_feature: MA Experiment 20000113 PARAMETER Experiment Name: At_42deg_Heat_cDNA_P Parameter: Tissue Value: Aerial
  misc_feature: MA Experiment ID: 20000173 Result: Up-regulated in Transcription
  misc_feature: MA Experiment 20000173 PARAMETER Experiment Name: At_42deg_Heat_P Parameter: Age (day) Value: 14
  misc_feature: MA Experiment 20000173 PARAMETER Experiment Name: At_42deg_Heat_P Parameter: Organism Value: A. thaliana
  misc_feature: MA Experiment 20000173 PARAMETER Experiment Name: At_42deg_Heat_P Parameter: Plant Line Value: WS
  misc_feature: MA Experiment 20000173 PARAMETER Experiment Name: At_42deg_Heat_P Parameter: Temperature (deg C) Value: 42 vs. 22
  misc_feature: MA Experiment 20000173 PARAMETER Experiment Name: At_42deg_Heat_P Parameter: Timepoint (hr) Value: 6
  misc_feature: MA Experiment 20000173 PARAMETER Experiment Name: At_42deg_Heat_P Parameter: Tissue Value: Aerial
  misc_feature: MA Experiment ID: 20000214 Result: Down-regulated in Transcription
  misc_feature: MA Experiment 20000214 PARAMETER Experiment Name: At_4deg_Cold_P Parameter: Timepoint (hr) Value: 6
  misc_feature: MA Experiment ID: 20000224 Result: Down-regulated in Transcription
  misc_feature: MA Experiment ID: 20000234 Result: Down-regulated in Transcription
  misc_feature: MA Experiment 20000234 PARAMETER Experiment Name: At_Siliques_P Parameter: Age (day) Value: 21
  misc_feature: MA Experiment 20000234 PARAMETER Experiment Name: At_Siliques_P Parameter: Organism Value: A. thaliana
  misc_feature: MA Experiment 20000234 PARAMETER Experiment Name: At_Siliques_P Parameter: Plant Line Value: WS
  misc_feature: MA Experiment 20000234 PARAMETER Experiment Name: At_Siliques_P Parameter: Tissue Value: Less Than 5mm Siliques vs. Whole Plant
  misc_feature: MA Experiment ID: 20001247 Result: Up-regulated in Transcription
  misc_feature: MA Experiment 20001247 PARAMETER Experiment Name: At_Far-red-induction_P Parameter: Age (day) Value: 7
  misc_feature: MA Experiment 20001247 PARAMETER Experiment Name: At_Far-red-induction_P Parameter: Light Value: Far-red vs. White
  misc_feature: MA Experiment 20001247 PARAMETER Experiment Name: At_Far-red-induction_P Parameter: Organism Value: A. thaliana
  misc_feature: MA Experiment 20001247 PARAMETER Experiment Name: At_Far-red-induction_P Parameter: Plant Line Value: Columbia
  misc_feature: MA Experiment 20001247 PARAMETER Experiment Name: At_Far-red-induction_P Parameter: Timepoint (hr) Value: 1
  misc_feature: MA Experiment 20001247 PARAMETER Experiment Name: At_Far-red-induction_P Parameter: Tissue Value: Whole Plant
  misc_feature: MA Experiment ID: 20001557 Result: Down-regulated in Transcription
  misc_feature: MA Experiment 20001557 PARAMETER Experiment Name: At_Drought_Soil_Dry_P Parameter: Age (day) Value: 27
  misc_feature: MA Experiment 20001557 PARAMETER Experiment Name: At_Drought_Soil_Dry_P Parameter: Organism Value: A. thaliana
  misc_feature: MA Experiment 20001557 PARAMETER Experiment Name: At_Drought_Soil_Dry_P Parameter: Plant Line Value: WS
  misc_feature: MA Experiment 20001557 PARAMETER Experiment Name: At_Drought_Soil_Dry_P Parameter: Post Timepoint (hr) Value: 3
  misc_feature: MA Experiment 20001557 PARAMETER Experiment Name: At_Drought_Soil_Dry_P Parameter: Post-Treatment Value: Re-Water vs. No Drought
  misc_feature: MA Experiment 20001557 PARAMETER Experiment Name: At_Drought_Soil_Dry_P Parameter: Timepoint (day) Value: 13
  misc_feature: MA Experiment 20001557 PARAMETER Experiment Name: At_Drought_Soil_Dry_P Parameter: Treatment Value: Drought vs. No Drought
  misc_feature: MA Experiment ID: 20001911 Result: Up-regulated in Transcription
  misc_feature: MA Experiment 20001911 PARAMETER Experiment Name: At_Drought_Reproduction_P Parameter: Age (day) Value: 40
  misc_feature: MA Experiment 20001911 PARAMETER Experiment Name: At_Drought_Reproduction_P Parameter: Organism Value: A. thaliana
  misc_feature: MA Experiment 20001911 PARAMETER Experiment Name: At_Drought_Reproduction_P Parameter: Plant Line Value: WS
  misc_feature: MA Experiment 20001911 PARAMETER Experiment Name: At_Drought_Reproduction_P Parameter: Timepoint (day) Value: 10
  misc_feature: MA Experiment 20001911 PARAMETER Experiment Name: At_Drought_Reproduction_P Parameter: Tissue Value: Flowers
  misc_feature: MA Experiment 20001911 PARAMETER Experiment Name: At_Drought_Reproduction_P Parameter: Treatment Value: Drought vs. No Drought

SEQ ID NO: 33111 - protein, 269 aa, Arabidopsis thaliana; identical to SEQ ID NO: 29521
  peptide (1)..(269): Ceres Seq. ID no. 13499492
  misc_feature (81)..(123): Pfam Name: Zinc finger, C3HC4 type (RING finger) Pfam Description: Zinc finger, C3HC4 type (RING finger)
  misc_feature (78)..(244): Homolog of NCBI NO: 21361954 NR Description: hypothetical protein DKFZp564A022 [Homo sapiens]
  misc_feature (72)..(254): Homolog of NCBI NO: 28376707 NR Description: unknown protein [Oryza sativa (japonica
  misc_feature (74)..(244): Homolog of NCBI NO: 18395127 NR Description: zinc finger (C3HC4-type RING finger) protein
  misc_feature (74)..(244): Homolog of NCBI NO: 21554064 NR Description: unknown [Arabidopsis thaliana]
  misc_feature (74)..(244): Homolog of NCBI NO: 18410010 NR Description: zinc finger (C3HC4-type RING finger) protein
  misc_feature (189)..(264): Homolog of NCBI NO: 7485612 NR Description: hypothetical protein F17I5.130 - Arabidopsis
  misc_feature (8)..(167): Homolog of NCBI NO: 7485612 NR Description: hypothetical protein F17I5.130 - Arabidopsis
  misc_feature (19)..(269): Homolog of NCBI NO: 26453304 NR Description: unknown protein [Arabidopsis thaliana]
  misc_feature (8)..(269): Homolog of NCBI NO: 21553438 NR Description: unknown [Arabidopsis thaliana]
  misc_feature (8)..(269): Homolog of NCBI NO: 18418331 NR Description: zinc finger (C3HC4-type RING finger) protein

SEQ ID NO: 33112 - protein, 262 aa, Arabidopsis thaliana; identical to SEQ ID NO: 29522
  peptide (1)..(262): Ceres Seq. ID no. 13499493
  misc_feature (74)..(116): Pfam Name: Zinc finger, C3HC4 type (RING finger) Pfam Description: Zinc finger, C3HC4 type (RING finger)
  misc_feature (71)..(237): Homolog of NCBI NO: 21361954 NR Description: hypothetical protein DKFZp564A022 [Homo sapiens]
  misc_feature (65)..(247): Homolog of NCBI NO: 28376707 NR Description: unknown protein [Oryza sativa (japonica
  misc_feature (67)..(237): Homolog of NCBI NO: 18395127 NR Description: zinc finger (C3HC4-type RING finger) protein
  misc_feature (67)..(237): Homolog of NCBI NO: 21554064 NR Description: unknown [Arabidopsis thaliana]
  misc_feature (67)..(237): Homolog of NCBI NO: 18410010 NR Description: zinc finger (C3HC4-type RING finger) protein
  misc_feature (182)..(257): Homolog of NCBI NO: 7485612 NR Description: hypothetical protein F17I5.130 - Arabidopsis
  misc_feature (1)..(160): Homolog of NCBI NO: 7485612 NR Description: hypothetical protein F17I5.130 - Arabidopsis
  misc_feature (12)..(262): Homolog of NCBI NO: 26453304 NR Description: unknown protein [Arabidopsis thaliana]
  misc_feature (1)..(262): Homolog of NCBI NO: 21553438 NR Description: unknown [Arabidopsis thaliana]
  misc_feature (1)..(262): Homolog of NCBI NO: 18418331 NR Description: zinc finger (C3HC4-type RING finger) protein

SEQ ID NO: 33113 - protein, 249 aa, Arabidopsis thaliana; identical to SEQ ID NO: 29523
  peptide (1)..(249): Ceres Seq. ID no. 13499494
  misc_feature (61)..(103): Pfam Name: Zinc finger, C3HC4 type (RING finger) Pfam Description: Zinc finger, C3HC4 type (RING finger)
  misc_feature (58)..(224): Homolog of NCBI NO: 21361954 NR Description: hypothetical protein DKFZp564A022 [Homo sapiens]
  misc_feature (52)..(234): Homolog of NCBI NO: 28376707 NR Description: unknown protein [Oryza sativa (japonica
  misc_feature (54)..(224): Homolog of NCBI NO: 18395127 NR Description: zinc finger (C3HC4-type RING finger) protein
  misc_feature (54)..(224): Homolog of NCBI NO: 21554064 NR Description: unknown [Arabidopsis thaliana]
  misc_feature (54)..(224): Homolog of NCBI NO: 18410010 NR Description: zinc finger (C3HC4-type RING finger) protein
  misc_feature (169)..(244): Homolog of NCBI NO: 7485612 NR Description: hypothetical protein F17I5.130 - Arabidopsis
  misc_feature (1)..(147): Homolog of NCBI NO: 7485612 NR Description: hypothetical protein F17I5.130 - Arabidopsis
  misc_feature (1)..(249): Homolog of NCBI NO: 26453304 NR Description: unknown protein [Arabidopsis thaliana]
  misc_feature (1)..(249): Homolog of NCBI NO: 21553438 NR Description: unknown [Arabidopsis thaliana]
  misc_feature (1)..(249): Homolog of NCBI NO: 18418331 NR Description: zinc finger (C3HC4-type RING finger) protein

SEQ ID NO: 33114 - DNA, 787 bp, Arabidopsis thaliana; identical to SEQ ID NO: 29524
  misc_feature (1)..(787): Ceres Seq. ID no. 13580358
  misc_feature: MA Experiment ID: 20000180 Result: Down-regulated in Transcription
  misc_feature: MA Experiment 20000180 PARAMETER Experiment Name: At_Germinating_Seeds_P Parameter: Age (hr) Value: 24 vs. 0
  misc_feature: MA Experiment 20000180 PARAMETER Experiment Name: At_Germinating_Seeds_P Parameter: Tissue Value: Germinating Seeds
  misc_feature: MA Experiment ID: 20000227 Result: Up-regulated in Transcription
  misc_feature: MA Experiment 20000227 PARAMETER Experiment Name: At_Root-Tips-vs-Tops_P Parameter: Tissue Value: Root Tips vs. Root Tops
  misc_feature: MA Experiment ID: 20000234 Result: Up-regulated in Transcription
  misc_feature: MA Experiment 20000234 PARAMETER Experiment Name: At_Siliques_P Parameter: Age (day) Value: 21
  misc_feature: MA Experiment 20000234 PARAMETER Experiment Name: At_Siliques_P Parameter: Organism Value: A. thaliana
  misc_feature: MA Experiment 20000234 PARAMETER Experiment Name: At_Siliques_P Parameter: Plant Line Value: WS
  misc_feature: MA Experiment 20000234 PARAMETER Experiment Name: At_Siliques_P Parameter: Tissue Value: Less Than 5mm Siliques vs. Whole Plant
  misc_feature: MA Experiment ID: 20000794 Result: Down-regulated in Transcription
  misc_feature: MA Experiment 20000794 PARAMETER Experiment Name: At_Petals_P Parameter: Age (day) Value: 23-25 days
  misc_feature: MA Experiment 20000794 PARAMETER Experiment Name: At_Petals_P Parameter: Plant Line Value: WS
  misc_feature: MA Experiment 20000794 PARAMETER Experiment Name: At_Petals_P Parameter: Tissue Value: Petals vs. Whole plant
  misc_feature: MA Experiment ID: 20001451 Result: Down-regulated in Transcription
  misc_feature: MA Experiment 20001451 PARAMETER Experiment Name: At_Far-red-induction_P Parameter: Age (day) Value: 7
  misc_feature: MA Experiment 20001451 PARAMETER Experiment Name: At_Far-red-induction_P Parameter: Light Value: Far-red vs. White
  misc_feature: MA Experiment 20001451 PARAMETER Experiment Name: At_Far-red-induction_P Parameter: Organism Value: A. thaliana
  misc_feature: MA Experiment 20001451 PARAMETER Experiment Name: At_Far-red-induction_P Parameter: Plant Line Value: Columbia
  misc_feature: MA Experiment 20001451 PARAMETER Experiment Name: At_Far-red-induction_P Parameter: Timepoint (hr) Value: 24
  misc_feature: MA Experiment 20001451 PARAMETER Experiment Name: At_Far-red-induction_P Parameter: Tissue Value: Whole Plant
  misc_feature: MA Experiment ID: 20001557 Result: Up-regulated in Transcription
  misc_feature: MA Experiment 20001557 PARAMETER Experiment Name: At_Drought_Soil_Dry_P Parameter: Age (day) Value: 27
  misc_feature: MA Experiment 20001557 PARAMETER Experiment Name: At_Drought_Soil_Dry_P Parameter: Organism Value: A. thaliana
  misc_feature: MA Experiment 20001557 PARAMETER Experiment Name: At_Drought_Soil_Dry_P Parameter: Plant Line Value: WS
  misc_feature: MA Experiment 20001557 PARAMETER Experiment Name: At_Drought_Soil_Dry_P Parameter: Post Timepoint (hr) Value: 3
  misc_feature: MA Experiment 20001557 PARAMETER Experiment Name: At_Drought_Soil_Dry_P Parameter: Post-Treatment Value: Re-Water vs. No Drought
  misc_feature: MA Experiment 20001557 PARAMETER Experiment Name: At_Drought_Soil_Dry_P Parameter: Timepoint (day) Value: 13
  misc_feature: MA Experiment 20001557 PARAMETER Experiment Name: At_Drought_Soil_Dry_P Parameter: Treatment Value: Drought vs. No Drought
  misc_feature: MA Experiment ID: 20001558 Result: Up-regulated in Transcription
  misc_feature: MA Experiment 20001558 PARAMETER Experiment Name: At_Drought_Soil_Dry_P Parameter: Age (day) Value: 27
  misc_feature: MA Experiment 20001558 PARAMETER Experiment Name: At_Drought_Soil_Dry_P Parameter: Organism Value: A. thaliana
  misc_feature: MA Experiment 20001558 PARAMETER Experiment Name: At_Drought_Soil_Dry_P Parameter: Plant Line Value: WS
  misc_feature: MA Experiment 20001558 PARAMETER Experiment Name: At_Drought_Soil_Dry_P Parameter: Post Timepoint (hr) Value: 6
  misc_feature: MA Experiment 20001558 PARAMETER Experiment Name: At_Drought_Soil_Dry_P Parameter: Post-Treatment Value: Re-Water vs. No Drought
  misc_feature: MA Experiment 20001558 PARAMETER Experiment Name: At_Drought_Soil_Dry_P Parameter: Timepoint (day) Value: 13
  misc_feature: MA Experiment 20001558 PARAMETER Experiment Name: At_Drought_Soil_Dry_P Parameter: Treatment Value: Drought vs. No Drought
  misc_feature: MA Experiment ID: 20001560 Result: Up-regulated in Transcription
  misc_feature: MA Experiment 20001560 PARAMETER Experiment Name: At_Drought_Soil_Dry_P Parameter: Age (day) Value: 28
  misc_feature: MA Experiment 20001560 PARAMETER Experiment Name: At_Drought_Soil_Dry_P Parameter: Organism Value: A. thaliana
  misc_feature: MA Experiment 20001560 PARAMETER Experiment Name: At_Drought_Soil_Dry_P Parameter: Plant Line Value: WS
  misc_feature: MA Experiment 20001560 PARAMETER Experiment Name: At_Drought_Soil_Dry_P Parameter: Post Timepoint (hr) Value: None
  misc_feature: MA Experiment 20001560 PARAMETER Experiment Name: At_Drought_Soil_Dry_P Parameter: Post-Treatment Value: None
  misc_feature: MA Experiment 20001560 PARAMETER Experiment Name: At_Drought_Soil_Dry_P Parameter: Timepoint (day) Value: 14
  misc_feature: MA Experiment 20001560 PARAMETER Experiment Name: At_Drought_Soil_Dry_P Parameter: Treatment Value: Drought vs. No Drought
  misc_feature: MA Experiment ID: 20001757 Result: Up-regulated in Transcription
  misc_feature: MA Experiment 20001757 PARAMETER Experiment Name: At_50mM_NH4NO3_L-to-H_P Parameter: Timepoint (hr) Value: 6
  misc_feature: MA Experiment 20001757 PARAMETER Experiment Name: At_50mM_NH4NO3_L-to-H_P Parameter: Tissue Value: Leaf
  misc_feature: MA Experiment 20001757 PARAMETER Experiment Name: At_50mM_NH4NO3_L-to-H_P Parameter: Treatment Value: 50mM NH4NO3 vs 100mM Mannitol

SEQ ID NO: 33115 - protein, 151 aa, Arabidopsis thaliana; identical to SEQ ID NO: 29525
  peptide (1)..(151): Ceres Seq. ID no. 13580359
  misc_feature (1)..(151): Homolog of NCBI NO: 17136832 NR Description: Ribosomal protein S13 CG13389-PA [Drosophila
  misc_feature (1)..(151): Homolog of NCBI NO: 3688434 NR Description: 40S ribosomal protein S13 [Lumbricus rubellus]
  misc_feature (1)..(151): Homolog of NCBI NO: 464705 NR Description: 40S RIBOSOMAL PROTEIN S13
  misc_feature (1)..(151): Homolog of NCBI NO: 1173198 NR Description: 40S RIBOSOMAL PROTEIN S13
  misc_feature (1)..(151): Homolog of NCBI NO: 7440402 NR Description: ribosomal protein S13, cytosolic - Arabidopsis
  misc_feature (1)..(151): Homolog of NCBI NO: 8131699 NR Description: cytoplasmic ribosomal protein S13 [Panax ginseng]
  misc_feature (1)..(151): Homolog of NCBI NO: 11276609 NR Description: ribosomal protein S13-like - Arabidopsis thaliana
  misc_feature (1)..(151): Homolog of NCBI NO: 18411224 NR Description: 40S ribosomal protein S13 (RPS13B) [Arabidopsis
  misc_feature (1)..(151): Homolog of NCBI NO: 14190367 NR Description: AT3g60770/T4C21_180 [Arabidopsis thaliana]
  misc_feature (1)..(151): Homolog of NCBI NO: 18411716 NR Description: 40S ribosomal protein S13 (RPS13A) [Arabidopsis
  misc_feature (1)..(151): Homolog of NCBI NO: 17136832 NR Description: Ribosomal protein S13 CG13389-PA [Drosophila
  misc_feature (1)..(151): Homolog of NCBI NO: 3688434 NR Description: 40S ribosomal protein S13 [Lumbricus rubellus]
  misc_feature (1)..(151): Homolog of NCBI NO: 464705 NR Description: 40S RIBOSOMAL PROTEIN S13
  misc_feature (1)..(151): Homolog of NCBI NO: 1173198 NR Description: 40S RIBOSOMAL PROTEIN S13
  misc_feature (1)..(151): Homolog of NCBI NO: 7440402 NR Description: ribosomal protein S13, cytosolic - Arabidopsis
  misc_feature (1)..(151): Homolog of NCBI NO: 8131699 NR Description: cytoplasmic ribosomal protein S13 [Panax ginseng]
  misc_feature (1)..(151): Homolog of NCBI NO: 11276609 NR Description: ribosomal protein S13-like - Arabidopsis thaliana
  misc_feature (1)..(151): Homolog of NCBI NO: 18411224 NR Description: 40S ribosomal protein S13 (RPS13B) [Arabidopsis
  misc_feature (1)..(151): Homolog of NCBI NO: 14190367 NR Description: AT3g60770/T4C21_180 [Arabidopsis thaliana]
  misc_feature (1)..(151): Homolog of NCBI NO: 18411716 NR Description: 40S ribosomal protein S13 (RPS13A) [Arabidopsis

SEQ ID NO: 33116 - protein, 148 aa, Arabidopsis thaliana; identical to SEQ ID NO: 29526
  peptide (1)..(148): Ceres Seq. ID no. 13580360
  misc_feature (1)..(148): Homolog of NCBI NO: 17136832 NR Description: Ribosomal protein S13 CG13389-PA [Drosophila
  misc_feature (1)..(148): Homolog of NCBI NO: 3688434 NR Description: 40S ribosomal protein S13 [Lumbricus rubellus]
  misc_feature (1)..(148): Homolog of NCBI NO: 464705 NR Description: 40S RIBOSOMAL PROTEIN S13
  misc_feature (1)..(148): Homolog of NCBI NO: 1173198 NR Description: 40S RIBOSOMAL PROTEIN S13
  misc_feature (1)..(148): Homolog of NCBI NO: 7440402 NR Description: ribosomal protein S13, cytosolic - Arabidopsis
  misc_feature (1)..(148): Homolog of NCBI NO: 8131699 NR Description: cytoplasmic ribosomal protein S13 [Panax ginseng]
  misc_feature (1)..(148): Homolog of NCBI NO: 11276609 NR Description: ribosomal protein S13-like - Arabidopsis thaliana
  misc_feature (1)..(148): Homolog of NCBI NO: 18411224 NR Description: 40S ribosomal protein S13 (RPS13B) [Arabidopsis
  misc_feature (1)..(148): Homolog of NCBI NO: 14190367 NR Description: AT3g60770/T4C21_180 [Arabidopsis thaliana]
  misc_feature (1)..(148): Homolog of NCBI NO: 18411716 NR Description: 40S ribosomal protein S13 (RPS13A) [Arabidopsis
  misc_feature (1)..(148): Homolog of NCBI NO: 17136832 NR Description: Ribosomal protein S13 CG13389-PA [Drosophila
  misc_feature (1)..(148): Homolog of NCBI NO: 3688434 NR Description: 40S ribosomal protein S13 [Lumbricus rubellus]
  misc_feature (1)..(148): Homolog of NCBI NO: 464705 NR Description: 40S RIBOSOMAL PROTEIN S13
  misc_feature (1)..(148): Homolog of NCBI NO: 1173198 NR Description: 40S RIBOSOMAL PROTEIN S13
  misc_feature (1)..(148): Homolog of NCBI NO: 7440402 NR Description: ribosomal protein S13, cytosolic - Arabidopsis
  misc_feature (1)..(148): Homolog of NCBI NO: 8131699 NR Description: cytoplasmic ribosomal protein S13 [Panax ginseng]
  misc_feature (1)..(148): Homolog of NCBI NO: 11276609 NR Description: ribosomal protein S13-like - Arabidopsis thaliana
  misc_feature (1)..(148): Homolog of NCBI NO: 18411224 NR Description: 40S ribosomal protein S13 (RPS13B) [Arabidopsis
  misc_feature (1)..(148): Homolog of NCBI NO: 14190367 NR Description: AT3g60770/T4C21_180 [Arabidopsis thaliana]
  misc_feature (1)..(148): Homolog of NCBI NO: 18411716 NR Description: 40S ribosomal protein S13 (RPS13A) [Arabidopsis

SEQ ID NO: 33117 - DNA, 674 bp, Arabidopsis thaliana; identical to SEQ ID NO: 29527
  misc_feature (1)..(674): Ceres Seq. ID no. 12393615
  misc_feature: MA Experiment ID: 108434 Result: Up-regulated in Transcription
  misc_feature: MA Experiment 108434 PARAMETER Experiment Name: At_Root_Tips_cDNA_P Parameter: Tissue Value: Root Tips
  misc_feature: MA Experiment ID: 108463 Result: Down-regulated in Transcription
  misc_feature: MA Experiment 108463 PARAMETER Experiment Name: At_Germinating_Seeds_cDNA_P Parameter: Age (day) Value: 3 vs. 0
  misc_feature: MA Experiment 108463 PARAMETER Experiment Name: At_Germinating_Seeds_cDNA_P Parameter: Tissue Value: Germinating Seeds
  misc_feature: MA Experiment ID: 108573 Result: Down-regulated in Transcription
  misc_feature: MA Experiment 108573 PARAMETER Experiment Name: At_Drought_cDNA_P Parameter: Timepoint (hr) Value: 6
  misc_feature: MA Experiment 108573 PARAMETER Experiment Name: At_Drought_cDNA_P Parameter: Tissue Value: Aerial
  misc_feature: MA Experiment 108573 PARAMETER Experiment Name: At_Drought_cDNA_P Parameter: Treatment Value: Drought vs. No Drought
  misc_feature: MA Experiment ID: 20000173 Result: Up-regulated in Transcription
  misc_feature: MA Experiment 20000173 PARAMETER Experiment Name: At_42deg_Heat_P Parameter: Age (day) Value: 14
  misc_feature: MA Experiment 20000173 PARAMETER Experiment Name: At_42deg_Heat_P Parameter: Organism Value: A. thaliana
  misc_feature: MA Experiment 20000173 PARAMETER Experiment Name: At_42deg_Heat_P Parameter: Plant Line Value: WS
  misc_feature: MA Experiment 20000173 PARAMETER Experiment Name: At_42deg_Heat_P Parameter: Temperature (deg C) Value: 42 vs. 22
  misc_feature: MA Experiment 20000173 PARAMETER Experiment Name: At_42deg_Heat_P Parameter: Timepoint (hr) Value: 6
  misc_feature: MA Experiment 20000173 PARAMETER Experiment Name: At_42deg_Heat_P Parameter: Tissue Value: Aerial
  misc_feature: MA Experiment ID: 20000184 Result: Up-regulated in Transcription
  misc_feature: MA Experiment 20000184 PARAMETER Experiment Name: At_Shoots__P Parameter: Age (day) Value: 7
  misc_feature: MA Experiment 20000184 PARAMETER Experiment Name: At_Shoots__P Parameter: Tissue Value: Shoots vs. Whole Plant
  misc_feature: MA Experiment ID: 20000437 Result: Down-regulated in Transcription
  misc_feature: MA Experiment 20000437 PARAMETER Experiment Name: At_Drought_P Parameter: Age (day) Value: 8
  misc_feature: MA Experiment 20000437 PARAMETER Experiment Name: At_Drought_P Parameter: Organism Value: A. thaliana
  misc_feature: MA Experiment 20000437 PARAMETER Experiment Name: At_Drought_P Parameter: Plant Line Value: WS
  misc_feature: MA Experiment 20000437 PARAMETER Experiment Name: At_Drought_P Parameter: Timepoint (hr) Value: 24
  misc_feature: MA Experiment 20000437 PARAMETER Experiment Name: At_Drought_P Parameter: Tissue Value: Whole Plant
  misc_feature: MA Experiment 20000437 PARAMETER Experiment Name: At_Drought_P Parameter: Treatment Value: Drought vs. No Drought
  misc_feature: MA Experiment ID: 20000794 Result: Down-regulated in Transcription
  misc_feature: MA Experiment 20000794 PARAMETER Experiment Name: At_Petals_P Parameter: Age (day) Value: 23-25 days
  misc_feature: MA Experiment 20000794 PARAMETER Experiment Name: At_Petals_P Parameter: Plant Line Value: WS
  misc_feature: MA Experiment 20000794 PARAMETER Experiment Name: At_Petals_P Parameter: Tissue Value: Petals vs. Whole plant
  misc_feature: MA Experiment ID: 20001557 Result: Up-regulated in Transcription
  misc_feature: MA Experiment 20001557 PARAMETER Experiment Name: At_Drought_Soil_Dry_P Parameter: Age (day) Value: 27
  misc_feature: MA Experiment 20001557 PARAMETER Experiment Name: At_Drought_Soil_Dry_P Parameter: Organism Value: A. thaliana
  misc_feature: MA Experiment 20001557 PARAMETER Experiment Name: At_Drought_Soil_Dry_P Parameter: Plant Line Value: WS
  misc_feature: MA Experiment 20001557 PARAMETER Experiment Name: At_Drought_Soil_Dry_P Parameter: Post Timepoint (hr) Value: 3
  misc_feature: MA Experiment 20001557 PARAMETER Experiment Name: At_Drought_Soil_Dry_P Parameter: Post-Treatment Value: Re-Water vs. No Drought
  misc_feature: MA Experiment 20001557 PARAMETER Experiment Name: At_Drought_Soil_Dry_P Parameter: Timepoint (day) Value: 13
  misc_feature: MA Experiment 20001557 PARAMETER Experiment Name: At_Drought_Soil_Dry_P Parameter: Treatment Value: Drought vs. No Drought
  misc_feature: MA Experiment ID: 20001558 Result: Up-regulated in Transcription
  misc_feature: MA Experiment 20001558 PARAMETER Experiment Name: At_Drought_Soil_Dry_P Parameter: Age (day) Value: 27
  misc_feature: MA Experiment 20001558 PARAMETER Experiment Name: At_Drought_Soil_Dry_P Parameter: Organism Value: A. thaliana
  misc_feature: MA Experiment 20001558 PARAMETER Experiment Name: At_Drought_Soil_Dry_P Parameter: Plant Line Value: WS
  misc_feature: MA Experiment 20001558 PARAMETER Experiment Name: At_Drought_Soil_Dry_P Parameter: Post Timepoint (hr) Value: 6
  misc_feature: MA Experiment 20001558 PARAMETER Experiment Name: At_Drought_Soil_Dry_P Parameter: Post-Treatment Value: Re-Water vs. No Drought
  misc_feature: MA Experiment 20001558 PARAMETER Experiment Name: At_Drought_Soil_Dry_P Parameter: Timepoint (day) Value: 13
  misc_feature: MA Experiment 20001558 PARAMETER Experiment Name: At_Drought_Soil_Dry_P Parameter: Treatment Value: Drought vs. No Drought
  misc_feature: MA Experiment ID: 20001560 Result: Up-regulated in Transcription
  misc_feature: MA Experiment 20001560 PARAMETER Experiment Name: At_Drought_Soil_Dry_P Parameter: Age (day) Value: 28
  misc_feature: MA Experiment 20001560 PARAMETER Experiment Name: At_Drought_Soil_Dry_P Parameter: Organism Value: A. thaliana
  misc_feature: MA Experiment 20001560 PARAMETER Experiment Name: At_Drought_Soil_Dry_P Parameter: Plant Line Value: WS
  misc_feature: MA Experiment 20001560 PARAMETER Experiment Name: At_Drought_Soil_Dry_P Parameter: Post Timepoint (hr) Value: None
  misc_feature: MA Experiment 20001560 PARAMETER Experiment Name: At_Drought_Soil_Dry_P Parameter: Post-Treatment Value: None
  misc_feature: MA Experiment 20001560 PARAMETER Experiment Name: At_Drought_Soil_Dry_P Parameter: Timepoint (day) Value: 14
  misc_feature: MA Experiment 20001560 PARAMETER Experiment Name: At_Drought_Soil_Dry_P Parameter: Treatment Value: Drought vs. No Drought
  misc_feature: MA Experiment ID: 20001757 Result: Up-regulated in Transcription
  misc_feature: MA Experiment 20001757 PARAMETER Experiment Name: At_50mM_NH4NO3_L-to-H_P Parameter: Timepoint (hr) Value: 6
  misc_feature: MA Experiment 20001757 PARAMETER Experiment Name: At_50mM_NH4NO3_L-to-H_P Parameter: Tissue Value: Leaf
  misc_feature: MA Experiment 20001757 PARAMETER Experiment Name: At_50mM_NH4NO3_L-to-H_P Parameter: Treatment Value: 50mM NH4NO3 vs 100mM Mannitol

SEQ ID NO: 33118 - protein, 113 aa, Arabidopsis thaliana; identical to SEQ ID NO: 29528
  peptide (1)..(113): Ceres Seq. ID no. 12393616
  misc_feature (22)..(112): Pfam Name: 60s Acidic ribosomal protein Pfam Description: 60s Acidic ribosomal protein
  misc_feature (1)..(113): Homolog of NCBI NO: 25150244 NR Description: 60S Ribosomal Protein, Acidic 1
  misc_feature (1)..(113): Homolog of NCBI NO: 266947 NR Description: 60S ACIDIC RIBOSOMAL PROTEIN P1
  misc_feature (5)..(113): Homolog of NCBI NO: 1710590 NR Description: 60S ACIDIC RIBOSOMAL PROTEIN P1 (L12)
  misc_feature (5)..(113): Homolog of NCBI NO: 7440759 NR Description: acidic ribosomal protein P1a - maize
  misc_feature (1)..(113): Homolog of NCBI NO: 6094103 NR Description: 60S acidic ribosomal protein P1
  misc_feature (1)..(113): Homolog of NCBI NO: 18411448 NR Description: acidic ribosomal protein p1
  misc_feature (1)..(113): Homolog of NCBI NO: 21592477 NR Description: acidic ribosomal protein, putative [Arabidopsis
  misc_feature (1)..(113): Homolog of NCBI NO: 15223303 NR Description: acidic ribosomal protein, putative
  misc_feature (1)..(113): Homolog of NCBI NO: 21553441 NR Description: 60S acidic ribosomal protein P1-like protein
  misc_feature (1)..(113): Homolog of NCBI NO: 15238170 NR Description: 60S acidic ribosomal protein P1-like protein

SEQ ID NO: 33119 - protein, 100 aa, Arabidopsis thaliana; identical to SEQ ID NO: 29529
  peptide (1)..(100): Ceres Seq. ID no. 12393617
  misc_feature (9)..(99): Pfam Name: 60s Acidic ribosomal protein Pfam Description: 60s Acidic ribosomal protein
  misc_feature (1)..(100): Homolog of NCBI NO: 25150244 NR Description: 60S Ribosomal Protein, Acidic 1
  misc_feature (1)..(100): Homolog of NCBI NO: 266947 NR Description: 60S ACIDIC RIBOSOMAL PROTEIN P1
  misc_feature (1)..(100): Homolog of NCBI NO: 1710590 NR Description: 60S ACIDIC RIBOSOMAL PROTEIN P1 (L12)
  misc_feature (1)..(100): Homolog of NCBI NO: 7440759 NR Description: acidic ribosomal protein P1a - maize
  misc_feature (1)..(100): Homolog of NCBI NO: 6094103 NR Description: 60S acidic ribosomal protein P1
  misc_feature (1)..(100): Homolog of NCBI NO: 18411448 NR Description: acidic ribosomal protein p1
  misc_feature (1)..(100): Homolog of NCBI NO: 21592477 NR Description: acidic ribosomal protein, putative [Arabidopsis
  misc_feature (1)..(100): Homolog of NCBI NO: 15223303 NR Description: acidic ribosomal protein, putative
  misc_feature (1)..(100): Homolog of NCBI NO: 21553441 NR Description: 60S acidic ribosomal protein P1-like protein
  misc_feature (1)..(100): Homolog of NCBI NO: 15238170 NR Description: 60S acidic ribosomal protein P1-like protein

SEQ ID NO: 33120 - protein, 69 aa, Arabidopsis thaliana; identical to SEQ ID NO: 29530
  peptide (1)..(69): Ceres Seq. ID no. 12393618
  misc_feature (1)..(68): Pfam Name: 60s Acidic ribosomal protein Pfam Description: 60s Acidic ribosomal protein
  misc_feature (1)..(69): Homolog of NCBI NO: 25150244 NR Description: 60S Ribosomal Protein, Acidic 1
  misc_feature (1)..(69): Homolog of NCBI NO: 266947 NR Description: 60S ACIDIC RIBOSOMAL PROTEIN P1
  misc_feature (1)..(69): Homolog of NCBI NO: 1710590 NR Description: 60S ACIDIC RIBOSOMAL PROTEIN P1 (L12)
  misc_feature (1)..(69): Homolog of NCBI NO: 7440759 NR Description: acidic ribosomal protein P1a - maize
  misc_feature (1)..(69): Homolog of NCBI NO: 6094103 NR Description: 60S acidic ribosomal protein P1
  misc_feature (1)..(69): Homolog of NCBI NO: 18411448 NR Description: acidic ribosomal protein p1
  misc_feature (1)..(69): Homolog of NCBI NO: 21592477 NR Description: acidic ribosomal protein, putative [Arabidopsis
  misc_feature (1)..(69): Homolog of NCBI NO: 15223303 NR Description: acidic ribosomal protein, putative
  misc_feature (1)..(69): Homolog of NCBI NO: 21553441 NR Description: 60S acidic ribosomal protein P1-like protein
  misc_feature (1)..(69): Homolog of NCBI NO: 15238170 NR Description: 60S acidic ribosomal protein P1-like protein

SEQ ID NO: 33121 - DNA, 1087 bp, Arabidopsis thaliana; identical to SEQ ID NO: 29531
  misc_feature (1)..(1087): Ceres Seq. ID no. 12384539
  misc_feature: MA Experiment ID: 108462 Result: Up-regulated in Transcription
  misc_feature: MA Experiment 108462 PARAMETER Experiment Name: At_Germinating_Seeds_cDNA_P Parameter: Age (day) Value: 2 vs. 0
  misc_feature: MA Experiment 108462 PARAMETER Experiment Name: At_Germinating_Seeds_cDNA_P Parameter: Tissue Value: Germinating Seeds
  misc_feature: MA Experiment ID: 108463 Result: Up-regulated in Transcription
  misc_feature: MA Experiment 108463 PARAMETER Experiment Name: At_Germinating_Seeds_cDNA_P Parameter: Age (day) Value: 3 vs. 0
  misc_feature: MA Experiment 108463 PARAMETER Experiment Name: At_Germinating_Seeds_cDNA_P Parameter: Tissue Value: Germinating Seeds
  misc_feature: MA Experiment ID: 108464 Result: Up-regulated in Transcription
  misc_feature: MA Experiment 108464 PARAMETER Experiment Name: At_Germinating_Seeds_cDNA_P Parameter: Age (day) Value: 4 vs. 0
  misc_feature: MA Experiment 108464 PARAMETER Experiment Name: At_Germinating_Seeds_cDNA_P Parameter: Tissue Value: Germinating Seeds
  misc_feature: MA Experiment ID: 108561 Result: Up-regulated in Transcription
  misc_feature: MA Experiment 108561 PARAMETER Experiment Name: At_100uM_ABA_cDNA_P Parameter: Timepoint (hr) Value: 6
  misc_feature: MA Experiment 108561 PARAMETER Experiment Name: At_100uM_ABA_cDNA_P Parameter: Tissue Value: Aerial
  misc_feature: MA Experiment 108561 PARAMETER Experiment Name: At_100uM_ABA_cDNA_P Parameter: Treatment Value: 100uM ABA vs. No Treatment
  misc_feature: MA Experiment ID: 108605 Result: Up-regulated in Transcription
  misc_feature: MA Experiment 108605 PARAMETER Experiment Name: At_100uM_ABA_cDNA_P Parameter: Timepoint (hr) Value: 6
  misc_feature: MA Experiment 108605 PARAMETER Experiment Name: At_100uM_ABA_cDNA_P Parameter: Tissue Value: Aerial
  misc_feature: MA Experiment 108605 PARAMETER Experiment Name: At_100uM_ABA_cDNA_P Parameter: Treatment Value: 100uM ABA vs. No Treatment
  misc_feature: MA Experiment ID: 20000436 Result: Up-regulated in Transcription
  misc_feature: MA Experiment 20000436 PARAMETER Experiment Name: At_Drought_P Parameter: Age (day) Value: 7
  misc_feature: MA Experiment 20000436 PARAMETER Experiment Name: At_Drought_P Parameter: Organism Value: A. thaliana
  misc_feature: MA Experiment 20000436 PARAMETER Experiment Name: At_Drought_P Parameter: Plant Line Value: WS
  misc_feature: MA Experiment 20000436 PARAMETER Experiment Name: At_Drought_P Parameter: Timepoint (hr) Value: 12
  misc_feature: MA Experiment 20000436 PARAMETER Experiment Name: At_Drought_P Parameter: Tissue Value: Whole Plant
  misc_feature: MA Experiment 20000436 PARAMETER Experiment Name: At_Drought_P Parameter: Treatment Value: Drought vs. No Drought
  misc_feature: MA Experiment ID: 20000437 Result: Up-regulated in Transcription
  misc_feature: MA Experiment 20000437 PARAMETER Experiment Name: At_Drought_P Parameter: Age (day) Value: 8
  misc_feature: MA Experiment 20000437 PARAMETER Experiment Name: At_Drought_P Parameter: Organism Value: A. thaliana
  misc_feature: MA Experiment 20000437 PARAMETER Experiment Name: At_Drought_P Parameter: Plant Line Value: WS
  misc_feature: MA Experiment 20000437 PARAMETER Experiment Name: At_Drought_P Parameter: Timepoint (hr) Value: 24
  misc_feature: MA Experiment 20000437 PARAMETER Experiment Name: At_Drought_P Parameter: Tissue Value: Whole Plant
  misc_feature: MA Experiment 20000437 PARAMETER Experiment Name: At_Drought_P Parameter: Treatment Value: Drought vs. No Drought
  misc_feature: MA Experiment ID: 20000438 Result: Up-regulated in Transcription
  misc_feature: MA Experiment 20000438 PARAMETER Experiment Name: At_Shoots__P Parameter: Age (day) Value: 14
  misc_feature: MA Experiment 20000438 PARAMETER Experiment Name: At_Shoots__P Parameter: Tissue Value: Shoots vs. Whole Plant
  misc_feature: MA Experiment ID: 20000573 Result: Down-regulated in Transcription
  misc_feature: MA Experiment 20000573 PARAMETER Experiment Name: At_100uM_ABA_Mutants__P Parameter: Organism Value: A. thaliana
  misc_feature: MA Experiment 20000573 PARAMETER Experiment Name: At_100uM_ABA_Mutants__P Parameter: Plant Line Value: CS22 vs. Ler wt
  misc_feature: MA Experiment 20000573 PARAMETER Experiment Name: At_100uM_ABA_Mutants__P Parameter: Timepoint (hr) Value: N/A
  misc_feature: MA Experiment 20000573 PARAMETER Experiment Name: At_100uM_ABA_Mutants__P Parameter: Tissue Value: Whole Plant
  misc_feature: MA Experiment 20000573 PARAMETER Experiment Name: At_100uM_ABA_Mutants__P Parameter: Treatment Value: None
  misc_feature: MA Experiment ID: 20000794 Result: Up-regulated in Transcription
  misc_feature: MA Experiment 20000794 PARAMETER Experiment Name: At_Petals_P Parameter: Age (day) Value: 23-25 days
  misc_feature: MA Experiment 20000794 PARAMETER Experiment Name: At_Petals_P Parameter: Plant Line Value: WS
  misc_feature: MA Experiment 20000794 PARAMETER Experiment Name: At_Petals_P Parameter: Tissue Value: Petals vs. Whole plant
  misc_feature: MA Experiment ID: 20001248 Result: Down-regulated in Transcription
  misc_feature: MA Experiment 20001248 PARAMETER Experiment Name: At_Far-red-induction_P Parameter: Age (day) Value: 7
  misc_feature: MA Experiment 20001248 PARAMETER Experiment Name: At_Far-red-induction_P Parameter: Light Value: Far-red vs. White
  misc_feature: MA Experiment 20001248 PARAMETER Experiment Name: At_Far-red-induction_P Parameter: Organism Value: A. thaliana
  misc_feature: MA Experiment 20001248 PARAMETER Experiment Name: At_Far-red-induction_P Parameter: Plant Line Value: Columbia
  misc_feature: MA Experiment 20001248 PARAMETER Experiment Name: At_Far-red-induction_P Parameter: Timepoint (hr) Value: 4
  misc_feature: MA Experiment 20001248 PARAMETER Experiment Name: At_Far-red-induction_P Parameter: Tissue Value: Whole Plant
  misc_feature: MA Experiment ID: 20001555 Result: Up-regulated in Transcription
  misc_feature: MA Experiment 20001555 PARAMETER Experiment Name: At_Drought_Soil_Dry_P Parameter: Age (day) Value: 24
  misc_feature: MA Experiment 20001555 PARAMETER Experiment Name: At_Drought_Soil_Dry_P Parameter: Organism Value: A. thaliana
  misc_feature: MA Experiment 20001555 PARAMETER Experiment Name: At_Drought_Soil_Dry_P Parameter: Plant Line Value: WS
  misc_feature: MA Experiment 20001555 PARAMETER Experiment Name: At_Drought_Soil_Dry_P Parameter: Post Timepoint (hr) Value: None
  misc_feature: MA Experiment 20001555 PARAMETER Experiment Name: At_Drought_Soil_Dry_P Parameter: Post-Treatment Value: None
  misc_feature: MA Experiment 20001555 PARAMETER Experiment Name: At_Drought_Soil_Dry_P Parameter: Timepoint (day) Value: 10
  misc_feature: MA Experiment 20001555 PARAMETER Experiment Name: At_Drought_Soil_Dry_P Parameter: Treatment Value: Drought vs. No Drought

SEQ ID NO: 33122 - protein, 323 aa, Arabidopsis thaliana; identical to SEQ ID NO: 29532
  peptide (1)..(323): Ceres Seq. ID no. 12384540
  misc_feature (159)..(248): Pfam Name: BAG domain Pfam Description: BAG domain
  misc_feature (99)..(288): Homolog of NCBI NO: 10334497 NR Description: hypothetical protein [Cicer arietinum]
  misc_feature (44)..(306): Homolog of NCBI NO: 34898024 NR Description: ESTs AU082174(S13676),AU032395(R3986) correspond a region of the predicted gene.~Similar to Arabidopsis thaliana
  misc_feature (44)..(306): Homolog of NCBI NO: 25553557 NR Description: OSJNBa0038F22.4 [Oryza sativa (japonica
  misc_feature (34)..(323): Homolog of NCBI NO: 15242267 NR Description: putative protein; protein id: At5g52060.1
  misc_feature (33)..(323): Homolog of NCBI NO: 21537107 NR Description: unknown [Arabidopsis thaliana]
  misc_feature (28)..(323): Homolog of NCBI NO: 15240726 NR Description: putative protein
  misc_feature (86)..(323): Homolog of NCBI NO: 10176928 NR Description: contains similarity to unknown
  misc_feature (28)..(323): Homolog of NCBI NO: 30697630 NR Description: BAG domain containing protein [Arabidopsis
  misc_feature (31)..(323): Homolog of NCBI NO: 21553443 NR Description: unknown [Arabidopsis thaliana]
  misc_feature (28)..(323): Homolog of NCBI NO: 30697627 NR Description: BAG domain containing protein [Arabidopsis

SEQ ID NO: 33123 - protein, 296 aa, Arabidopsis thaliana; identical to SEQ ID NO: 29533
  peptide (1)..(296): Ceres Seq. ID no. 12384541
  misc_feature (132)..(221): Pfam Name: BAG domain Pfam Description: BAG domain
  misc_feature (72)..(261): Homolog of NCBI NO: 10334497 NR Description: hypothetical protein [Cicer arietinum]
  misc_feature (17)..(279): Homolog of NCBI NO: 34898024 NR Description: ESTs AU082174(S13676),AU032395(R3986) correspond a region of the predicted gene.~Similar to Arabidopsis thaliana
  misc_feature (17)..(279): Homolog of NCBI NO: 25553557 NR Description: OSJNBa0038F22.4 [Oryza sativa (japonica
  misc_feature (7)..(296): Homolog of NCBI NO: 15242267 NR Description: putative protein; protein id: At5g52060.1
  misc_feature (6)..(296): Homolog of NCBI NO: 21537107 NR Description: unknown [Arabidopsis thaliana]
  misc_feature (1)..(296): Homolog of NCBI NO: 15240726 NR Description: putative protein
  misc_feature (59)..(296): Homolog of NCBI NO: 10176928 NR Description: contains similarity to unknown
  misc_feature (1)..(296): Homolog of NCBI NO: 30697630 NR Description: BAG domain containing protein [Arabidopsis
  misc_feature (4)..(296): Homolog of NCBI NO: 21553443 NR Description: unknown [Arabidopsis thaliana]
  misc_feature (1)..(296): Homolog of NCBI NO: 30697627 NR Description: BAG domain containing protein [Arabidopsis

SEQ ID NO: 33124 - protein, 295 aa, Arabidopsis thaliana; identical to SEQ ID NO: 29534
  peptide (1)..(295): Ceres Seq. ID no. 12384542
  misc_feature (131)..(220): Pfam Name: BAG domain Pfam Description: BAG domain
  misc_feature (71)..(260): Homolog of NCBI NO: 10334497 NR Description: hypothetical protein [Cicer arietinum]
  misc_feature (16)..(278): Homolog of NCBI NO: 34898024 NR Description: ESTs AU082174(S13676),AU032395(R3986) correspond a region of the predicted gene.~Similar to Arabidopsis thaliana
  misc_feature (16)..(278): Homolog of NCBI NO: 25553557 NR Description: OSJNBa0038F22.4 [Oryza sativa (japonica
  misc_feature (6)..(295): Homolog of NCBI NO: 15242267 NR Description: putative protein; protein id: At5g52060.1
  misc_feature (5)..(295): Homolog of NCBI NO: 21537107 NR Description: unknown [Arabidopsis thaliana]
  misc_feature (1)..(295): Homolog of NCBI NO: 15240726 NR Description: putative protein
  misc_feature (58)..(295): Homolog of NCBI NO: 10176928 NR Description: contains similarity to unknown
  misc_feature (1)..(295): Homolog of NCBI NO: 30697630 NR Description: BAG domain containing protein [Arabidopsis
  misc_feature (3)..(295): Homolog of NCBI NO: 21553443 NR Description: unknown [Arabidopsis thaliana]
  misc_feature (1)..(295): Homolog of NCBI NO: 30697627 NR Description: BAG domain containing protein [Arabidopsis

SEQ ID NO: 33125 - DNA, 854 bp, Arabidopsis thaliana; identical to SEQ ID NO: 29535
  misc_feature (1)..(854): Ceres Seq. ID no. 12333023
  misc_feature: MA Experiment ID: 108434 Result: Down-regulated in Transcription
  misc_feature: MA Experiment 108434 PARAMETER Experiment Name: At_Root_Tips_cDNA_P Parameter: Tissue Value: Root Tips
  misc_feature: MA Experiment ID: 108461 Result: Down-regulated in Transcription
  misc_feature: MA Experiment 108461 PARAMETER Experiment Name: At_Germinating_Seeds_cDNA_P Parameter: Age (day) Value: 1 vs. 0
  misc_feature: MA Experiment 108461 PARAMETER Experiment Name: At_Germinating_Seeds_cDNA_P Parameter: Tissue Value: Germinating Seeds
  misc_feature: MA Experiment ID: 108595 Result: Up-regulated in Transcription
  misc_feature: MA Experiment 108595 PARAMETER Experiment Name: At_Ler-pi_Ovule_cDNA_P Parameter: Plant Line Value: null
  misc_feature: MA Experiment ID: 20000113 Result: Down-regulated in Transcription
  misc_feature: MA Experiment 20000113 PARAMETER Experiment Name: At_42deg_Heat_cDNA_P Parameter: Temperature (deg C) Value: 42 vs. 22
  misc_feature: MA Experiment 20000113 PARAMETER Experiment Name: At_42deg_Heat_cDNA_P Parameter: Timepoint (hr) Value: 8
  misc_feature: MA Experiment 20000113 PARAMETER Experiment Name: At_42deg_Heat_cDNA_P Parameter: Tissue Value: Aerial

SEQ ID NO: 33126 - protein, 166 aa, Arabidopsis thaliana; identical to SEQ ID NO: 26630
  peptide (1)..(166): Ceres Seq. ID no. 12333024
  misc_feature (8)..(87): Pfam Name: C2 domain Pfam Description: C2 domain
  misc_feature (1)..(163): Homolog of NCBI NO: 15223248 NR Description: unknown protein; protein id: At1g70800.1
  misc_feature (1)..(163): Homolog of NCBI NO: 18408493 NR Description: expressed protein
  misc_feature (3)..(157): Homolog of NCBI NO: 15226306 NR Description: hypothetical protein
  misc_feature (1)..(163): Homolog of NCBI NO: 25405940 NR Description: protein T1N15.21 [imported] - Arabidopsis
  misc_feature (1)..(163): Homolog of NCBI NO: 15221907 NR Description: unknown protein; protein id: At1g48590.1
  misc_feature (1)..(164): Homolog of NCBI NO: 15219500 NR Description: hypothetical protein; protein id: At1g73580.1
  misc_feature (1)..(159): Homolog of NCBI NO: 19386828 NR Description: putative zinc finger and C2 domain protein
  misc_feature (1)..(164): Homolog of NCBI NO: 30684739 NR Description: C2 domain-containing protein [Arabidopsis
  misc_feature (3)..(163): Homolog of NCBI NO: 18409675 NR Description: zinc finger and C2 domain protein, putative
  misc_feature (1)..(166): Homolog of NCBI NO: 15238792 NR Description: putative protein

SEQ ID NO: 33127 - protein, 84 aa, Arabidopsis thaliana; identical to SEQ ID NO: 26631
  peptide (1)..(84): Ceres Seq. ID no. 12333025
  misc_feature (1)..(81): Homolog of NCBI NO: 15223248 NR Description: unknown protein; protein id: At1g70800.1
  misc_feature (1)..(81): Homolog of NCBI NO: 18408493 NR Description: expressed protein
  misc_feature (1)..(75): Homolog of NCBI NO: 15226306 NR Description: hypothetical protein
  misc_feature (1)..(81): Homolog of NCBI NO: 25405940 NR Description: protein T1N15.21 [imported] - Arabidopsis
  misc_feature (1)..(81): Homolog of NCBI NO: 15221907 NR Description: unknown protein; protein id: At1g48590.1
  misc_feature (1)..(82): Homolog of NCBI NO: 15219500 NR Description: hypothetical protein; protein id: At1g73580.1
  misc_feature (1)..(77): Homolog of NCBI NO: 19386828 NR Description: putative zinc finger and C2 domain protein
  misc_feature (1)..(82): Homolog of NCBI NO: 30684739 NR Description: C2 domain-containing protein [Arabidopsis
  misc_feature (1)..(81): Homolog of NCBI NO: 18409675 NR Description: zinc finger and C2 domain protein, putative
  misc_feature (1)..(84): Homolog of NCBI NO: 15238792 NR Description: putative protein

SEQ ID NO: 33128 - DNA, 1871 bp, Arabidopsis thaliana; identical to SEQ ID NO: 29538
  misc_feature (1)..(1871): Ceres Seq. ID no. 13496804
  misc_feature: MA Experiment ID: 108464 Result: Up-regulated in Transcription
  misc_feature: MA Experiment 108464 PARAMETER Experiment Name: At_Germinating_Seeds_cDNA_P Parameter: Age (day) Value: 4 vs. 0
  misc_feature: MA Experiment 108464 PARAMETER Experiment Name: At_Germinating_Seeds_cDNA_P Parameter: Tissue Value: Germinating Seeds
  misc_feature: MA Experiment ID: 108488 Result: Down-regulated in Transcription
  misc_feature: MA Experiment ID: 108572 Result: Up-regulated in Transcription
  misc_feature: MA Experiment 108572 PARAMETER Experiment Name: At_Drought_cDNA_P Parameter: Timepoint (hr) Value: 1
  misc_feature: MA Experiment 108572 PARAMETER Experiment Name: At_Drought_cDNA_P Parameter: Tissue Value: Aerial
  misc_feature: MA Experiment 108572 PARAMETER Experiment Name: At_Drought_cDNA_P Parameter: Treatment Value: Drought vs. No Drought
  misc_feature: MA Experiment ID: 108573 Result: Up-regulated in Transcription
  misc_feature: MA Experiment 108573 PARAMETER Experiment Name: At_Drought_cDNA_P Parameter: Timepoint (hr) Value: 6
  misc_feature: MA Experiment 108573 PARAMETER Experiment Name: At_Drought_cDNA_P Parameter: Tissue Value: Aerial
  misc_feature: MA Experiment 108573 PARAMETER Experiment Name: At_Drought_cDNA_P Parameter: Treatment Value: Drought vs. No Drought
  misc_feature: MA Experiment ID: 108595 Result: Up-regulated in Transcription
  misc_feature: MA Experiment 108595 PARAMETER Experiment Name: At_Ler-pi_Ovule_cDNA_P Parameter: Plant Line Value: null
  misc_feature: MA Experiment ID: 108605 Result: Up-regulated in Transcription
  misc_feature: MA Experiment 108605 PARAMETER Experiment Name: At_100uM_ABA_cDNA_P Parameter: Timepoint (hr) Value: 6
  misc_feature: MA Experiment 108605 PARAMETER Experiment Name: At_100uM_ABA_cDNA_P Parameter: Tissue Value: Aerial
  misc_feature: MA Experiment 108605 PARAMETER Experiment Name: At_100uM_ABA_cDNA_P Parameter: Treatment Value: 100uM ABA vs. No Treatment
  misc_feature: MA Experiment ID: 108607 Result: Up-regulated in Transcription
  misc_feature: MA Experiment 108607 PARAMETER Experiment Name: At_100uM_ABA_cDNA_P Parameter: Timepoint (hr) Value: 4
  misc_feature: MA Experiment 108607 PARAMETER Experiment Name: At_100uM_ABA_cDNA_P Parameter: Tissue Value: Aerial
  misc_feature: MA Experiment 108607 PARAMETER Experiment Name: At_100uM_ABA_cDNA_P Parameter: Treatment Value: 100uM ABA vs. No Treatment
  misc_feature: MA Experiment ID: 108609 Result: Up-regulated in Transcription
  misc_feature: MA Experiment 108609 PARAMETER Experiment Name: At_100uM_ABA_cDNA_P Parameter: Timepoint (hr) Value: 24
  misc_feature: MA Experiment 108609 PARAMETER Experiment Name: At_100uM_ABA_cDNA_P Parameter: Tissue Value: Aerial
  misc_feature: MA Experiment 108609 PARAMETER Experiment Name: At_100uM_ABA_cDNA_P Parameter: Treatment Value: 100uM ABA vs. No Treatment
  misc_feature: MA Experiment ID: 20000071 Result: Up-regulated in Transcription
  misc_feature: MA Experiment 20000071 PARAMETER Experiment Name: At_100uM_ABA_Mutants_cDNA_P Parameter: Plant Line Value: CS8104
  misc_feature: MA Experiment 20000071 PARAMETER Experiment Name: At_100uM_ABA_Mutants_cDNA_P Parameter: Timepoint (hr) Value: 6
  misc_feature: MA Experiment 20000071 PARAMETER Experiment Name: At_100uM_ABA_Mutants_cDNA_P Parameter: Tissue Value: Aerial
  misc_feature: MA Experiment 20000071 PARAMETER Experiment Name: At_100uM_ABA_Mutants_cDNA_P Parameter: Treatment Value: 100uM ABA vs. No Treatment
  misc_feature: MA Experiment ID: 20000087 Result: Up-regulated in Transcription
  misc_feature: MA Experiment 20000087 PARAMETER Experiment Name: At_100uM_ABA_Mutants_cDNA_P Parameter: Plant Line Value: WS
  misc_feature: MA Experiment 20000087 PARAMETER Experiment Name: At_100uM_ABA_Mutants_cDNA_P Parameter: Timepoint (hr) Value: 6
  misc_feature: MA Experiment 20000087 PARAMETER Experiment Name: At_100uM_ABA_Mutants_cDNA_P Parameter: Tissue Value: Aerial
  misc_feature: MA Experiment 20000087 PARAMETER Experiment Name: At_100uM_ABA_Mutants_cDNA_P Parameter: Treatment Value: 100uM ABA vs. No Treatment
  misc_feature: MA Experiment ID: 20000117 Result: Up-regulated in Transcription
  misc_feature: MA Experiment 20000117 PARAMETER Experiment Name: At_100uM_ABA_Mutants_cDNA_P Parameter: Plant Line Value: Columbia
  misc_feature: MA Experiment 20000117 PARAMETER Experiment Name: At_100uM_ABA_Mutants_cDNA_P Parameter: Timepoint (hr) Value: 6
  misc_feature: MA Experiment 20000117 PARAMETER Experiment Name: At_100uM_ABA_Mutants_cDNA_P Parameter: Tissue Value: Aerial
  misc_feature: MA Experiment 20000117 PARAMETER Experiment Name: At_100uM_ABA_Mutants_cDNA_P Parameter: Treatment Value: 100uM ABA vs. No Treatment
  misc_feature: MA Experiment ID: 20000179 Result: Down-regulated in Transcription
  misc_feature: MA Experiment 20000179 PARAMETER Experiment Name: At_Germinating_Seeds_P Parameter: Age (hr) Value: 6 vs. 0
  misc_feature: MA Experiment 20000179 PARAMETER Experiment Name: At_Germinating_Seeds_P Parameter: Tissue Value: Germinating Seeds
  misc_feature: MA Experiment ID: 20000180 Result: Down-regulated in Transcription
  misc_feature: MA Experiment 20000180 PARAMETER Experiment Name: At_Germinating_Seeds_P Parameter: Age (hr) Value: 24 vs. 0
  misc_feature: MA Experiment 20000180 PARAMETER Experiment Name: At_Germinating_Seeds_P Parameter: Tissue Value: Germinating Seeds
  misc_feature: MA Experiment ID: 20000182 Result: Up-regulated in Transcription
  misc_feature: MA Experiment 20000182 PARAMETER Experiment Name: At_2mM_SA_P Parameter: Age (day) Value: 14
  misc_feature: MA Experiment 20000182 PARAMETER Experiment Name: At_2mM_SA_P Parameter: Organism Value: A. thaliana
  misc_feature: MA Experiment 20000182 PARAMETER Experiment Name: At_2mM_SA_P Parameter: Plant Line Value: WS
  misc_feature: MA Experiment 20000182 PARAMETER Experiment Name: At_2mM_SA_P Parameter: Timepoint (hr) Value: 6
  misc_feature: MA Experiment 20000182 PARAMETER Experiment Name: At_2mM_SA_P Parameter: Tissue Value: Aerial
  misc_feature: MA Experiment 20000182 PARAMETER Experiment Name: At_2mM_SA_P Parameter: Treatment Value: 2mM SA vs. No Treatment
  misc_feature: MA Experiment ID: 20000185 Result: Down-regulated in Transcription
  misc_feature: MA Experiment 20000185 PARAMETER Experiment Name: At_Roots__P Parameter: Age (day) Value: 7 vs. 21
  misc_feature: MA Experiment 20000185 PARAMETER Experiment Name: At_Roots__P Parameter: Organism Value: A. thaliana
  misc_feature: MA Experiment 20000185 PARAMETER Experiment Name: At_Roots__P Parameter: Tissue Value: Roots vs. Whole Plant
  misc_feature: MA Experiment ID: 20000439 Result: Down-regulated in Transcription
  misc_feature: MA Experiment 20000439 PARAMETER Experiment Name: At_Roots__P Parameter: Age (day) Value: 14 vs. 21
  misc_feature: MA Experiment 20000439 PARAMETER Experiment Name: At_Roots__P Parameter: Organism Value: A. thaliana
  misc_feature: MA Experiment 20000439 PARAMETER Experiment Name: At_Roots__P Parameter: Tissue Value: Roots vs. Whole Plant
  misc_feature: MA Experiment ID: 20000445 Result: Up-regulated in Transcription
  misc_feature: MA Experiment 20000445 PARAMETER Experiment Name: At_100uM_NAA__P Parameter: Age (day) Value: 14
  misc_feature: MA Experiment 20000445 PARAMETER Experiment Name: At_100uM_NAA__P Parameter: Organism Value: A. thaliana
  misc_feature: MA Experiment 20000445 PARAMETER Experiment Name: At_100uM_NAA__P Parameter: Plant Line Value: WS
  misc_feature: MA Experiment 20000445 PARAMETER Experiment Name: At_100uM_NAA__P Parameter: Timepoint (hr) Value: 6
  misc_feature: MA Experiment 20000445 PARAMETER Experiment Name: At_100uM_NAA__P Parameter: Tissue Value: Aerial
  misc_feature: MA Experiment 20000445 PARAMETER Experiment Name: At_100uM_NAA__P Parameter: Treatment Value: 100uM NAA vs. No Treatment
  misc_feature: MA Experiment ID: 20000453 Result: Up-regulated in Transcription
  misc_feature: MA Experiment 20000453 PARAMETER Experiment Name: At_100uM_ABA_P Parameter: Age (day) Value: 15
  misc_feature: MA Experiment 20000453 PARAMETER Experiment Name: At_100uM_ABA_P Parameter: Organism Value: A. thaliana
  misc_feature: MA Experiment 20000453 PARAMETER Experiment Name: At_100uM_ABA_P Parameter: Plant Line Value: WS
  misc_feature: MA Experiment 20000453 PARAMETER Experiment Name: At_100uM_ABA_P Parameter: Timepoint (hr) Value: 24
  misc_feature: MA Experiment 20000453 PARAMETER Experiment Name: At_100uM_ABA_P Parameter: Tissue Value: Aerial
  misc_feature: MA Experiment 20000453 PARAMETER Experiment Name: At_100uM_ABA_P Parameter: Treatment Value: 100uM ABA vs. No Treatment
  misc_feature: MA Experiment ID: 20000527 Result: Down-regulated in Transcription
  misc_feature: MA Experiment 20000527 PARAMETER Experiment Name: At_10percent_PEG_P Parameter: Age (day) Value: 20
  misc_feature: MA Experiment 20000527 PARAMETER Experiment Name: At_10percent_PEG_P Parameter: Organism Value: A. thaliana
  misc_feature: MA Experiment 20000527 PARAMETER Experiment Name: At_10percent_PEG_P Parameter: Plant Line Value: WS
  misc_feature: MA Experiment 20000527 PARAMETER Experiment Name: At_10percent_PEG_P Parameter: Timepoint (day) Value: 20
  misc_feature: MA Experiment 20000527 PARAMETER Experiment Name: At_10percent_PEG_P Parameter: Tissue Value: Whole Plant
  misc_feature: MA Experiment 20000527 PARAMETER Experiment Name: At_10percent_PEG_P Parameter: Treatment Value: 10percent PEG vs. No Treatment
  misc_feature: MA Experiment ID: 20000794 Result: Up-regulated in Transcription
  misc_feature: MA Experiment 20000794 PARAMETER Experiment Name: At_Petals_P Parameter: Age (day) Value: 23-25 days
  misc_feature: MA Experiment 20000794 PARAMETER Experiment Name: At_Petals_P Parameter: Plant Line Value: WS
  misc_feature: MA Experiment 20000794 PARAMETER Experiment Name: At_Petals_P Parameter: Tissue Value: Petals vs. Whole plant
  misc_feature: MA Experiment ID: 20001457 Result: Down-regulated in Transcription
  misc_feature: MA Experiment 20001457 PARAMETER Experiment Name: At_50mM_NH4NO3_L-to-H_P Parameter: Age (day) Value: Undefined
  misc_feature: MA Experiment 20001457 PARAMETER Experiment Name: At_50mM_NH4NO3_L-to-H_P Parameter: Organism Value: Undefined
  misc_feature: MA Experiment 20001457 PARAMETER Experiment Name: At_50mM_NH4NO3_L-to-H_P Parameter: Plant Line Value: Undefined
  misc_feature: MA Experiment 20001457 PARAMETER Experiment Name: At_50mM_NH4NO3_L-to-H_P Parameter: Timepoint (hr) Value: 0.5
  misc_feature: MA Experiment 20001457 PARAMETER Experiment Name: At_50mM_NH4NO3_L-to-H_P Parameter: Tissue Value: Siliques
  misc_feature: MA Experiment 20001457 PARAMETER Experiment Name: At_50mM_NH4NO3_L-to-H_P Parameter: Treatment Value: 50mM NH4NO3 vs. 100mM Manitol
  misc_feature: MA Experiment ID: 20001458 Result: Down-regulated in Transcription
  misc_feature: MA Experiment 20001458 PARAMETER Experiment Name: At_50mM_NH4NO3_L-to-H_P Parameter: Age (day) Value: Undefined
  misc_feature: MA Experiment 20001458 PARAMETER Experiment Name: At_50mM_NH4NO3_L-to-H_P Parameter: Organism Value: Undefined
  misc_feature: MA Experiment 20001458 PARAMETER Experiment Name: At_50mM_NH4NO3_L-to-H_P Parameter: Plant Line Value: Undefined
  misc_feature: MA Experiment 20001458 PARAMETER Experiment Name: At_50mM_NH4NO3_L-to-H_P Parameter: Timepoint (hr) Value: 2
  misc_feature: MA Experiment 20001458 PARAMETER Experiment Name: At_50mM_NH4NO3_L-to-H_P Parameter: Tissue Value: Siliques
  misc_feature: MA Experiment 20001458 PARAMETER Experiment Name: At_50mM_NH4NO3_L-to-H_P Parameter: Treatment Value: 50mM NH4NO3 vs. 100mM Manitol
  misc_feature: MA Experiment ID: 20001557 Result: Up-regulated in Transcription
  misc_feature: MA Experiment 20001557 PARAMETER Experiment Name: At_Drought_Soil_Dry_P Parameter: Age (day) Value: 27
  misc_feature: MA Experiment 20001557 PARAMETER Experiment Name: At_Drought_Soil_Dry_P Parameter: Organism Value: A. thaliana
  misc_feature: MA Experiment 20001557 PARAMETER Experiment Name: At_Drought_Soil_Dry_P Parameter: Plant Line Value: WS
  misc_feature: MA Experiment 20001557 PARAMETER Experiment Name: At_Drought_Soil_Dry_P Parameter: Post Timepoint (hr) Value: 3
  misc_feature: MA Experiment 20001557 PARAMETER Experiment Name: At_Drought_Soil_Dry_P Parameter: Post-Treatment Value: Re-Water vs. No Drought
  misc_feature: MA Experiment 20001557 PARAMETER Experiment Name: At_Drought_Soil_Dry_P Parameter: Timepoint (day) Value: 13
  misc_feature: MA Experiment 20001557 PARAMETER Experiment Name: At_Drought_Soil_Dry_P Parameter: Treatment Value: Drought vs. No Drought

SEQ ID NO: 33129 - protein, 570 aa, Arabidopsis thaliana; identical to SEQ ID NO: 29539
  peptide (1)..(570): Ceres Seq. ID no. 13496805
  misc_feature (415)..(558): Pfam Name: Sodium/calcium exchanger protein Pfam Description: Sodium/calcium exchanger protein
  misc_feature (45)..(565): Homolog of NCBI NO: 18483233 NR Description: K-exchanger-like protein [Sorghum bicolor]
  misc_feature (30)..(260): Homolog of NCBI NO: 24960738 NR Description: Putative potassium-dependent sodium-calcium
  misc_feature (313)..(566): Homolog of NCBI NO: 24960738 NR Description: Putative potassium-dependent sodium-calcium
  misc_feature (303)..(566): Homolog of NCBI NO: 18400266 NR Description: cation exchanger, putative (CAX9) [Arabidopsis
  misc_feature (45)..(311): Homolog of NCBI NO: 18400266 NR Description: cation exchanger, putative (CAX9) [Arabidopsis
  misc_feature (3)..(564): Homolog of NCBI NO: 15238663 NR Description: cation exchanger, putative (CAX8) [Arabidopsis
  misc_feature (45)..(260): Homolog of NCBI NO: 18404796 NR Description: cation exchanger, putative [Arabidopsis thaliana]
  misc_feature (303)..(566): Homolog of NCBI NO: 18404796 NR Description: cation exchanger, putative [Arabidopsis thaliana]
  misc_feature (1)..(570): Homolog of NCBI NO: 18087575 NR Description: AT5g17860/MVA3_210 [Arabidopsis thaliana]
  misc_feature (1)..(570): Homolog of NCBI NO: 15238665 NR Description: cation exchanger, putative (CAX7) [Arabidopsis

SEQ ID NO: 33130 - protein, 430 aa, Arabidopsis thaliana; identical to SEQ ID NO: 29540
  peptide (1)..(430): Ceres Seq. ID no. 13496806
  misc_feature (275)..(418): Pfam Name: Sodium/calcium exchanger protein Pfam Description: Sodium/calcium exchanger protein
  misc_feature (1)..(425): Homolog of NCBI NO: 18483233 NR Description: K-exchanger-like protein [Sorghum bicolor]
  misc_feature (1)..(120): Homolog of NCBI NO: 24960738 NR Description: Putative potassium-dependent sodium-calcium
  misc_feature (173)..(426): Homolog of NCBI NO: 24960738 NR Description: Putative potassium-dependent sodium-calcium
  misc_feature (163)..(426): Homolog of NCBI NO: 18400266 NR Description: cation exchanger, putative (CAX9) [Arabidopsis
  misc_feature (1)..(171): Homolog of NCBI NO: 18400266 NR Description: cation exchanger, putative (CAX9) [Arabidopsis
  misc_feature (1)..(424): Homolog of NCBI NO: 15238663 NR Description: cation exchanger, putative (CAX8) [Arabidopsis
  misc_feature (1)..(120): Homolog of NCBI NO: 18404796 NR Description: cation exchanger, putative [Arabidopsis thaliana]
  misc_feature (163)..(426): Homolog of NCBI NO: 18404796 NR Description: cation exchanger, putative [Arabidopsis thaliana]
  misc_feature (1)..(430): Homolog of NCBI NO: 18087575 NR Description: AT5g17860/MVA3_210 [Arabidopsis thaliana]
  misc_feature (1)..(430): Homolog of NCBI NO: 15238665 NR Description: cation exchanger, putative (CAX7) [Arabidopsis

SEQ ID NO: 33131 - protein, 310 aa, Arabidopsis thaliana; identical to SEQ ID NO: 29541
  peptide (1)..(310): Ceres Seq. ID no. 13496807
  misc_feature (155)..(298): Pfam Name: Sodium/calcium exchanger protein Pfam Description: Sodium/calcium exchanger protein
  misc_feature (1)..(302): Homolog of NCBI NO: 15223985 NR Description: cation exchanger, putative (CAX11) [Arabidopsis
  misc_feature (1)..(304): Homolog of NCBI NO: 37534692 NR Description: putative potassium-dependent sodium-calcium
  misc_feature (1)..(305): Homolog of NCBI NO: 18483233 NR Description: K-exchanger-like protein [Sorghum bicolor]
  misc_feature (53)..(306): Homolog of NCBI NO: 24960738 NR Description: Putative potassium-dependent sodium-calcium
  misc_feature (43)..(306): Homolog of NCBI NO: 18400266 NR Description: cation exchanger, putative (CAX9) [Arabidopsis
  misc_feature (1)..(51): Homolog of NCBI NO: 18400266 NR Description: cation exchanger, putative (CAX9) [Arabidopsis
  misc_feature (1)..(304): Homolog of NCBI NO: 15238663 NR Description: cation exchanger, putative (CAX8) [Arabidopsis
  misc_feature (43)..(306): Homolog of NCBI NO: 18404796 NR Description: cation exchanger, putative [Arabidopsis thaliana]
  misc_feature (1)..(310): Homolog of NCBI NO: 18087575 NR Description: AT5g17860/MVA3_210 [Arabidopsis thaliana]
  misc_feature (1)..(310): Homolog of NCBI NO: 15238665 NR Description: cation exchanger, putative (CAX7) [Arabidopsis

SEQ ID NO: 33132 - DNA, 2338 bp, Arabidopsis thaliana; identical to SEQ ID NO: 29542
  misc_feature (1)..(2338): Ceres Seq. ID no. 13497306
  misc_feature: MA Experiment ID: 108434 Result: Up-regulated in Transcription
  misc_feature: MA Experiment 108434 PARAMETER Experiment Name: At_Root_Tips_cDNA_P Parameter: Tissue Value: Root Tips
  misc_feature: MA Experiment ID: 108461 Result: Down-regulated in Transcription
  misc_feature: MA Experiment 108461 PARAMETER Experiment Name: At_Germinating_Seeds_cDNA_P Parameter: Age (day) Value: 1 vs. 0
  misc_feature: MA Experiment 108461 PARAMETER Experiment Name: At_Germinating_Seeds_cDNA_P Parameter: Tissue Value: Germinating Seeds
  misc_feature: MA Experiment ID: 108462 Result: Down-regulated in Transcription
  misc_feature: MA Experiment 108462 PARAMETER Experiment Name: At_Germinating_Seeds_cDNA_P Parameter: Age (day) Value: 2 vs. 0
  misc_feature: MA Experiment 108462 PARAMETER Experiment Name: At_Germinating_Seeds_cDNA_P Parameter: Tissue Value: Germinating Seeds
  misc_feature: MA Experiment ID: 108463 Result: Down-regulated in Transcription
  misc_feature: MA Experiment 108463 PARAMETER Experiment Name: At_Germinating_Seeds_cDNA_P Parameter: Age (day) Value: 3 vs. 0
  misc_feature: MA Experiment 108463 PARAMETER Experiment Name: At_Germinating_Seeds_cDNA_P Parameter: Tissue Value: Germinating Seeds
  misc_feature: MA Experiment ID: 108464 Result: Down-regulated in Transcription
  misc_feature: MA Experiment 108464 PARAMETER Experiment Name: At_Germinating_Seeds_cDNA_P Parameter: Age (day) Value: 4 vs. 0
  misc_feature: MA Experiment 108464 PARAMETER Experiment Name: At_Germinating_Seeds_cDNA_P Parameter: Tissue Value: Germinating Seeds
  misc_feature: MA Experiment ID: 108572 Result: Up-regulated in Transcription
  misc_feature: MA Experiment 108572 PARAMETER Experiment Name: At_Drought_cDNA_P Parameter: Timepoint (hr) Value: 1
  misc_feature: MA Experiment 108572 PARAMETER Experiment Name: At_Drought_cDNA_P Parameter: Tissue Value: Aerial
  misc_feature: MA Experiment 108572 PARAMETER Experiment Name: At_Drought_cDNA_P Parameter: Treatment Value: Drought vs. No Drought
  misc_feature: MA Experiment ID: 108573 Result: Up-regulated in Transcription
  misc_feature: MA Experiment 108573 PARAMETER Experiment Name: At_Drought_cDNA_P Parameter: Timepoint (hr) Value: 6
  misc_feature: MA Experiment 108573 PARAMETER Experiment Name: At_Drought_cDNA_P Parameter: Tissue Value: Aerial
  misc_feature: MA Experiment 108573 PARAMETER Experiment Name: At_Drought_cDNA_P Parameter: Treatment Value: Drought vs. No Drought
  misc_feature: MA Experiment ID: 108574 Result: Up-regulated in Transcription
  misc_feature: MA Experiment 108574 PARAMETER Experiment Name: At_Wounding__cDNA_P Parameter: Timepoint (hr) Value: 1
  misc_feature: MA Experiment 108574 PARAMETER Experiment Name: At_Wounding__cDNA_P Parameter: Tissue Value: Aerial
  misc_feature: MA Experiment 108574 PARAMETER Experiment Name: At_Wounding__cDNA_P Parameter: Treatment Value: Wounding vs. No Wounding
  misc_feature: MA Experiment ID: 108576 Result: Down-regulated in Transcription
  misc_feature: MA Experiment 108576 PARAMETER Experiment Name: At_42deg_Heat_cDNA_P Parameter: Temperature (deg C) Value: 42 vs. 22
  misc_feature: MA Experiment 108576 PARAMETER Experiment Name: At_42deg_Heat_cDNA_P Parameter: Timepoint (hr) Value: 1
  misc_feature: MA Experiment 108576 PARAMETER Experiment Name: At_42deg_Heat_cDNA_P Parameter: Tissue Value: Aerial
  misc_feature: MA Experiment ID: 108585 Result: Up-regulated in Transcription
  misc_feature: MA Experiment 108585 PARAMETER Experiment Name: At_5mM_NaNP_cDNA_P Parameter: Timepoint (hr) Value: 6
  misc_feature: MA Experiment 108585 PARAMETER Experiment Name: At_5mM_NaNP_cDNA_P Parameter: Tissue Value: Aerial
  misc_feature: MA Experiment 108585 PARAMETER Experiment Name: At_5mM_NaNP_cDNA_P Parameter: Treatment Value: null
  misc_feature: MA Experiment ID: 108608 Result: Up-regulated in Transcription
  misc_feature: MA Experiment 108608 PARAMETER Experiment Name: At_100uM_ABA_cDNA_P Parameter: Timepoint (hr) Value: 1
  misc_feature: MA Experiment 108608 PARAMETER Experiment Name: At_100uM_ABA_cDNA_P Parameter: Tissue Value: Aerial
  misc_feature: MA Experiment 108608 PARAMETER Experiment Name: At_100uM_ABA_cDNA_P Parameter: Treatment Value: 100uM ABA vs. No Treatment
  misc_feature: MA Experiment ID: 108668 Result: Up-regulated in Transcription
  misc_feature: MA Experiment 108668 PARAMETER Experiment Name: At_2mM_SA_cDNA_P Parameter: Plant Line Value: WS
  misc_feature: MA Experiment 108668 PARAMETER Experiment Name: At_2mM_SA_cDNA_P Parameter: Timepoint (hr) Value: 6
  misc_feature: MA Experiment 108668 PARAMETER Experiment Name: At_2mM_SA_cDNA_P Parameter: Treatment Value: 2mM SA vs. No Treatment
  misc_feature: MA Experiment ID: 20000069 Result: Up-regulated in Transcription
  misc_feature: MA Experiment 20000069 PARAMETER Experiment Name: At_100uM_ABA_Mutants_cDNA_P Parameter: Plant Line Value: CS23
  misc_feature: MA Experiment 20000069 PARAMETER Experiment Name: At_100uM_ABA_Mutants_cDNA_P Parameter: Timepoint (hr) Value: 6
  misc_feature: MA Experiment 20000069 PARAMETER Experiment Name: At_100uM_ABA_Mutants_cDNA_P Parameter: Tissue Value: Aerial
  misc_feature: MA Experiment 20000069 PARAMETER Experiment Name: At_100uM_ABA_Mutants_cDNA_P Parameter: Treatment Value: 100uM ABA vs. No Treatment
  misc_feature: MA Experiment ID: 20000070 Result: Up-regulated in Transcription
  misc_feature: MA Experiment 20000070 PARAMETER Experiment Name: At_100uM_ABA_Mutants_cDNA_P Parameter: Plant Line Value: CS24
  misc_feature: MA Experiment 20000070 PARAMETER Experiment Name: At_100uM_ABA_Mutants_cDNA_P Parameter: Timepoint (hr) Value: 6
  misc_feature: MA Experiment 20000070 PARAMETER Experiment Name: At_100uM_ABA_Mutants_cDNA_P Parameter: Tissue Value: Aerial
  misc_feature: MA Experiment 20000070 PARAMETER Experiment Name: At_100uM_ABA_Mutants_cDNA_P Parameter: Treatment Value: 100uM ABA vs. No Treatment
  misc_feature: MA Experiment ID: 20000088 Result: Up-regulated in Transcription
  misc_feature: MA Experiment 20000088 PARAMETER Experiment Name: At_100uM_ABA_Mutants_cDNA_P Parameter: Plant Line Value: Landsberg
  misc_feature: MA Experiment 20000088 PARAMETER Experiment Name: At_100uM_ABA_Mutants_cDNA_P Parameter: Timepoint (hr) Value: 6
  misc_feature: MA Experiment 20000088 PARAMETER Experiment Name: At_100uM_ABA_Mutants_cDNA_P Parameter: Tissue Value: Aerial
  misc_feature: MA Experiment 20000088 PARAMETER Experiment Name: At_100uM_ABA_Mutants_cDNA_P Parameter: Treatment Value: 100uM ABA vs. No Treatment
  misc_feature: MA Experiment ID: 20000166 Result: Up-regulated in Transcription
  misc_feature: MA Experiment 20000166 PARAMETER Experiment Name: At_100uM_ABA_P Parameter: Age (day) Value: 14
  misc_feature: MA Experiment 20000166 PARAMETER Experiment Name: At_100uM_ABA_P Parameter: Organism Value: A. thaliana
  misc_feature: MA Experiment 20000166 PARAMETER Experiment Name: At_100uM_ABA_P Parameter: Plant Line Value: WS
  misc_feature: MA Experiment 20000166 PARAMETER Experiment Name: At_100uM_ABA_P Parameter: Timepoint (hr) Value: 1
  misc_feature: MA Experiment 20000166 PARAMETER Experiment Name: At_100uM_ABA_P Parameter: Tissue Value: Aerial
  misc_feature: MA Experiment 20000166 PARAMETER Experiment Name: At_100uM_ABA_P Parameter: Treatment Value: 100uM ABA vs. No Treatment
  misc_feature: MA Experiment ID: 20000182 Result: Up-regulated in Transcription
  misc_feature: MA Experiment 20000182 PARAMETER Experiment Name: At_2mM_SA_P Parameter: Age (day) Value: 14
  misc_feature: MA Experiment 20000182 PARAMETER Experiment Name: At_2mM_SA_P Parameter: Organism Value: A. thaliana
  misc_feature: MA Experiment 20000182 PARAMETER Experiment Name: At_2mM_SA_P Parameter: Plant Line Value: WS
  misc_feature: MA Experiment 20000182 PARAMETER Experiment Name: At_2mM_SA_P Parameter: Timepoint (hr) Value: 6
  misc_feature: MA Experiment 20000182 PARAMETER Experiment Name: At_2mM_SA_P Parameter: Tissue Value: Aerial
  misc_feature: MA Experiment 20000182 PARAMETER Experiment Name: At_2mM_SA_P Parameter: Treatment Value: 2mM SA vs. No Treatment
  misc_feature: MA Experiment ID: 20000436 Result: Up-regulated in Transcription
  misc_feature: MA Experiment 20000436 PARAMETER Experiment Name: At_Drought_P Parameter: Age (day) Value: 7
  misc_feature: MA Experiment 20000436 PARAMETER Experiment Name: At_Drought_P Parameter: Organism Value: A. thaliana
  misc_feature: MA Experiment 20000436 PARAMETER Experiment Name: At_Drought_P Parameter: Plant Line Value: WS
  misc_feature: MA Experiment 20000436 PARAMETER Experiment Name: At_Drought_P Parameter: Timepoint (hr) Value: 12
  misc_feature: MA Experiment 20000436 PARAMETER Experiment Name: At_Drought_P Parameter: Tissue Value: Whole Plant
  misc_feature: MA Experiment 20000436 PARAMETER Experiment Name: At_Drought_P Parameter: Treatment Value: Drought vs. No Drought
  misc_feature: MA Experiment ID: 20000437 Result: Up-regulated in Transcription
  misc_feature: MA Experiment 20000437 PARAMETER Experiment Name: At_Drought_P Parameter: Age (day) Value: 8
  misc_feature: MA Experiment 20000437 PARAMETER Experiment Name: At_Drought_P Parameter: Organism Value: A. thaliana
  misc_feature: MA Experiment 20000437 PARAMETER Experiment Name: At_Drought_P Parameter: Plant Line Value: WS
  misc_feature: MA Experiment 20000437 PARAMETER Experiment Name: At_Drought_P Parameter: Timepoint (hr) Value: 24
  misc_feature: MA Experiment 20000437 PARAMETER Experiment Name: At_Drought_P Parameter: Tissue Value: Whole Plant
  misc_feature: MA Experiment 20000437 PARAMETER Experiment Name: At_Drought_P Parameter: Treatment Value: Drought vs. No Drought
  misc_feature: MA Experiment ID: 20001557 Result: Up-regulated in Transcription
  misc_feature: MA Experiment 20001557 PARAMETER Experiment Name: At_Drought_Soil_Dry_P Parameter: Age (day) Value: 27
  misc_feature: MA Experiment 20001557 PARAMETER Experiment Name: At_Drought_Soil_Dry_P Parameter: Organism Value: A. thaliana
  misc_feature: MA Experiment 20001557 PARAMETER Experiment Name: At_Drought_Soil_Dry_P Parameter: Plant Line Value: WS
  misc_feature: MA Experiment 20001557 PARAMETER Experiment Name: At_Drought_Soil_Dry_P Parameter: Post Timepoint (hr) Value: 3
  misc_feature: MA Experiment 20001557 PARAMETER Experiment Name: At_Drought_Soil_Dry_P Parameter: Post-Treatment Value: Re-Water vs. No Drought
  misc_feature: MA Experiment 20001557 PARAMETER Experiment Name: At_Drought_Soil_Dry_P Parameter: Timepoint (day) Value: 13
  misc_feature: MA Experiment 20001557 PARAMETER Experiment Name: At_Drought_Soil_Dry_P Parameter: Treatment Value: Drought vs. No Drought
  misc_feature: MA Experiment ID: 20001560 Result: Up-regulated in Transcription
  misc_feature: MA Experiment 20001560 PARAMETER Experiment Name: At_Drought_Soil_Dry_P Parameter: Age (day) Value: 28
  misc_feature: MA Experiment 20001560 PARAMETER Experiment Name: At_Drought_Soil_Dry_P Parameter: Organism Value: A. thaliana
  misc_feature: MA Experiment 20001560 PARAMETER Experiment Name: At_Drought_Soil_Dry_P Parameter: Plant Line Value: WS
  misc_feature: MA Experiment 20001560 PARAMETER Experiment Name: At_Drought_Soil_Dry_P Parameter: Post Timepoint (hr) Value: None
  misc_feature: MA Experiment 20001560 PARAMETER Experiment Name: At_Drought_Soil_Dry_P Parameter: Post-Treatment Value: None
  misc_feature: MA Experiment 20001560 PARAMETER Experiment Name: At_Drought_Soil_Dry_P Parameter: Timepoint (day) Value: 14
  misc_feature: MA Experiment 20001560 PARAMETER Experiment Name: At_Drought_Soil_Dry_P Parameter: Treatment Value: Drought vs. No Drought
  misc_feature: MA Experiment ID: 20001905 Result: Up-regulated in Transcription
  misc_feature: MA Experiment 20001905 PARAMETER Experiment Name: At_Drought_Reproduction_P Parameter: Age (day) Value: 40
  misc_feature: MA Experiment 20001905 PARAMETER Experiment Name: At_Drought_Reproduction_P Parameter: Organism Value: A. thaliana
  misc_feature: MA Experiment 20001905 PARAMETER Experiment Name: At_Drought_Reproduction_P Parameter: Plant Line Value: WS
  misc_feature: MA Experiment 20001905 PARAMETER Experiment Name: At_Drought_Reproduction_P Parameter: Timepoint (day) Value: 10
  misc_feature: MA Experiment 20001905 PARAMETER Experiment Name: At_Drought_Reproduction_P Parameter: Tissue Value: Rosettes
  misc_feature: MA Experiment 20001905 PARAMETER Experiment Name: At_Drought_Reproduction_P Parameter: Treatment Value: Drought vs. No Drought
  misc_feature: MA Experiment ID: 20001911 Result: Up-regulated in Transcription
  misc_feature: MA Experiment 20001911 PARAMETER Experiment Name: At_Drought_Reproduction_P Parameter: Age (day) Value: 40
  misc_feature: MA Experiment 20001911 PARAMETER Experiment Name: At_Drought_Reproduction_P Parameter: Organism Value: A. thaliana
  misc_feature: MA Experiment 20001911 PARAMETER Experiment Name: At_Drought_Reproduction_P Parameter: Plant Line Value: WS
  misc_feature: MA Experiment 20001911 PARAMETER Experiment Name: At_Drought_Reproduction_P Parameter: Timepoint (day) Value: 10
  misc_feature: MA Experiment 20001911 PARAMETER Experiment Name: At_Drought_Reproduction_P Parameter: Tissue Value: Flowers
  misc_feature: MA Experiment 20001911 PARAMETER Experiment Name: At_Drought_Reproduction_P Parameter: Treatment Value: Drought vs. No Drought

SEQ ID NO: 33133 - protein, 627 aa, Arabidopsis thaliana; identical to SEQ ID NO: 29543
  peptide (1)..(627): Ceres Seq. ID no. 13497307
  misc_feature (126)..(317): Pfam Name: ABC transporter Pfam Description: ABC transporter
  misc_feature (126)..(317): Pfam Name: ABC transporter Pfam Description: ABC transporter
  misc_feature (32)..(619): Homolog of NCBI NO: 6320874 NR Description: Hypothetical ORF; Yer036cp [Saccharomyces
  misc_feature (37)..(622): Homolog of NCBI NO: 27707592 NR Description: similar to ATP-binding cassette, sub-family F,
  misc_feature (34)..(627): Homolog of NCBI NO: 18859989 NR Description: CG9281-PB [Drosophila melanogaster]
  misc_feature (33)..(622): Homolog of NCBI NO: 27881506 NR Description: ATP-binding cassette, sub-family F, member 2
  misc_feature (33)..(622): Homolog of NCBI NO: 10947137 NR Description: ATP-binding cassette, sub-family F, member 2
  misc_feature (32)..(619): Homolog of NCBI NO: 6320874 NR Description: Hypothetical ORF; Yer036cp [Saccharomyces
  misc_feature (34)..(627): Homolog of NCBI NO: 18859989 NR Description: CG9281-PB [Drosophila melanogaster]
  misc_feature (33)..(622): Homolog of NCBI NO: 10947137 NR Description: ATP-binding cassette, sub-family F, member 2
  misc_feature (33)..(627): Homolog of NCBI NO: 28071305 NR Description: putative ABC transporter [Oryza sativa (japonica
  misc_feature (33)..(578): Homolog of NCBI NO: 7573600 NR Description: ABC transporter homolog [Populus nigra]
  misc_feature (33)..(624): Homolog of NCBI NO: 28436765 NR Description: Similar to ATP-binding cassette, sub-family F
  misc_feature (33)..(622): Homolog of NCBI NO: 28502799 NR Description: Similar to ATP-binding cassette, sub-family F
  misc_feature (33)..(622): Homolog of NCBI NO: 10179834 NR Description: iron inhibited ABC transporter 2 [Homo sapiens]
  misc_feature (33)..(622): Homolog of NCBI NO: 27881506 NR Description: ATP-binding cassette, sub-family F, member 2
  misc_feature (37)..(622): Homolog of NCBI NO: 27707592 NR Description: similar to ATP-binding cassette, sub-family F,
  misc_feature (33)..(622): Homolog of NCBI NO: 10179834 NR Description: iron inhibited ABC transporter 2 [Homo sapiens]
  misc_feature (33)..(622): Homolog of NCBI NO: 28502799 NR Description: Similar to ATP-binding cassette, sub-family F
  misc_feature (33)..(624): Homolog of NCBI NO: 28436765 NR Description: Similar to ATP-binding cassette, sub-family F
  misc_feature (33)..(578): Homolog of NCBI NO: 7573600 NR Description: ABC transporter homolog [Populus nigra]
  misc_feature (33)..(627): Homolog of NCBI NO: 28071305 NR Description: putative ABC transporter [Oryza sativa (japonica

SEQ ID NO: 33134 - protein, 595 aa, Arabidopsis thaliana; identical to SEQ ID NO: 29544
  peptide (1)..(595): Ceres Seq. ID no. 13497308
  misc_feature (94)..(285): Pfam Name: ABC transporter Pfam Description: ABC transporter
  misc_feature (94)..(285): Pfam Name: ABC transporter Pfam Description: ABC transporter
  misc_feature (1)..(587): Homolog of NCBI NO: 6320874 NR Description: Hypothetical ORF; Yer036cp [Saccharomyces
  misc_feature (5)..(590): Homolog of NCBI NO: 27707592 NR Description: similar to ATP-binding cassette, sub-family F,
  misc_feature (2)..(595): Homolog of NCBI NO: 18859989 NR Description: CG9281-PB [Drosophila melanogaster]
  misc_feature (1)..(590): Homolog of NCBI NO: 27881506 NR Description: ATP-binding cassette, sub-family F, member 2
  misc_feature (1)..(590): Homolog of NCBI NO: 10947137 NR Description: ATP-binding cassette, sub-family F, member 2
  misc_feature (1)..(587): Homolog of NCBI NO: 6320874 NR Description: Hypothetical ORF; Yer036cp [Saccharomyces
  misc_feature (2)..(595): Homolog of NCBI NO: 18859989 NR Description: CG9281-PB [Drosophila melanogaster]
  misc_feature (1)..(590): Homolog of NCBI NO: 10947137 NR Description: ATP-binding cassette, sub-family F, member 2
  misc_feature (1)..(595): Homolog of NCBI NO: 28071305 NR Description: putative ABC transporter [Oryza sativa (japonica
  misc_feature (1)..(546): Homolog of NCBI NO: 7573600 NR Description: ABC transporter homolog [Populus nigra]
  misc_feature (1)..(592): Homolog of NCBI NO: 28436765 NR Description: Similar to ATP-binding cassette, sub-family F
  misc_feature (1)..(590): Homolog of NCBI NO: 28502799 NR Description: Similar to ATP-binding cassette, sub-family F
  misc_feature (1)..(590): Homolog of NCBI NO: 10179834 NR Description: iron inhibited ABC transporter 2 [Homo sapiens]
  misc_feature (1)..(590): Homolog of NCBI NO: 27881506 NR Description: ATP-binding cassette, sub-family F, member 2
  misc_feature (5)..(590): Homolog of NCBI NO: 27707592 NR Description: similar to ATP-binding cassette, sub-family F,
  misc_feature (1)..(590): Homolog of NCBI NO: 10179834 NR Description: iron inhibited ABC transporter 2 [Homo sapiens]
  misc_feature (1)..(590): Homolog of NCBI NO: 28502799 NR Description: Similar to ATP-binding cassette, sub-family F
  misc_feature (1)..(592): Homolog of NCBI NO: 28436765 NR Description: Similar to ATP-binding cassette, sub-family F
  misc_feature (1)..(546): Homolog of NCBI NO: 7573600 NR Description: ABC transporter homolog [Populus nigra]
  misc_feature (1)..(595): Homolog of NCBI NO: 28071305 NR Description: putative ABC transporter [Oryza sativa (japonica

SEQ ID NO: 33135 - protein, 508 aa, Arabidopsis thaliana; identical to SEQ ID NO: 29545
  peptide (1)..(508): Ceres Seq. ID no. 13497309
  misc_feature (7)..(198): Pfam Name: ABC transporter Pfam Description: ABC transporter
  misc_feature (7)..(198): Pfam Name: ABC transporter Pfam Description: ABC transporter
  misc_feature (1)..(500): Homolog of NCBI NO: 6320874 NR Description: Hypothetical ORF; Yer036cp [Saccharomyces
  misc_feature (1)..(503): Homolog of NCBI NO: 27707592 NR Description: similar to ATP-binding cassette, sub-family F,
  misc_feature (1)..(508): Homolog of NCBI NO: 18859989 NR Description: CG9281-PB [Drosophila melanogaster]
  misc_feature (1)..(503): Homolog of NCBI NO: 27881506 NR Description: ATP-binding cassette, sub-family F, member 2
  misc_feature (1)..(503): Homolog of NCBI NO: 10947137 NR Description: ATP-binding cassette, sub-family F, member 2
  misc_feature (1)..(500): Homolog of NCBI NO: 6320874 NR Description: Hypothetical ORF; Yer036cp [Saccharomyces
  misc_feature (1)..(508): Homolog of NCBI NO: 18859989 NR Description: CG9281-PB [Drosophila melanogaster]
  misc_feature (1)..(503): Homolog of NCBI NO: 10947137 NR Description: ATP-binding cassette, sub-family F, member 2
  misc_feature (1)..(508): Homolog of NCBI NO: 28071305 NR Description: putative ABC transporter [Oryza sativa (japonica
  misc_feature (1)..(459): Homolog of NCBI NO: 7573600 NR Description: ABC transporter homolog [Populus nigra]
  misc_feature (1)..(505): Homolog of NCBI NO: 28436765 NR Description: Similar to ATP-binding cassette, sub-family F
  misc_feature (1)..(503): Homolog of NCBI NO: 28502799 NR Description: Similar to ATP-binding cassette, sub-family F
  misc_feature (1)..(503): Homolog of NCBI NO: 10179834 NR Description: iron inhibited ABC transporter 2 [Homo sapiens]
  misc_feature (1)..(503): Homolog of NCBI NO: 27881506 NR Description: ATP-binding cassette, sub-family F, member 2
  misc_feature (1)..(503): Homolog of NCBI NO: 27707592 NR Description: similar to ATP-binding cassette, sub-family F,
  misc_feature (1)..(503): Homolog of NCBI NO: 10179834 NR Description: iron inhibited ABC transporter 2 [Homo sapiens]
  misc_feature (1)..(503): Homolog of NCBI NO: 28502799 NR Description: Similar to ATP-binding cassette, sub-family F
  misc_feature (1)..(505): Homolog of NCBI NO: 28436765 NR Description: Similar to ATP-binding cassette, sub-family F
  misc_feature (1)..(459): Homolog of NCBI NO: 7573600 NR Description: ABC transporter homolog [Populus nigra]
  misc_feature (1)..(508): Homolog of NCBI NO: 28071305 NR Description: putative ABC transporter [Oryza sativa (japonica

SEQ ID NO: 33136 - DNA, 1129 bp, Arabidopsis thaliana; identical to SEQ ID NO: 29546
  misc_feature (1)..(1129): Ceres Seq. ID no. 12332178
  misc_feature: MA Experiment ID: 108434 Result: Down-regulated in Transcription
  misc_feature: MA Experiment 108434 PARAMETER Experiment Name: At_Root_Tips_cDNA_P Parameter: Tissue Value: Root Tips
  misc_feature: MA Experiment ID: 108461 Result: Up-regulated in Transcription
  misc_feature: MA Experiment 108461 PARAMETER Experiment Name: At_Germinating_Seeds_cDNA_P Parameter: Age (day) Value: 1 vs. 0
  misc_feature: MA Experiment 108461 PARAMETER Experiment Name: At_Germinating_Seeds_cDNA_P Parameter: Tissue Value: Germinating Seeds
  misc_feature: MA Experiment ID: 108462 Result: Up-regulated in Transcription
  misc_feature: MA Experiment 108462 PARAMETER Experiment Name: At_Germinating_Seeds_cDNA_P Parameter: Age (day) Value: 2 vs. 0
  misc_feature: MA Experiment 108462 PARAMETER Experiment Name: At_Germinating_Seeds_cDNA_P Parameter: Tissue Value: Germinating Seeds
  misc_feature: MA Experiment ID: 108464 Result: Up-regulated in Transcription
  misc_feature: MA Experiment 108464 PARAMETER Experiment Name: At_Germinating_Seeds_cDNA_P Parameter: Age (day) Value: 4 vs. 0
  misc_feature: MA Experiment 108464 PARAMETER Experiment Name: At_Germinating_Seeds_cDNA_P Parameter: Tissue Value: Germinating Seeds
  misc_feature: MA Experiment ID: 108573 Result: Up-regulated in Transcription
  misc_feature: MA Experiment 108573 PARAMETER Experiment Name: At_Drought_cDNA_P Parameter: Timepoint (hr) Value: 6
  misc_feature: MA Experiment 108573 PARAMETER Experiment Name: At_Drought_cDNA_P Parameter: Tissue Value: Aerial
  misc_feature: MA Experiment 108573 PARAMETER Experiment Name: At_Drought_cDNA_P Parameter: Treatment Value: Drought vs. No Drought
  misc_feature: MA Experiment ID: 108595 Result: Down-regulated in Transcription
  misc_feature: MA Experiment 108595 PARAMETER Experiment Name: At_Ler-pi_Ovule_cDNA_P Parameter: Plant Line Value: null
  misc_feature: MA Experiment ID: 20000180 Result: Up-regulated in Transcription
  misc_feature: MA Experiment 20000180 PARAMETER Experiment Name: At_Germinating_Seeds_P Parameter: Age (hr) Value: 24 vs. 0
  misc_feature: MA Experiment 20000180 PARAMETER Experiment Name: At_Germinating_Seeds_P Parameter: Tissue Value: Germinating Seeds
  misc_feature: MA Experiment ID: 20000264 Result: Down-regulated in Transcription
  misc_feature: MA Experiment 20000264 PARAMETER Experiment Name: At_Open_Flower_P Parameter: Age (day) Value: 21
  misc_feature: MA Experiment 20000264 PARAMETER Experiment Name: At_Open_Flower_P Parameter: Plant Line Value: WS
  misc_feature: MA Experiment 20000264 PARAMETER Experiment Name: At_Open_Flower_P Parameter: Tissue Value: Open Flower vs. Whole Plant
  misc_feature: MA Experiment ID: 20000265 Result: Down-regulated in Transcription
  misc_feature: MA Experiment 20000265 PARAMETER Experiment Name: At_Open_Flower_P Parameter: Age (day) Value: 21
  misc_feature: MA Experiment 20000265 PARAMETER Experiment Name: At_Open_Flower_P Parameter: Plant Line Value: WS
  misc_feature: MA Experiment 20000265 PARAMETER Experiment Name: At_Open_Flower_P Parameter: Tissue Value: Closed Flower vs. Whole Plant
  misc_feature: MA Experiment ID: 20000437 Result: Down-regulated in Transcription
  misc_feature: MA Experiment 20000437 PARAMETER Experiment Name: At_Drought_P Parameter: Age (day) Value: 8
  misc_feature: MA Experiment 20000437 PARAMETER Experiment Name: At_Drought_P Parameter: Organism Value: A. thaliana
  misc_feature: MA Experiment 20000437 PARAMETER Experiment Name: At_Drought_P Parameter: Plant Line Value: WS
  misc_feature: MA Experiment 20000437 PARAMETER Experiment Name: At_Drought_P Parameter: Timepoint (hr) Value: 24
  misc_feature: MA Experiment 20000437 PARAMETER Experiment Name: At_Drought_P Parameter: Tissue Value: Whole Plant
  misc_feature: MA Experiment 20000437 PARAMETER Experiment Name: At_Drought_P Parameter: Treatment Value: Drought vs. No Drought
  misc_feature: MA Experiment ID: 20000441 Result: Up-regulated in Transcription
  misc_feature: MA Experiment 20000441 PARAMETER Experiment Name: At_1uM_BR-BRZ__P Parameter: Tissue Value: Shoot Apices
  misc_feature: MA Experiment 20000441 PARAMETER Experiment Name: At_1uM_BR-BRZ__P Parameter: Treatment Value: 1uM BR vs. No Treatment
  misc_feature: MA Experiment ID: 20000445 Result: Down-regulated in Transcription
  misc_feature: MA Experiment 20000445 PARAMETER Experiment Name: At_100uM_NAA__P Parameter: Age (day) Value: 14
  misc_feature: MA Experiment 20000445 PARAMETER Experiment Name: At_100uM_NAA__P Parameter: Organism Value: A. thaliana
  misc_feature: MA Experiment 20000445 PARAMETER Experiment Name: At_100uM_NAA__P Parameter: Plant Line Value: WS
  misc_feature: MA Experiment 20000445 PARAMETER Experiment Name: At_100uM_NAA__P Parameter: Timepoint (hr) Value: 6
  misc_feature: MA Experiment 20000445 PARAMETER Experiment Name: At_100uM_NAA__P Parameter: Tissue Value: Aerial
  misc_feature: MA Experiment 20000445 PARAMETER Experiment Name: At_100uM_NAA__P Parameter: Treatment Value: 100uM NAA vs. No Treatment
  misc_feature: MA Experiment ID: 20001450 Result: Up-regulated in Transcription
  misc_feature: MA Experiment 20001450 PARAMETER Experiment Name: At_Far-red-induction_P Parameter: Age (day) Value: 7
  misc_feature: MA Experiment 20001450 PARAMETER Experiment Name: At_Far-red-induction_P Parameter: Light Value: Far-red vs. White
  misc_feature: MA Experiment 20001450 PARAMETER Experiment Name: At_Far-red-induction_P Parameter: Organism Value: A. thaliana
  misc_feature: MA Experiment 20001450 PARAMETER Experiment Name: At_Far-red-induction_P Parameter: Plant Line Value: Columbia
  misc_feature: MA Experiment 20001450 PARAMETER Experiment Name: At_Far-red-induction_P Parameter: Timepoint (hr) Value: 8
  misc_feature: MA Experiment 20001450 PARAMETER Experiment Name: At_Far-red-induction_P Parameter: Tissue Value: Whole Plant
  misc_feature: MA Experiment ID: 20001451 Result: Up-regulated in Transcription
  misc_feature: MA Experiment 20001451 PARAMETER Experiment Name: At_Far-red-induction_P Parameter: Age (day) Value: 7
  misc_feature: MA Experiment 20001451 PARAMETER Experiment Name: At_Far-red-induction_P Parameter: Light Value: Far-red vs. White
  misc_feature: MA Experiment 20001451 PARAMETER Experiment Name: At_Far-red-induction_P Parameter: Organism Value: A. thaliana
  misc_feature: MA Experiment 20001451 PARAMETER Experiment Name: At_Far-red-induction_P Parameter: Plant Line Value: Columbia
  misc_feature: MA Experiment 20001451 PARAMETER Experiment Name: At_Far-red-induction_P Parameter: Timepoint (hr) Value: 24
  misc_feature: MA Experiment 20001451 PARAMETER Experiment Name: At_Far-red-induction_P Parameter: Tissue Value: Whole Plant
  misc_feature: MA Experiment ID: 20001555 Result: Down-regulated in Transcription
  misc_feature: MA Experiment 20001555 PARAMETER Experiment Name: At_Drought_Soil_Dry_P Parameter: Age (day) Value: 24
  misc_feature: MA Experiment 20001555 PARAMETER Experiment Name: At_Drought_Soil_Dry_P Parameter: Organism Value: A. thaliana
  misc_feature: MA Experiment 20001555 PARAMETER Experiment Name: At_Drought_Soil_Dry_P Parameter: Plant Line Value: WS
  misc_feature: MA Experiment 20001555 PARAMETER Experiment Name: At_Drought_Soil_Dry_P Parameter: Post Timepoint (hr) Value: None
  misc_feature: MA Experiment 20001555 PARAMETER Experiment Name: At_Drought_Soil_Dry_P Parameter: Post-Treatment Value: None
  misc_feature: MA Experiment 20001555 PARAMETER Experiment Name: At_Drought_Soil_Dry_P Parameter: Timepoint (day) Value: 10
  misc_feature: MA Experiment 20001555 PARAMETER Experiment Name: At_Drought_Soil_Dry_P Parameter: Treatment Value: Drought vs. No Drought
  misc_feature: MA Experiment ID: 20001556 Result: Down-regulated in Transcription
  misc_feature: MA Experiment 20001556 PARAMETER Experiment Name: At_Drought_Soil_Dry_P Parameter: Age (day) Value: 26
  misc_feature: MA Experiment 20001556 PARAMETER Experiment Name: At_Drought_Soil_Dry_P Parameter: Organism Value: A. thaliana
  misc_feature: MA Experiment 20001556 PARAMETER Experiment Name: At_Drought_Soil_Dry_P Parameter: Plant Line Value: WS
  misc_feature: MA Experiment 20001556 PARAMETER Experiment Name: At_Drought_Soil_Dry_P Parameter: Post Timepoint (hr) Value: None
  misc_feature: MA Experiment 20001556 PARAMETER Experiment Name: At_Drought_Soil_Dry_P Parameter: Post-Treatment Value: None
  misc_feature: MA Experiment 20001556 PARAMETER Experiment Name: At_Drought_Soil_Dry_P Parameter: Timepoint (day) Value: 12
  misc_feature: MA Experiment 20001556 PARAMETER Experiment Name: At_Drought_Soil_Dry_P Parameter: Treatment Value: Drought vs. No Drought
  misc_feature: MA Experiment ID: 20001557 Result: Down-regulated in Transcription
  misc_feature: MA Experiment 20001557 PARAMETER Experiment Name: At_Drought_Soil_Dry_P Parameter: Age (day) Value: 27
  misc_feature: MA Experiment 20001557 PARAMETER Experiment Name: At_Drought_Soil_Dry_P Parameter: Organism Value: A. thaliana
  misc_feature: MA Experiment 20001557 PARAMETER Experiment Name: At_Drought_Soil_Dry_P Parameter: Plant Line Value: WS
  misc_feature: MA Experiment 20001557 PARAMETER Experiment Name: At_Drought_Soil_Dry_P Parameter: Post Timepoint (hr) Value: 3
  misc_feature: MA Experiment 20001557 PARAMETER Experiment Name: At_Drought_Soil_Dry_P Parameter: Post-Treatment Value: Re-Water vs. No Drought
  misc_feature: MA Experiment 20001557 PARAMETER Experiment Name: At_Drought_Soil_Dry_P Parameter: Timepoint (day) Value: 13
  misc_feature: MA Experiment 20001557 PARAMETER Experiment Name: At_Drought_Soil_Dry_P Parameter: Treatment Value: Drought vs. No Drought
  misc_feature: MA Experiment ID: 20001559 Result: Down-regulated in Transcription
  misc_feature: MA Experiment 20001559 PARAMETER Experiment Name: At_Drought_Soil_Dry_P Parameter: Age (day) Value: 28
  misc_feature: MA Experiment 20001559 PARAMETER Experiment Name: At_Drought_Soil_Dry_P Parameter: Organism Value: A. thaliana
  misc_feature: MA Experiment 20001559 PARAMETER Experiment Name: At_Drought_Soil_Dry_P Parameter: Plant Line Value: WS
  misc_feature: MA Experiment 20001559 PARAMETER Experiment Name: At_Drought_Soil_Dry_P Parameter: Post Timepoint (hr) Value: 29
  misc_feature: MA Experiment 20001559 PARAMETER Experiment Name: At_Drought_Soil_Dry_P Parameter: Post-Treatment Value: Re-Water vs. No Drought
  misc_feature: MA Experiment 20001559 PARAMETER Experiment Name: At_Drought_Soil_Dry_P Parameter: Timepoint (day) Value: 14
  misc_feature: MA Experiment 20001559 PARAMETER Experiment Name: At_Drought_Soil_Dry_P Parameter: Treatment Value: Drought vs. No Drought
  misc_feature: MA Experiment ID: 20001757 Result: Up-regulated in Transcription
  misc_feature: MA Experiment 20001757 PARAMETER Experiment Name: At_50mM_NH4NO3_L-to-H_P Parameter: Timepoint (hr) Value: 6
  misc_feature: MA Experiment 20001757 PARAMETER Experiment Name: At_50mM_NH4NO3_L-to-H_P Parameter: Tissue Value: Leaf
  misc_feature: MA Experiment 20001757 PARAMETER Experiment Name: At_50mM_NH4NO3_L-to-H_P Parameter: Treatment Value: 50mM NH4NO3 vs 100mM Mannitol
  misc_feature: MA Experiment ID: 20001905 Result: Down-regulated in Transcription
  misc_feature: MA Experiment 20001905 PARAMETER Experiment Name: At_Drought_Reproduction_P Parameter: Age (day) Value: 40
  misc_feature: MA Experiment 20001905 PARAMETER Experiment Name: At_Drought_Reproduction_P Parameter: Organism Value: A. thaliana
  misc_feature: MA Experiment 20001905 PARAMETER Experiment Name: At_Drought_Reproduction_P Parameter: Plant Line Value: WS
  misc_feature: MA Experiment 20001905 PARAMETER Experiment Name: At_Drought_Reproduction_P Parameter: Timepoint (day) Value: 10
  misc_feature: MA Experiment 20001905 PARAMETER Experiment Name: At_Drought_Reproduction_P Parameter: Tissue Value: Rosettes
  misc_feature: MA Experiment 20001905 PARAMETER Experiment Name: At_Drought_Reproduction_P Parameter: Treatment Value: Drought vs. No Drought
  misc_feature: MA Experiment ID: 20001907 Result: Down-regulated in Transcription
  misc_feature: MA Experiment 20001907 PARAMETER Experiment Name: At_Drought_Reproduction_P Parameter: Age (day) Value: 37
  misc_feature: MA Experiment 20001907 PARAMETER Experiment Name: At_Drought_Reproduction_P Parameter: Organism Value: A. thaliana
  misc_feature: MA Experiment 20001907 PARAMETER Experiment Name: At_Drought_Reproduction_P Parameter: Plant Line Value: WS
  misc_feature: MA Experiment 20001907 PARAMETER Experiment Name: At_Drought_Reproduction_P Parameter: Timepoint (day) Value: 7
  misc_feature: MA Experiment 20001907 PARAMETER Experiment Name: At_Drought_Reproduction_P Parameter: Tissue Value: Siliques
  misc_feature: MA Experiment 20001907 PARAMETER Experiment Name: At_Drought_Reproduction_P Parameter: Treatment Value: Drought vs. No Drought
  misc_feature: MA Experiment ID: 20001911 Result: Down-regulated in Transcription
  misc_feature: MA Experiment 20001911 PARAMETER Experiment Name: At_Drought_Reproduction_P Parameter: Age (day) Value: 40
  misc_feature: MA Experiment 20001911 PARAMETER Experiment Name: At_Drought_Reproduction_P Parameter: Organism Value: A. thaliana
  misc_feature: MA Experiment 20001911 PARAMETER Experiment Name: At_Drought_Reproduction_P Parameter: Plant Line Value: WS
  misc_feature: MA Experiment 20001911 PARAMETER Experiment Name: At_Drought_Reproduction_P Parameter: Timepoint (day) Value: 10
  misc_feature: MA Experiment 20001911 PARAMETER Experiment Name: At_Drought_Reproduction_P Parameter: Tissue Value: Flowers
  misc_feature: MA Experiment 20001911 PARAMETER Experiment Name: At_Drought_Reproduction_P Parameter: Treatment Value: Drought vs. No Drought

SEQ ID NO: 33137 - protein, 253 aa, Arabidopsis thaliana; identical to SEQ ID NO: 29547
  peptide (1)..(253): Ceres Seq. ID no. 12332179
  misc_feature (1)..(241): Homolog of NCBI NO: 99747 NR Description: probable membrane channel protein RB7 -
  misc_feature (1)..(253): Homolog of NCBI NO: 21284370 NR Description: tonoplast intrinsic protein bobTIP26-1
  misc_feature (1)..(253): Homolog of NCBI NO: 22858917 NR Description: tonoplast intrinsic protein bobTIP26-2
  misc_feature (1)..(253): Homolog of NCBI NO: 15228041 NR Description: putative aquaporin (tonoplast intrinsic protein
  misc_feature (1)..(253): Homolog of NCBI NO: 475048 NR Description: tonoplast intrinsic protein gamma (gamma-TIP)
  misc_feature (1)..(253): Homolog of NCBI NO: 21593151 NR Description: putative aquaporin (tonoplast intrinsic protein
  misc_feature (1)..(253): Homolog of NCBI NO: 1514977 NR Description: VM23 [Raphanus sativus]
  misc_feature (1)..(253): Homolog of NCBI NO: 5081419 NR Description: tonoplast intrinsic protein [Brassica napus]
  misc_feature (1)..(253): Homolog of NCBI NO: 11357300 NR Description: gamma tonoplast intrinsic protein 2
  misc_feature (1)..(253): Homolog of NCBI NO: 15231569 NR Description: gamma tonoplast intrinsic protein

SEQ ID NO: 33138 - DNA, 2121 bp, Arabidopsis thaliana; identical to SEQ ID NO: 24365
  misc_feature (1)..(2121): Ceres Seq. ID no. 12601883
  misc_feature: MA Experiment ID: 20000169 Result: Down-regulated in Transcription
  misc_feature: MA Experiment 20000169 PARAMETER Experiment Name: At_100uM_ABA_P Parameter: Age (day) Value: 14
  misc_feature: MA Experiment 20000169 PARAMETER Experiment Name: At_100uM_ABA_P Parameter: Organism Value: A. thaliana
  misc_feature: MA Experiment 20000169 PARAMETER Experiment Name: At_100uM_ABA_P Parameter: Plant Line Value: WS
  misc_feature: MA Experiment 20000169 PARAMETER Experiment Name: At_100uM_ABA_P Parameter: Timepoint (hr) Value: 6
  misc_feature: MA Experiment 20000169 PARAMETER Experiment Name: At_100uM_ABA_P Parameter: Tissue Value: Aerial
  misc_feature: MA Experiment 20000169 PARAMETER Experiment Name: At_100uM_ABA_P Parameter: Treatment Value: 100uM ABA vs. No Treatment
  misc_feature: MA Experiment ID: 20000180 Result: Up-regulated in Transcription
  misc_feature: MA Experiment 20000180 PARAMETER Experiment Name: At_Germinating_Seeds_P Parameter: Age (hr) Value: 24 vs. 0
  misc_feature: MA Experiment 20000180 PARAMETER Experiment Name: At_Germinating_Seeds_P Parameter: Tissue Value: Germinating Seeds
  misc_feature: MA Experiment ID: 20000214 Result: Up-regulated in Transcription
  misc_feature: MA Experiment 20000214 PARAMETER Experiment Name: At_4deg_Cold_P Parameter: Timepoint (hr) Value: 6
  misc_feature: MA Experiment ID: 20000234 Result: Up-regulated in Transcription
  misc_feature: MA Experiment 20000234 PARAMETER Experiment Name: At_Siliques_P Parameter: Age (day) Value: 21
  misc_feature: MA Experiment 20000234 PARAMETER Experiment Name: At_Siliques_P Parameter: Organism Value: A. thaliana
  misc_feature: MA Experiment 20000234 PARAMETER Experiment Name: At_Siliques_P Parameter: Plant Line Value: WS
  misc_feature: MA Experiment 20000234 PARAMETER Experiment Name: At_Siliques_P Parameter: Tissue Value: Less Than 5mm Siliques vs. Whole Plant
  misc_feature: MA Experiment ID: 20000436 Result: Down-regulated in Transcription
  misc_feature: MA Experiment 20000436 PARAMETER Experiment Name: At_Drought_P Parameter: Age (day) Value: 7
  misc_feature: MA Experiment 20000436 PARAMETER Experiment Name: At_Drought_P Parameter: Organism Value: A. thaliana
  misc_feature: MA Experiment 20000436 PARAMETER Experiment Name: At_Drought_P Parameter: Plant Line Value: WS
  misc_feature: MA Experiment 20000436 PARAMETER Experiment Name: At_Drought_P Parameter: Timepoint (hr) Value: 12
  misc_feature: MA Experiment 20000436 PARAMETER Experiment Name: At_Drought_P Parameter: Tissue Value: Whole Plant
  misc_feature: MA Experiment 20000436 PARAMETER Experiment Name: At_Drought_P Parameter: Treatment Value: Drought vs. No Drought
  misc_feature: MA Experiment ID: 20000437 Result: Down-regulated in Transcription
  misc_feature: MA Experiment 20000437 PARAMETER Experiment Name: At_Drought_P Parameter: Age (day) Value: 8
  misc_feature: MA Experiment 20000437 PARAMETER Experiment Name: At_Drought_P Parameter: Organism Value: A. thaliana
  misc_feature: MA Experiment 20000437 PARAMETER Experiment Name: At_Drought_P Parameter: Plant Line Value: WS
  misc_feature: MA Experiment 20000437 PARAMETER Experiment Name: At_Drought_P Parameter: Timepoint (hr) Value: 24
  misc_feature: MA Experiment 20000437 PARAMETER Experiment Name: At_Drought_P Parameter: Tissue Value: Whole Plant
  misc_feature: MA Experiment 20000437 PARAMETER Experiment Name: At_Drought_P Parameter: Treatment Value: Drought vs. No Drought
  misc_feature: MA Experiment ID: 20000438 Result: Up-regulated in Transcription
  misc_feature: MA Experiment 20000438 PARAMETER Experiment Name: At_Shoots__P Parameter: Age (day) Value: 14
  misc_feature: MA Experiment 20000438 PARAMETER Experiment Name: At_Shoots__P Parameter: Tissue Value: Shoots vs. Whole Plant
  misc_feature: MA Experiment ID: 20000439 Result: Down-regulated in Transcription
  misc_feature: MA Experiment 20000439 PARAMETER Experiment Name: At_Roots__P Parameter: Age (day) Value: 14 vs. 21
  misc_feature: MA Experiment 20000439 PARAMETER Experiment Name: At_Roots__P Parameter: Organism Value: A. thaliana
  misc_feature: MA Experiment 20000439 PARAMETER Experiment Name: At_Roots__P Parameter: Tissue Value: Roots vs. Whole Plant
  misc_feature: MA Experiment ID: 20000451 Result: Up-regulated in Transcription
  misc_feature: MA Experiment 20000451 PARAMETER Experiment Name: At_CS6879_Shoots-Roots_P Parameter: Age (day) Value: 14
  misc_feature: MA Experiment 20000451 PARAMETER Experiment Name: At_CS6879_Shoots-Roots_P Parameter: Organism Value: A. thaliana
  misc_feature: MA Experiment 20000451 PARAMETER Experiment Name: At_CS6879_Shoots-Roots_P Parameter: Plant Line Value: CS6879 vs. WS
  misc_feature: MA Experiment 20000451 PARAMETER Experiment Name: At_CS6879_Shoots-Roots_P Parameter: Tissue Value: Roots
  misc_feature: MA Experiment ID: 20000794 Result: Down-regulated in Transcription
  misc_feature: MA Experiment 20000794 PARAMETER Experiment Name: At_Petals_P Parameter: Age (day) Value: 23-25 days
  misc_feature: MA Experiment 20000794 PARAMETER Experiment Name: At_Petals_P Parameter: Plant Line Value: WS
  misc_feature: MA Experiment 20000794 PARAMETER Experiment Name: At_Petals_P Parameter: Tissue Value: Petals vs. Whole plant
  misc_feature: MA Experiment ID: 20001248 Result: Down-regulated in Transcription
  misc_feature: MA Experiment 20001248 PARAMETER Experiment Name: At_Far-red-induction_P Parameter: Age (day) Value: 7
  misc_feature: MA Experiment 20001248 PARAMETER Experiment Name: At_Far-red-induction_P Parameter: Light Value: Far-red vs. White
  misc_feature: MA Experiment 20001248 PARAMETER Experiment Name: At_Far-red-induction_P Parameter: Organism Value: A. thaliana
  misc_feature: MA Experiment 20001248 PARAMETER Experiment Name: At_Far-red-induction_P Parameter: Plant Line Value: Columbia
  misc_feature: MA Experiment 20001248 PARAMETER Experiment Name: At_Far-red-induction_P Parameter: Timepoint (hr) Value: 4
  misc_feature: MA Experiment 20001248 PARAMETER Experiment Name: At_Far-red-induction_P Parameter: Tissue Value: Whole Plant
  misc_feature: MA Experiment ID: 20001450 Result: Down-regulated in Transcription
  misc_feature: MA Experiment 20001450 PARAMETER Experiment Name: At_Far-red-induction_P Parameter: Age (day) Value: 7
  misc_feature: MA Experiment 20001450 PARAMETER Experiment Name: At_Far-red-induction_P Parameter: Light Value: Far-red vs. White
  misc_feature: MA Experiment 20001450 PARAMETER Experiment Name: At_Far-red-induction_P Parameter: Organism Value: A. thaliana
  misc_feature: MA Experiment 20001450 PARAMETER Experiment Name: At_Far-red-induction_P Parameter: Plant Line Value: Columbia
  misc_feature: MA Experiment 20001450 PARAMETER Experiment Name: At_Far-red-induction_P Parameter: Timepoint (hr) Value: 8
  misc_feature: MA Experiment 20001450 PARAMETER Experiment Name: At_Far-red-induction_P Parameter: Tissue Value: Whole Plant
  misc_feature: MA Experiment ID: 20001451 Result: Down-regulated in Transcription
  misc_feature: MA Experiment 20001451 PARAMETER Experiment Name: At_Far-red-induction_P Parameter: Age (day) Value: 7
  misc_feature: MA Experiment 20001451 PARAMETER Experiment Name: At_Far-red-induction_P Parameter: Light Value: Far-red vs. White
  misc_feature: MA Experiment 20001451 PARAMETER Experiment Name: At_Far-red-induction_P Parameter: Organism Value: A. thaliana
  misc_feature: MA Experiment 20001451 PARAMETER Experiment Name: At_Far-red-induction_P Parameter: Plant Line Value: Columbia
  misc_feature: MA Experiment 20001451 PARAMETER Experiment Name: At_Far-red-induction_P Parameter: Timepoint (hr) Value: 24
  misc_feature: MA Experiment 20001451 PARAMETER Experiment Name: At_Far-red-induction_P Parameter: Tissue Value: Whole Plant
  misc_feature: MA Experiment ID: 20001757 Result: Up-regulated in Transcription
  misc_feature: MA Experiment 20001757 PARAMETER Experiment Name: At_50mM_NH4NO3_L-to-H_P Parameter: Timepoint (hr) Value: 6
  misc_feature: MA Experiment 20001757 PARAMETER Experiment Name: At_50mM_NH4NO3_L-to-H_P Parameter: Tissue Value: Leaf
  misc_feature: MA Experiment 20001757 PARAMETER Experiment Name: At_50mM_NH4NO3_L-to-H_P Parameter: Treatment Value: 50mM NH4NO3 vs 100mM Mannitol
  misc_feature: MA Experiment ID: 20001904 Result: Down-regulated in Transcription
  misc_feature: MA Experiment 20001904 PARAMETER Experiment Name: At_Drought_Reproduction_P Parameter: Age (day) Value: 37
  misc_feature: MA Experiment 20001904 PARAMETER Experiment Name: At_Drought_Reproduction_P Parameter: Organism Value: A. thaliana
  misc_feature: MA Experiment 20001904 PARAMETER Experiment Name: At_Drought_Reproduction_P Parameter: Plant Line Value: WS
  misc_feature: MA Experiment 20001904 PARAMETER Experiment Name: At_Drought_Reproduction_P Parameter: Timepoint (day) Value: 7
  misc_feature: MA Experiment 20001904 PARAMETER Experiment Name: At_Drought_Reproduction_P Parameter: Tissue Value: Rosettes
  misc_feature: MA Experiment 20001904 PARAMETER Experiment Name: At_Drought_Reproduction_P Parameter: Treatment Value: Drought vs. No Drought
  misc_feature: MA Experiment ID: 20001906 Result: Down-regulated in Transcription
  misc_feature: MA Experiment 20001906 PARAMETER Experiment Name: At_Drought_Reproduction_P Parameter: Age (day) Value: 35
  misc_feature: MA Experiment 20001906 PARAMETER Experiment Name: At_Drought_Reproduction_P Parameter: Organism Value: A. thaliana
  misc_feature: MA Experiment 20001906 PARAMETER Experiment Name: At_Drought_Reproduction_P Parameter: Plant Line Value: WS
  misc_feature: MA Experiment 20001906 PARAMETER Experiment Name: At_Drought_Reproduction_P Parameter: Timepoint (day) Value: 5
  misc_feature: MA Experiment 20001906 PARAMETER Experiment Name: At_Drought_Reproduction_P Parameter: Tissue Value: Siliques
  misc_feature: MA Experiment 20001906 PARAMETER Experiment Name: At_Drought_Reproduction_P Parameter: Treatment Value: Drought vs. No Drought

SEQ ID NO: 33139 - protein, 181 aa, Arabidopsis thaliana; identical to SEQ ID NO: 24366
  peptide (1)..(181): Ceres Seq. ID no. 12601884
  misc_feature (56)..(175): Pfam Name: Ribulose bisphosphate carboxylase, small chain Pfam Description: Ribulose bisphosphate carboxylase, small chain
  misc_feature (56)..(175): Pfam Name: Ribulose bisphosphate carboxylase, small chain Pfam Description: Ribulose bisphosphate carboxylase, small chain
  misc_feature (56)..(175): Pfam Name: Ribulose bisphosphate carboxylase, small chain Pfam Description: Ribulose bisphosphate carboxylase, small chain
  misc_feature (56)..(175): Pfam Name: Ribulose bisphosphate carboxylase, small chain Pfam Description: Ribulose bisphosphate carboxylase, small chain
  misc_feature (1)..(179): Homolog of NCBI NO: 68063 NR Description: ribulose-bisphosphate carboxylase (EC 4.1.1.39)
  misc_feature (1)..(181): Homolog of NCBI NO: 132154 NR Description: Ribulose bisphosphate carboxylase small chain,
  misc_feature (1)..(179): Homolog of NCBI NO: 15219826 NR Description: ribulose-bisphosphate carboxylase small unit,
  misc_feature (1)..(181): Homolog of NCBI NO: 266891 NR Description: Ribulose bisphosphate carboxylase small chain,
  misc_feature (1)..(181): Homolog of NCBI NO: 132091 NR Description: Ribulose bisphosphate carboxylase small chain F1,
  misc_feature (1)..(179): Homolog of NCBI NO: 68063 NR Description: ribulose-bisphosphate carboxylase (EC 4.1.1.39)
  misc_feature (1)..(179): Homolog of NCBI NO: 15219826 NR Description: ribulose-bisphosphate carboxylase small unit,
  misc_feature (1)..(181): Homolog of NCBI NO: 132091 NR Description: Ribulose bisphosphate carboxylase small chain F1,
  misc_feature (1)..(181): Homolog of NCBI NO: 266891 NR Description: Ribulose bisphosphate carboxylase small chain,
  misc_feature (1)..(179): Homolog of NCBI NO: 15219826 NR Description: ribulose-bisphosphate carboxylase small unit,
  misc_feature (1)..(181): Homolog of NCBI NO: 132154 NR Description: Ribulose bisphosphate carboxylase small chain,
  misc_feature (1)..(179): Homolog of NCBI NO: 68063 NR Description: ribulose-bisphosphate carboxylase (EC 4.1.1.39)
  misc_feature (1)..(181): Homolog of NCBI NO: 15240912 NR Description: ribulose bisphosphate carboxylase small chain 1b
  misc_feature (1)..(181): Homolog of NCBI NO: 68061 NR Description: ribulose-bisphosphate carboxylase (EC 4.1.1.39)
  misc_feature (1)..(181): Homolog of NCBI NO: 15240903 NR Description: ribulose bisphosphate carboxylase small chain 2b
  misc_feature (1)..(181): Homolog of NCBI NO: 68060 NR Description: ribulose-bisphosphate carboxylase (EC 4.1.1.39)
  misc_feature (1)..(181): Homolog of NCBI NO: 15240901 NR Description: ribulose bisphosphate carboxylase small chain 3b
  misc_feature (1)..(181): Homolog of NCBI NO: 15240912 NR Description: ribulose bisphosphate carboxylase small chain 1b
  misc_feature (1)..(181): Homolog of NCBI NO: 68061 NR Description: ribulose-bisphosphate carboxylase (EC 4.1.1.39)
  misc_feature (1)..(181): Homolog of NCBI NO: 15240903 NR Description: ribulose bisphosphate carboxylase small chain 2b
  misc_feature (1)..(181): Homolog of NCBI NO: 68060 NR Description: ribulose-bisphosphate carboxylase (EC 4.1.1.39)
  misc_feature (1)..(181): Homolog of NCBI NO: 15240901 NR Description: ribulose bisphosphate carboxylase small chain 3b
  misc_feature (1)..(181): Homolog of NCBI NO: 132091 NR Description: Ribulose bisphosphate carboxylase small chain F1,
  misc_feature (1)..(181): Homolog of NCBI NO: 266891 NR Description: Ribulose bisphosphate carboxylase small chain,
  misc_feature (1)..(179): Homolog of NCBI NO: 15219826 NR Description: ribulose-bisphosphate carboxylase small unit,
  misc_feature (1)..(181): Homolog of NCBI NO: 132154 NR Description: Ribulose bisphosphate carboxylase small chain,
  misc_feature (1)..(179): Homolog of NCBI NO: 68063 NR Description: ribulose-bisphosphate carboxylase (EC 4.1.1.39)
  misc_feature (1)..(181): Homolog of NCBI NO: 15240912 NR Description: ribulose bisphosphate carboxylase small chain 1b
  misc_feature (1)..(181): Homolog of NCBI NO: 68061 NR Description: ribulose-bisphosphate carboxylase (EC 4.1.1.39)
  misc_feature (1)..(181): Homolog of NCBI NO: 15240903 NR Description: ribulose bisphosphate carboxylase small chain 2b
  misc_feature (1)..(181): Homolog of NCBI NO: 68060 NR Description: ribulose-bisphosphate carboxylase (EC 4.1.1.39)
  misc_feature (1)..(181): Homolog of NCBI NO: 15240901 NR Description: ribulose bisphosphate carboxylase small chain 3b
  misc_feature (1)..(181): Homolog of NCBI NO: 132091 NR Description: Ribulose bisphosphate carboxylase small chain F1,
  misc_feature (1)..(181): Homolog of NCBI NO: 266891 NR Description: Ribulose bisphosphate carboxylase small chain,
  misc_feature (1)..(181): Homolog of NCBI NO: 132154 NR Description: Ribulose bisphosphate carboxylase small chain,
  misc_feature (1)..(181): Homolog of NCBI NO: 15240901 NR Description: ribulose bisphosphate carboxylase small chain 3b
  misc_feature (1)..(181): Homolog of NCBI NO: 68060 NR Description: ribulose-bisphosphate carboxylase (EC 4.1.1.39)
  misc_feature (1)..(181): Homolog of NCBI NO: 15240903 NR Description: ribulose bisphosphate carboxylase small chain 2b
  misc_feature (1)..(181): Homolog of NCBI NO: 68061 NR Description: ribulose-bisphosphate carboxylase (EC 4.1.1.39)
  misc_feature (1)..(181): Homolog of NCBI NO: 15240912 NR Description: ribulose bisphosphate carboxylase small chain 1b

SEQ ID NO: 33140 - protein, 177 aa, Arabidopsis thaliana; identical to SEQ ID NO: 24367
  peptide (1)..(177): Ceres Seq. ID no. 12601885
  misc_feature (52)..(171): Pfam Name: Ribulose bisphosphate carboxylase, small chain Pfam Description: Ribulose bisphosphate carboxylase, small chain
  misc_feature (52)..(171): Pfam Name: Ribulose bisphosphate carboxylase, small chain Pfam Description: Ribulose bisphosphate carboxylase, small chain
  misc_feature (52)..(171): Pfam Name: Ribulose bisphosphate carboxylase, small chain Pfam Description: Ribulose bisphosphate carboxylase, small chain
  misc_feature (52)..(171): Pfam Name: Ribulose bisphosphate carboxylase, small chain Pfam Description: Ribulose bisphosphate carboxylase, small chain
  misc_feature (1)..(175): Homolog of NCBI NO: 68063 NR Description: ribulose-bisphosphate carboxylase (EC 4.1.1.39)
  misc_feature (1)..(177): Homolog of NCBI NO: 132154 NR Description: Ribulose bisphosphate carboxylase small chain,
  misc_feature (1)..(175): Homolog of NCBI NO: 15219826 NR Description: ribulose-bisphosphate carboxylase small unit,
  misc_feature (1)..(177): Homolog of NCBI NO: 266891 NR Description: Ribulose bisphosphate carboxylase small chain,
  misc_feature (1)..(177): Homolog of NCBI NO: 132091 NR Description: Ribulose bisphosphate carboxylase small chain F1,
  misc_feature (1)..(175): Homolog of NCBI NO: 68063 NR Description: ribulose-bisphosphate carboxylase (EC 4.1.1.39)
  misc_feature (1)..(175): Homolog of NCBI NO: 15219826 NR Description: ribulose-bisphosphate carboxylase small unit,
  misc_feature (1)..(177): Homolog of NCBI NO: 132091 NR Description: Ribulose bisphosphate carboxylase small chain F1,
  misc_feature (1)..(177): Homolog of NCBI NO: 266891 NR Description: Ribulose bisphosphate carboxylase small chain,
  misc_feature (1)..(175): Homolog of NCBI NO: 15219826 NR Description: ribulose-bisphosphate carboxylase small unit,
  misc_feature (1)..(177): Homolog of NCBI NO: 132154 NR Description: Ribulose bisphosphate carboxylase small chain,
  misc_feature (1)..(175): Homolog of NCBI NO: 68063 NR Description: ribulose-bisphosphate carboxylase (EC 4.1.1.39)
  misc_feature (1)..(177): Homolog of NCBI NO: 15240912 NR Description: ribulose bisphosphate carboxylase small chain 1b
  misc_feature (1)..(177): Homolog of NCBI NO: 68061 NR Description: ribulose-bisphosphate carboxylase (EC 4.1.1.39)
  misc_feature (1)..(177): Homolog of NCBI NO: 15240903 NR Description: ribulose bisphosphate carboxylase small chain 2b
  misc_feature (1)..(177): Homolog of NCBI NO: 68060 NR Description: ribulose-bisphosphate carboxylase (EC 4.1.1.39)
  misc_feature (1)..(177): Homolog of NCBI NO: 15240901 NR Description: ribulose bisphosphate carboxylase small chain 3b
  misc_feature (1)..(177): Homolog of NCBI NO: 15240901 NR Description: ribulose bisphosphate carboxylase small chain 3b
  misc_feature (1)..(177): Homolog of NCBI NO: 132091 NR Description: Ribulose bisphosphate carboxylase small chain F1,
  misc_feature (1)..(177): Homolog of NCBI NO: 266891 NR Description: Ribulose bisphosphate carboxylase small chain,
  misc_feature (1)..(175): Homolog of NCBI NO: 15219826 NR Description: ribulose-bisphosphate carboxylase small unit,
  misc_feature (1)..(177): Homolog of NCBI NO: 132154 NR Description: Ribulose bisphosphate carboxylase small chain,
  misc_feature (1)..(175): Homolog of NCBI NO: 68063 NR Description: ribulose-bisphosphate carboxylase (EC 4.1.1.39)
  misc_feature (1)..(177): Homolog of NCBI NO: 15240912 NR Description: ribulose bisphosphate carboxylase small chain 1b
  misc_feature (1)..(177): Homolog of NCBI NO: 68061 NR Description: ribulose-bisphosphate carboxylase (EC 4.1.1.39)
  misc_feature (1)..(177): Homolog of NCBI NO: 15240903 NR Description: ribulose bisphosphate carboxylase small chain 2b
  misc_feature (1)..(177): Homolog of NCBI NO: 68060 NR Description: ribulose-bisphosphate carboxylase (EC 4.1.1.39)
  misc_feature (1)..(177): Homolog of NCBI NO: 15240912 NR Description: ribulose bisphosphate carboxylase small chain 1b
  misc_feature (1)..(177): Homolog of NCBI NO: 68061 NR Description: ribulose-bisphosphate carboxylase (EC 4.1.1.39)
  misc_feature (1)..(177): Homolog of NCBI NO: 15240903 NR Description: ribulose bisphosphate carboxylase small chain 2b
  misc_feature (1)..(177): Homolog of NCBI NO: 68060 NR Description: ribulose-bisphosphate carboxylase (EC 4.1.1.39)
  misc_feature (1)..(177): Homolog of NCBI NO: 15240901 NR Description: ribulose bisphosphate carboxylase small chain 3b
  misc_feature (1)..(177): Homolog of NCBI NO: 132091 NR Description: Ribulose bisphosphate carboxylase small chain F1,
  misc_feature (1)..(177): Homolog of NCBI NO: 266891 NR Description: Ribulose bisphosphate carboxylase small chain,
  misc_feature (1)..(177): Homolog of NCBI NO: 132154 NR Description: Ribulose bisphosphate carboxylase small chain,
  misc_feature (1)..(177): Homolog of NCBI NO: 15240901 NR Description: ribulose bisphosphate carboxylase small chain 3b
  misc_feature (1)..(177): Homolog of NCBI NO: 68060 NR Description: ribulose-bisphosphate carboxylase (EC 4.1.1.39)
  misc_feature (1)..(177): Homolog of NCBI NO: 15240903 NR Description: ribulose bisphosphate carboxylase small chain 2b
  misc_feature (1)..(177): Homolog of NCBI NO: 68061 NR Description: ribulose-bisphosphate carboxylase (EC 4.1.1.39)
  misc_feature (1)..(177): Homolog of NCBI NO: 15240912 NR Description: ribulose bisphosphate carboxylase small chain 1b

SEQ ID NO: 33141 - protein, 162 aa, Arabidopsis thaliana; identical to SEQ ID NO: 24368
  peptide (1)..(162): Ceres Seq. ID no. 12601886
  misc_feature (37)..(156): Pfam Name: Ribulose bisphosphate carboxylase, small chain Pfam Description: Ribulose bisphosphate carboxylase, small chain
  misc_feature (37)..(156): Pfam Name: Ribulose bisphosphate carboxylase, small chain Pfam Description: Ribulose bisphosphate carboxylase, small chain
  misc_feature (37)..(156): Pfam Name: Ribulose bisphosphate carboxylase, small chain Pfam Description: Ribulose bisphosphate carboxylase, small chain
  misc_feature (37)..(156): Pfam Name: Ribulose bisphosphate carboxylase, small chain Pfam Description: Ribulose bisphosphate carboxylase, small chain
  misc_feature (1)..(160): Homolog of NCBI NO: 68063 NR Description: ribulose-bisphosphate carboxylase (EC 4.1.1.39)
  misc_feature (1)..(162): Homolog of NCBI NO: 132154 NR Description: Ribulose bisphosphate carboxylase small chain,
  misc_feature (1)..(160): Homolog of NCBI NO: 15219826 NR Description: ribulose-bisphosphate carboxylase small unit,
  misc_feature (1)..(162): Homolog of NCBI NO: 266891 NR Description: Ribulose bisphosphate carboxylase small chain,
  misc_feature (1)..(162): Homolog of NCBI NO: 132091 NR Description: Ribulose bisphosphate carboxylase small chain F1,
  misc_feature (1)..(160): Homolog of NCBI NO: 68063 NR Description: ribulose-bisphosphate carboxylase (EC 4.1.1.39)
  misc_feature (1)..(160): Homolog of NCBI NO: 15219826 NR Description: ribulose-bisphosphate carboxylase small unit,
  misc_feature (1)..(162): Homolog of NCBI NO: 132091 NR Description: Ribulose bisphosphate carboxylase small chain F1,
  misc_feature (1)..(162): Homolog of NCBI NO: 266891 NR Description: Ribulose bisphosphate carboxylase small chain,
  misc_feature (1)..(160): Homolog of NCBI NO: 15219826 NR Description: ribulose-bisphosphate carboxylase small unit,
  misc_feature (1)..(162): Homolog of NCBI NO: 132154 NR Description: Ribulose bisphosphate carboxylase small chain,
  misc_feature (1)..(160): Homolog of NCBI NO: 68063 NR Description: ribulose-bisphosphate carboxylase (EC 4.1.1.39)
  misc_feature (1)..(162): Homolog of NCBI NO: 15240912 NR Description: ribulose bisphosphate carboxylase small chain 1b
  misc_feature (1)..(162): Homolog of NCBI NO: 68061 NR Description: ribulose-bisphosphate carboxylase (EC 4.1.1.39)
  misc_feature (1)..(162): Homolog of NCBI NO: 15240903 NR Description: ribulose bisphosphate carboxylase small chain 2b
  misc_feature (1)..(162): Homolog of NCBI NO: 68060 NR Description: ribulose-bisphosphate carboxylase (EC 4.1.1.39)
  misc_feature (1)..(162): Homolog of NCBI NO: 15240901 NR Description: ribulose bisphosphate carboxylase small chain 3b
  misc_feature (1)..(162): Homolog of NCBI NO: 15240912 NR Description: ribulose bisphosphate carboxylase small chain 1b
  misc_feature (1)..(162): Homolog of NCBI NO: 68061 NR Description: ribulose-bisphosphate carboxylase (EC 4.1.1.39)
  misc_feature (1)..(162): Homolog of NCBI NO: 15240903 NR Description: ribulose bisphosphate carboxylase small chain 2b
  misc_feature (1)..(162): Homolog of NCBI NO: 68060 NR Description: ribulose-bisphosphate carboxylase (EC 4.1.1.39)
  misc_feature (1)..(162): Homolog of NCBI NO: 15240901 NR Description: ribulose bisphosphate carboxylase small chain 3b
  misc_feature (1)..(162): Homolog of NCBI NO: 132091 NR Description: Ribulose bisphosphate carboxylase small chain F1,
  misc_feature (1)..(162): Homolog of NCBI NO: 266891 NR Description: Ribulose bisphosphate carboxylase small chain,
  misc_feature (1)..(160): Homolog of NCBI NO: 15219826 NR Description: ribulose-bisphosphate carboxylase small unit,
  misc_feature (1)..(162): Homolog of NCBI NO: 132154 NR Description: Ribulose bisphosphate carboxylase small chain,
  misc_feature (1)..(160): Homolog of NCBI NO: 68063 NR Description: ribulose-bisphosphate carboxylase (EC 4.1.1.39)
  misc_feature (1)..(162): Homolog of NCBI NO: 15240912 NR Description: ribulose bisphosphate carboxylase small chain 1b
  misc_feature (1)..(162): Homolog of NCBI NO: 68061 NR Description: ribulose-bisphosphate carboxylase (EC 4.1.1.39)
  misc_feature (1)..(162): Homolog of NCBI NO: 15240903 NR Description: ribulose bisphosphate carboxylase small chain 2b
  misc_feature (1)..(162): Homolog of NCBI NO: 68060 NR Description: ribulose-bisphosphate carboxylase (EC 4.1.1.39)
  misc_feature (1)..(162): Homolog of NCBI NO: 15240901 NR Description: ribulose bisphosphate carboxylase small chain 3b
  misc_feature (1)..(162): Homolog of NCBI NO: 132091 NR Description: Ribulose bisphosphate carboxylase small chain F1,
  misc_feature (1)..(162): Homolog of NCBI NO: 266891 NR Description: Ribulose bisphosphate carboxylase small chain,
  misc_feature (1)..(162): Homolog of NCBI NO: 132154 NR Description: Ribulose bisphosphate carboxylase small chain,
  misc_feature (1)..(162): Homolog of NCBI NO: 15240901 NR Description: ribulose bisphosphate carboxylase small chain 3b
  misc_feature (1)..(162): Homolog of NCBI NO: 68060 NR Description: ribulose-bisphosphate carboxylase (EC 4.1.1.39)
  misc_feature (1)..(162): Homolog of NCBI NO: 15240903 NR Description: ribulose bisphosphate carboxylase small chain 2b
  misc_feature (1)..(162): Homolog of NCBI NO: 68061 NR Description: ribulose-bisphosphate carboxylase (EC 4.1.1.39)
  misc_feature (1)..(162): Homolog of NCBI NO: 15240912 NR Description: ribulose bisphosphate carboxylase small chain 1b

SEQ ID NO: 33142 - DNA, 607 bp, Arabidopsis thaliana; identical to SEQ ID NO: 29552
  misc_feature (1)..(607): Ceres Seq. ID no. 12332180
  misc_feature: MA Experiment ID: 108434 Result: Up-regulated in Transcription
  misc_feature: MA Experiment 108434 PARAMETER Experiment Name: At_Root_Tips_cDNA_P Parameter: Tissue Value: Root Tips
  misc_feature: MA Experiment ID: 108462 Result: Up-regulated in Transcription
  misc_feature: MA Experiment 108462 PARAMETER Experiment Name: At_Germinating_Seeds_cDNA_P Parameter: Age (day) Value: 2 vs. 0
  misc_feature: MA Experiment 108462 PARAMETER Experiment Name: At_Germinating_Seeds_cDNA_P Parameter: Tissue Value: Germinating Seeds
  misc_feature: MA Experiment ID: 108488 Result: Down-regulated in Transcription
  misc_feature: MA Experiment ID: 20000093 Result: Down-regulated in Transcription
  misc_feature: MA Experiment 20000093 PARAMETER Experiment Name: At_42deg_Heat_cDNA_P Parameter: Temperature (deg C) Value: 42 vs. 22
  misc_feature: MA Experiment 20000093 PARAMETER Experiment Name: At_42deg_Heat_cDNA_P Parameter: Timepoint (hr) Value: 0.5
  misc_feature: MA Experiment 20000093 PARAMETER Experiment Name: At_42deg_Heat_cDNA_P Parameter: Tissue Value: Aerial
  misc_feature: MA Experiment ID: 20000113 Result: Down-regulated in Transcription
  misc_feature: MA Experiment 20000113 PARAMETER Experiment Name: At_42deg_Heat_cDNA_P Parameter: Temperature (deg C) Value: 42 vs. 22
  misc_feature: MA Experiment 20000113 PARAMETER Experiment Name: At_42deg_Heat_cDNA_P Parameter: Timepoint (hr) Value: 8
  misc_feature: MA Experiment 20000113 PARAMETER Experiment Name: At_42deg_Heat_cDNA_P Parameter: Tissue Value: Aerial
  misc_feature: MA Experiment ID: 20000180 Result: Up-regulated in Transcription
  misc_feature: MA Experiment 20000180 PARAMETER Experiment Name: At_Germinating_Seeds_P Parameter: Age (hr) Value: 24 vs. 0
  misc_feature: MA Experiment 20000180 PARAMETER Experiment Name: At_Germinating_Seeds_P Parameter: Tissue Value: Germinating Seeds
  misc_feature: MA Experiment ID: 20000234 Result: Up-regulated in Transcription
  misc_feature: MA Experiment 20000234 PARAMETER Experiment Name: At_Siliques_P Parameter: Age (day) Value: 21
  misc_feature: MA Experiment 20000234 PARAMETER Experiment Name: At_Siliques_P Parameter: Organism Value: A. thaliana
  misc_feature: MA Experiment 20000234 PARAMETER Experiment Name: At_Siliques_P Parameter: Plant Line Value: WS
  misc_feature: MA Experiment 20000234 PARAMETER Experiment Name: At_Siliques_P Parameter: Tissue Value: Less Than 5mm Siliques vs. Whole Plant
  misc_feature: MA Experiment ID: 20000235 Result: Up-regulated in Transcription
  misc_feature: MA Experiment 20000235 PARAMETER Experiment Name: At_Siliques_P Parameter: Age (day) Value: 21
  misc_feature: MA Experiment 20000235 PARAMETER Experiment Name: At_Siliques_P Parameter: Organism Value: A. thaliana
  misc_feature: MA Experiment 20000235 PARAMETER Experiment Name: At_Siliques_P Parameter: Plant Line Value: WS
  misc_feature: MA Experiment 20000235 PARAMETER Experiment Name: At_Siliques_P Parameter: Tissue Value: 5-10mm Siliques vs. Whole Plant
  misc_feature: MA Experiment ID: 20000264 Result: Up-regulated in Transcription
  misc_feature: MA Experiment 20000264 PARAMETER Experiment Name: At_Open_Flower_P Parameter: Age (day) Value: 21
  misc_feature: MA Experiment 20000264 PARAMETER Experiment Name: At_Open_Flower_P Parameter: Plant Line Value: WS
  misc_feature: MA Experiment 20000264 PARAMETER Experiment Name: At_Open_Flower_P Parameter: Tissue Value: Open Flower vs. Whole Plant
  misc_feature: MA Experiment ID: 20000265 Result: Up-regulated in Transcription
  misc_feature: MA Experiment 20000265 PARAMETER Experiment Name: At_Open_Flower_P Parameter: Age (day) Value: 21
  misc_feature: MA Experiment 20000265 PARAMETER Experiment Name: At_Open_Flower_P Parameter: Plant Line Value: WS
  misc_feature: MA Experiment 20000265 PARAMETER Experiment Name: At_Open_Flower_P Parameter: Tissue Value: Closed Flower vs. Whole Plant
  misc_feature: MA Experiment ID: 20000286 Result: Up-regulated in Transcription
  misc_feature: MA Experiment 20000286 PARAMETER Experiment Name: At_Open_Flower_P Parameter: Age (day) Value: 21
  misc_feature: MA Experiment 20000286 PARAMETER Experiment Name: At_Open_Flower_P Parameter: Plant Line Value: WS
  misc_feature: MA Experiment 20000286 PARAMETER Experiment Name: At_Open_Flower_P Parameter: Tissue Value: Half Open vs. Whole Plant
  misc_feature: MA Experiment ID: 20001450 Result: Down-regulated in Transcription
  misc_feature: MA Experiment 20001450 PARAMETER Experiment Name: At_Far-red-induction_P Parameter: Age (day) Value: 7
  misc_feature: MA Experiment 20001450 PARAMETER Experiment Name: At_Far-red-induction_P Parameter: Light Value: Far-red vs. White
  misc_feature: MA Experiment 20001450 PARAMETER Experiment Name: At_Far-red-induction_P Parameter: Organism Value: A. thaliana
  misc_feature: MA Experiment 20001450 PARAMETER Experiment Name: At_Far-red-induction_P Parameter: Plant Line Value: Columbia
  misc_feature: MA Experiment 20001450 PARAMETER Experiment Name: At_Far-red-induction_P Parameter: Timepoint (hr) Value: 8
  misc_feature: MA Experiment 20001450 PARAMETER Experiment Name: At_Far-red-induction_P Parameter: Tissue Value: Whole Plant
  misc_feature: MA Experiment ID: 20001560 Result: Up-regulated in Transcription
  misc_feature: MA Experiment 20001560 PARAMETER Experiment Name: At_Drought_Soil_Dry_P Parameter: Age (day) Value: 28
  misc_feature: MA Experiment 20001560 PARAMETER Experiment Name: At_Drought_Soil_Dry_P Parameter: Organism Value: A. thaliana
  misc_feature: MA Experiment 20001560 PARAMETER Experiment Name: At_Drought_Soil_Dry_P Parameter: Plant Line Value: WS
  misc_feature: MA Experiment 20001560 PARAMETER Experiment Name: At_Drought_Soil_Dry_P Parameter: Post Timepoint (hr) Value: None
  misc_feature: MA Experiment 20001560 PARAMETER Experiment Name: At_Drought_Soil_Dry_P Parameter: Post-Treatment Value: None
  misc_feature: MA Experiment 20001560 PARAMETER Experiment Name: At_Drought_Soil_Dry_P Parameter: Timepoint (day) Value: 14
  misc_feature: MA Experiment 20001560 PARAMETER Experiment Name: At_Drought_Soil_Dry_P Parameter: Treatment Value: Drought vs. No Drought
  misc_feature: MA Experiment ID: 20001905 Result: Up-regulated in Transcription
  misc_feature: MA Experiment 20001905 PARAMETER Experiment Name: At_Drought_Reproduction_P Parameter: Age (day) Value: 40
  misc_feature: MA Experiment 20001905 PARAMETER Experiment Name: At_Drought_Reproduction_P Parameter: Organism Value: A. thaliana
  misc_feature: MA Experiment 20001905 PARAMETER Experiment Name: At_Drought_Reproduction_P Parameter: Plant Line Value: WS
  misc_feature: MA Experiment 20001905 PARAMETER Experiment Name: At_Drought_Reproduction_P Parameter: Timepoint (day) Value: 10
  misc_feature: MA Experiment 20001905 PARAMETER Experiment Name: At_Drought_Reproduction_P Parameter: Tissue Value: Rosettes
  misc_feature: MA Experiment 20001905 PARAMETER Experiment Name: At_Drought_Reproduction_P Parameter: Treatment Value: Drought vs. No Drought

SEQ ID NO: 33143 - protein, 132 aa, Arabidopsis thaliana; identical to SEQ ID NO: 29553
  peptide (1)..(132): Ceres Seq. ID no. 12332181
  misc_feature (4)..(121): Pfam Name: Core histone H2A/H2B/H3/H4 Pfam Description: Core histone H2A/H2B/H3/H4
  misc_feature (1)..(132): Homolog of NCBI NO: 7439702 NR Description: histone H2A (clone TH254) - wheat
  misc_feature (1)..(132): Homolog of NCBI NO: 34393263 NR Description: histone H2A [Oryza sativa (japonica
  misc_feature (1)..(132): Homolog of NCBI NO: 34393264 NR Description: putative histone H2A [Oryza sativa (japonica
  misc_feature (1)..(132): Homolog of NCBI NO: 29837243 NR Description: putative histone H2A [Oryza sativa (japonica
  misc_feature (1)..(132): Homolog of NCBI NO: 2130105 NR Description: histone H2A.4 - wheat
  misc_feature (1)..(132): Homolog of NCBI NO: 21617982 NR Description: histone H2A-like protein [Arabidopsis thaliana]
  misc_feature (1)..(132): Homolog of NCBI NO: 15237024 NR Description: histone H2A- like protein
  misc_feature (1)..(130): Homolog of NCBI NO: 15239697 NR Description: histone H2A (gb|AAF64418.1)
  misc_feature (1)..(132): Homolog of NCBI NO: 15223708 NR Description: histone H2A, putative
  misc_feature (1)..(132): Homolog of NCBI NO: 15232330 NR Description: histone H2A, putative

SEQ ID NO: 33144 - DNA, 854 bp, Arabidopsis thaliana; identical to SEQ ID NO: 29554
  misc_feature (1)..(854): Ceres Seq. ID no. 12333072
  misc_feature: MA Experiment ID: 108434 Result: Up-regulated in Transcription
  misc_feature: MA Experiment 108434 PARAMETER Experiment Name: At_Root_Tips_cDNA_P Parameter: Tissue Value: Root Tips
  misc_feature: MA Experiment ID: 108462 Result: Down-regulated in Transcription
  misc_feature: MA Experiment 108462 PARAMETER Experiment Name: At_Germinating_Seeds_cDNA_P Parameter: Age (day) Value: 2 vs. 0
  misc_feature: MA Experiment 108462 PARAMETER Experiment Name: At_Germinating_Seeds_cDNA_P Parameter: Tissue Value: Germinating Seeds
  misc_feature: MA Experiment ID: 108463 Result: Down-regulated in Transcription
  misc_feature: MA Experiment 108463 PARAMETER Experiment Name: At_Germinating_Seeds_cDNA_P Parameter: Age (day) Value: 3 vs. 0
  misc_feature: MA Experiment 108463 PARAMETER Experiment Name: At_Germinating_Seeds_cDNA_P Parameter: Tissue Value: Germinating Seeds
  misc_feature: MA Experiment ID: 108464 Result: Down-regulated in Transcription
  misc_feature: MA Experiment 108464 PARAMETER Experiment Name: At_Germinating_Seeds_cDNA_P Parameter: Age (day) Value: 4 vs. 0
  misc_feature: MA Experiment 108464 PARAMETER Experiment Name: At_Germinating_Seeds_cDNA_P Parameter: Tissue Value: Germinating Seeds
  misc_feature: MA Experiment ID: 20000794 Result: Down-regulated in Transcription
  misc_feature: MA Experiment 20000794 PARAMETER Experiment Name: At_Petals_P Parameter: Age (day) Value: 23-25 days
  misc_feature: MA Experiment 20000794 PARAMETER Experiment Name: At_Petals_P Parameter: Plant Line Value: WS
  misc_feature: MA Experiment 20000794 PARAMETER Experiment Name: At_Petals_P Parameter: Tissue Value: Petals vs. Whole plant
  misc_feature: MA Experiment ID: 20001556 Result: Up-regulated in Transcription
  misc_feature: MA Experiment 20001556 PARAMETER Experiment Name: At_Drought_Soil_Dry_P Parameter: Age (day) Value: 26
  misc_feature: MA Experiment 20001556 PARAMETER Experiment Name: At_Drought_Soil_Dry_P Parameter: Organism Value: A. thaliana
  misc_feature: MA Experiment 20001556 PARAMETER Experiment Name: At_Drought_Soil_Dry_P Parameter: Plant Line Value: WS
  misc_feature: MA Experiment 20001556 PARAMETER Experiment Name: At_Drought_Soil_Dry_P Parameter: Post Timepoint (hr) Value: None
  misc_feature: MA Experiment 20001556 PARAMETER Experiment Name: At_Drought_Soil_Dry_P Parameter: Post-Treatment Value: None
  misc_feature: MA Experiment 20001556 PARAMETER Experiment Name: At_Drought_Soil_Dry_P Parameter: Timepoint (day) Value: 12
  misc_feature: MA Experiment 20001556 PARAMETER Experiment Name: At_Drought_Soil_Dry_P Parameter: Treatment Value: Drought vs. No Drought
  misc_feature: MA Experiment ID: 20001560 Result: Up-regulated in Transcription
  misc_feature: MA Experiment 20001560 PARAMETER Experiment Name: At_Drought_Soil_Dry_P Parameter: Age (day) Value: 28
  misc_feature: MA Experiment 20001560 PARAMETER Experiment Name: At_Drought_Soil_Dry_P Parameter: Organism Value: A. thaliana
  misc_feature: MA Experiment 20001560 PARAMETER Experiment Name: At_Drought_Soil_Dry_P Parameter: Plant Line Value: WS
  misc_feature: MA Experiment 20001560 PARAMETER Experiment Name: At_Drought_Soil_Dry_P Parameter: Post Timepoint (hr) Value: None
  misc_feature: MA Experiment 20001560 PARAMETER Experiment Name: At_Drought_Soil_Dry_P Parameter: Post-Treatment Value: None
  misc_feature: MA Experiment 20001560 PARAMETER Experiment Name: At_Drought_Soil_Dry_P Parameter: Timepoint (day) Value: 14
  misc_feature: MA Experiment 20001560 PARAMETER Experiment Name: At_Drought_Soil_Dry_P Parameter: Treatment Value: Drought vs. No Drought
  misc_feature: MA Experiment ID: 20001757 Result: Up-regulated in Transcription
  misc_feature: MA Experiment 20001757 PARAMETER Experiment Name: At_50mM_NH4NO3_L-to-H_P Parameter: Timepoint (hr) Value: 6
  misc_feature: MA Experiment 20001757 PARAMETER Experiment Name: At_50mM_NH4NO3_L-to-H_P Parameter: Tissue Value: Leaf
  misc_feature: MA Experiment 20001757 PARAMETER Experiment Name: At_50mM_NH4NO3_L-to-H_P Parameter: Treatment Value: 50mM NH4NO3 vs 100mM Mannitol

SEQ ID NO: 33145 - protein, 188 aa, Arabidopsis thaliana; identical to SEQ ID NO: 29555
  peptide (1)..(188): Ceres Seq. ID no. 12333073
  misc_feature (1)..(188): Homolog of NCBI NO: 18409234 NR Description: expressed protein
  misc_feature (1)..(188): Homolog of NCBI NO: 21553452 NR Description: unknown [Arabidopsis thaliana]

SEQ ID NO: 33146 - protein, 130 aa, Arabidopsis thaliana; identical to SEQ ID NO: 29556
  peptide (1)..(130): Ceres Seq. ID no. 12333074
  misc_feature (1)..(130): Homolog of NCBI NO: 18409234 NR Description: expressed protein
  misc_feature (1)..(130): Homolog of NCBI NO: 21553452 NR Description: unknown [Arabidopsis thaliana]

SEQ ID NO: 33147 - protein, 110 aa, Arabidopsis thaliana; identical to SEQ ID NO: 29557
  peptide (1)..(110): Ceres Seq. ID no. 12333075
  misc_feature (1)..(110): Homolog of NCBI NO: 18409234 NR Description: expressed protein
  misc_feature (1)..(110): Homolog of NCBI NO: 21553452 NR Description: unknown [Arabidopsis thaliana]

SEQ ID NO: 33148 - DNA, 943 bp, Arabidopsis thaliana; identical to SEQ ID NO: 29558
  misc_feature (1)..(943): Ceres Seq. ID no. 12332131
  misc_feature: MA Experiment ID: 108434 Result: Down-regulated in Transcription
  misc_feature: MA Experiment 108434 PARAMETER Experiment Name: At_Root_Tips_cDNA_P Parameter: Tissue Value: Root Tips
  misc_feature: MA Experiment ID: 108464 Result: Up-regulated in Transcription
  misc_feature: MA Experiment 108464 PARAMETER Experiment Name: At_Germinating_Seeds_cDNA_P Parameter: Age (day) Value: 4 vs. 0
  misc_feature: MA Experiment 108464 PARAMETER Experiment Name: At_Germinating_Seeds_cDNA_P Parameter: Tissue Value: Germinating Seeds
  misc_feature: MA Experiment ID: 108569 Result: Up-regulated in Transcription
  misc_feature: MA Experiment 108569 PARAMETER Experiment Name: At_0.001%_MeJA__cDNA_P Parameter: Timepoint (hr) Value: 6
  misc_feature: MA Experiment 108569 PARAMETER Experiment Name: At_0.001%_MeJA__cDNA_P Parameter: Tissue Value: Aerial
  misc_feature: MA Experiment 108569 PARAMETER Experiment Name: At_0.001%_MeJA__cDNA_P Parameter: Treatment Value: 0.001% MeJA vs. No Treatment
  misc_feature: MA Experiment ID: 108573 Result: Up-regulated in Transcription
  misc_feature: MA Experiment 108573 PARAMETER Experiment Name: At_Drought_cDNA_P Parameter: Timepoint (hr) Value: 6
  misc_feature: MA Experiment 108573 PARAMETER Experiment Name: At_Drought_cDNA_P Parameter: Tissue Value: Aerial
  misc_feature: MA Experiment 108573 PARAMETER Experiment Name: At_Drought_cDNA_P Parameter: Treatment Value: Drought vs. No Drought
  misc_feature: MA Experiment ID: 108585 Result: Up-regulated in Transcription
  misc_feature: MA Experiment 108585 PARAMETER Experiment Name: At_5mM_NaNP_cDNA_P Parameter: Timepoint (hr) Value: 6
  misc_feature: MA Experiment 108585 PARAMETER Experiment Name: At_5mM_NaNP_cDNA_P Parameter: Tissue Value: Aerial
  misc_feature: MA Experiment 108585 PARAMETER Experiment Name: At_5mM_NaNP_cDNA_P Parameter: Treatment Value: null
  misc_feature: MA Experiment ID: 20000072 Result: Up-regulated in Transcription
  misc_feature: MA Experiment 20000072 PARAMETER Experiment Name: At_100uM_ABA_Mutants_cDNA_P Parameter: Plant Line Value: CS8105
  misc_feature: MA Experiment 20000072 PARAMETER Experiment Name: At_100uM_ABA_Mutants_cDNA_P Parameter: Timepoint (hr) Value: 6
  misc_feature: MA Experiment 20000072 PARAMETER Experiment Name: At_100uM_ABA_Mutants_cDNA_P Parameter: Tissue Value: Aerial
  misc_feature: MA Experiment 20000072 PARAMETER Experiment Name: At_100uM_ABA_Mutants_cDNA_P Parameter: Treatment Value: 100uM ABA vs. No Treatment
  misc_feature: MA Experiment ID: 20000087 Result: Up-regulated in Transcription
  misc_feature: MA Experiment 20000087 PARAMETER Experiment Name: At_100uM_ABA_Mutants_cDNA_P Parameter: Plant Line Value: WS
  misc_feature: MA Experiment 20000087 PARAMETER Experiment Name: At_100uM_ABA_Mutants_cDNA_P Parameter: Timepoint (hr) Value: 6
  misc_feature: MA Experiment 20000087 PARAMETER Experiment Name: At_100uM_ABA_Mutants_cDNA_P Parameter: Tissue Value: Aerial
  misc_feature: MA Experiment 20000087 PARAMETER Experiment Name: At_100uM_ABA_Mutants_cDNA_P Parameter: Treatment Value: 100uM ABA vs. No Treatment
  misc_feature: MA Experiment ID: 20000090 Result: Up-regulated in Transcription
  misc_feature: MA Experiment ID: 20000234 Result: Down-regulated in Transcription
  misc_feature: MA Experiment 20000234 PARAMETER Experiment Name: At_Siliques_P Parameter: Age (day) Value: 21
  misc_feature: MA Experiment 20000234 PARAMETER Experiment Name: At_Siliques_P Parameter: Organism Value: A. thaliana
  misc_feature: MA Experiment 20000234 PARAMETER Experiment Name: At_Siliques_P Parameter: Plant Line Value: WS
  misc_feature: MA Experiment 20000234 PARAMETER Experiment Name: At_Siliques_P Parameter: Tissue Value: Less Than 5mm Siliques vs. Whole Plant
  misc_feature: MA Experiment ID: 20000235 Result: Down-regulated in Transcription
  misc_feature: MA Experiment 20000235 PARAMETER Experiment Name: At_Siliques_P Parameter: Age (day) Value: 21
  misc_feature: MA Experiment 20000235 PARAMETER Experiment Name: At_Siliques_P Parameter: Organism Value: A. thaliana
  misc_feature: MA Experiment 20000235 PARAMETER Experiment Name: At_Siliques_P Parameter: Plant Line Value: WS
  misc_feature: MA Experiment 20000235 PARAMETER Experiment Name: At_Siliques_P Parameter: Tissue Value: 5-10mm Siliques vs. Whole Plant
  misc_feature: MA Experiment ID: 20000264 Result: Down-regulated in Transcription
  misc_feature: MA Experiment 20000264 PARAMETER Experiment Name: At_Open_Flower_P Parameter: Age (day) Value: 21
  misc_feature: MA Experiment 20000264 PARAMETER Experiment Name: At_Open_Flower_P Parameter: Plant Line Value: WS
  misc_feature: MA Experiment 20000264 PARAMETER Experiment Name: At_Open_Flower_P Parameter: Tissue Value: Open Flower vs. Whole Plant
  misc_feature: MA Experiment ID: 20000265 Result: Down-regulated in Transcription
  misc_feature: MA Experiment 20000265 PARAMETER Experiment Name: At_Open_Flower_P Parameter: Age (day) Value: 21
  misc_feature: MA Experiment 20000265 PARAMETER Experiment Name: At_Open_Flower_P Parameter: Plant Line Value: WS
  misc_feature: MA Experiment 20000265 PARAMETER Experiment Name: At_Open_Flower_P Parameter: Tissue Value: Closed Flower vs. Whole Plant
  misc_feature: MA Experiment ID: 20000286 Result: Down-regulated in Transcription
  misc_feature: MA Experiment 20000286 PARAMETER Experiment Name: At_Open_Flower_P Parameter: Age (day) Value: 21
  misc_feature: MA Experiment 20000286 PARAMETER Experiment Name: At_Open_Flower_P Parameter: Plant Line Value: WS
  misc_feature: MA Experiment 20000286 PARAMETER Experiment Name: At_Open_Flower_P Parameter: Tissue Value: Half Open vs. Whole Plant
  misc_feature: MA Experiment ID: 20000438 Result: Down-regulated in Transcription
  misc_feature: MA Experiment 20000438 PARAMETER Experiment Name: At_Shoots__P Parameter: Age (day) Value: 14
  misc_feature: MA Experiment 20000438 PARAMETER Experiment Name: At_Shoots__P Parameter: Tissue Value: Shoots vs. Whole Plant

SEQ ID NO: 33149 - protein, 257 aa, Arabidopsis thaliana; identical to SEQ ID NO: 29559
  peptide (1)..(257): Ceres Seq. ID no. 12332132
  misc_feature (134)..(237): Pfam Name: Uncharacterised protein family (UPF0136) Pfam Description: Uncharacterised protein family (UPF0136)
  misc_feature (92)..(235): Homolog of NCBI NO: 21554522 NR Description: putative non-green plastid inner envelope
  misc_feature (92)..(235): Homolog of NCBI NO: 18404784 NR Description: putative non-green plastid inner envelope
  misc_feature (92)..(235): Homolog of NCBI NO: 25365973 NR Description: hypothetical protein At2g38550 [imported] -
  misc_feature (113)..(247): Homolog of NCBI NO: 7488560 NR Description: inner envelope membrane protein precursor,
  misc_feature (131)..(247): Homolog of NCBI NO: 34896628 NR Description: hypothetical protein [Oryza sativa]
  misc_feature (131)..(246): Homolog of NCBI NO: 18403201 NR Description: expressed protein
  misc_feature (131)..(247): Homolog of NCBI NO: 15232290 NR Description: unknown protein; protein id: At3g20510.1
  misc_feature (88)..(256): Homolog of NCBI NO: 38344745 NR Description: OSJNBa0089K21.3 [Oryza sativa (japonica
  misc_feature (32)..(257): Homolog of NCBI NO: 11290570 NR Description: hypothetical protein F28O9.130 - Arabidopsis
  misc_feature (32)..(257): Homolog of NCBI NO: 18410685 NR Description: expressed protein

SEQ ID NO: 33150 - protein, 226 aa, Arabidopsis thaliana; identical to SEQ ID NO: 29560
  peptide (1)..(226): Ceres Seq. ID no. 12332133
  misc_feature (103)..(206): Pfam Name: Uncharacterised protein family (UPF0136) Pfam Description: Uncharacterised protein family (UPF0136)
  misc_feature (61)..(204): Homolog of NCBI NO: 21554522 NR Description: putative non-green plastid inner envelope
  misc_feature (61)..(204): Homolog of NCBI NO: 18404784 NR Description: putative non-green plastid inner envelope
  misc_feature (61)..(204): Homolog of NCBI NO: 25365973 NR Description: hypothetical protein At2g38550 [imported] -
  misc_feature (82)..(216): Homolog of NCBI NO: 7488560 NR Description: inner envelope membrane protein precursor,
  misc_feature (100)..(216): Homolog of NCBI NO: 34896628 NR Description: hypothetical protein [Oryza sativa]
  misc_feature (100)..(215): Homolog of NCBI NO: 18403201 NR Description: expressed protein
  misc_feature (100)..(216): Homolog of NCBI NO: 15232290 NR Description: unknown protein; protein id: At3g20510.1
  misc_feature (57)..(225): Homolog of NCBI NO: 38344745 NR Description: OSJNBa0089K21.3 [Oryza sativa (japonica
  misc_feature (1)..(226): Homolog of NCBI NO: 11290570 NR Description: hypothetical protein F28O9.130 - Arabidopsis
  misc_feature (1)..(226): Homolog of NCBI NO: 18410685 NR Description: expressed protein

SEQ ID NO: 33151 - protein, 198 aa, Arabidopsis thaliana; identical to SEQ ID NO: 29561
  peptide (1)..(198): Ceres Seq. ID no. 12332134
  misc_feature (75)..(178): Pfam Name: Uncharacterised protein family (UPF0136) Pfam Description: Uncharacterised protein family (UPF0136)
  misc_feature (33)..(176): Homolog of NCBI NO: 21554522 NR Description: putative non-green plastid inner envelope
  misc_feature (33)..(176): Homolog of NCBI NO: 18404784 NR Description: putative non-green plastid inner envelope
  misc_feature (33)..(176): Homolog of NCBI NO: 25365973 NR Description: hypothetical protein At2g38550 [imported] -
  misc_feature (54)..(188): Homolog of NCBI NO: 7488560 NR Description: inner envelope membrane protein precursor,
  misc_feature (72)..(188): Homolog of NCBI NO: 34896628 NR Description: hypothetical protein [Oryza sativa]
  misc_feature (72)..(187): Homolog of NCBI NO: 18403201 NR Description: expressed protein
  misc_feature (72)..(188): Homolog of NCBI NO: 15232290 NR Description: unknown protein; protein id: At3g20510.1
  misc_feature (29)..(197): Homolog of NCBI NO: 38344745 NR Description: OSJNBa0089K21.3 [Oryza sativa (japonica
  misc_feature (1)..(198): Homolog of NCBI NO: 11290570 NR Description: hypothetical protein F28O9.130 - Arabidopsis
  misc_feature (1)..(198): Homolog of NCBI NO: 18410685 NR Description: expressed protein

SEQ ID NO: 33152 - DNA, 864 bp, Arabidopsis thaliana; identical to SEQ ID NO: 29562
  misc_feature (1)..(864): Ceres Seq. ID no. 12332127
  misc_feature: MA Experiment ID: 108435 Result: Up-regulated in Transcription
  misc_feature: MA Experiment 108435 PARAMETER Experiment Name: At_stm_Mutants_cDNA_P Parameter: Plant Line Value: wt Landsburg vs stm
  misc_feature: MA Experiment 108435 PARAMETER Experiment Name: At_stm_Mutants_cDNA_P Parameter: Tissue Value: Shoot Apical Meristem Region
  misc_feature: MA Experiment ID: 108462 Result: Up-regulated in Transcription
  misc_feature: MA Experiment 108462 PARAMETER Experiment Name: At_Germinating_Seeds_cDNA_P Parameter: Age (day) Value: 2 vs. 0
  misc_feature: MA Experiment 108462 PARAMETER Experiment Name: At_Germinating_Seeds_cDNA_P Parameter: Tissue Value: Germinating Seeds
  misc_feature: MA Experiment ID: 108463 Result: Up-regulated in Transcription
  misc_feature: MA Experiment 108463 PARAMETER Experiment Name: At_Germinating_Seeds_cDNA_P Parameter: Age (day) Value: 3 vs. 0
  misc_feature: MA Experiment 108463 PARAMETER Experiment Name: At_Germinating_Seeds_cDNA_P Parameter: Tissue Value: Germinating Seeds
  misc_feature: MA Experiment ID: 108464 Result: Up-regulated in Transcription
  misc_feature: MA Experiment 108464 PARAMETER Experiment Name: At_Germinating_Seeds_cDNA_P Parameter: Age (day) Value: 4 vs. 0
  misc_feature: MA Experiment 108464 PARAMETER Experiment Name: At_Germinating_Seeds_cDNA_P Parameter: Tissue Value: Germinating Seeds
  misc_feature: MA Experiment ID: 108474 Result: Down-regulated in Transcription
  misc_feature: MA Experiment 108474 PARAMETER Experiment Name: At_Drought_Flowers_cDNA_P Parameter: Timepoint (hr) Value: null
  misc_feature: MA Experiment 108474 PARAMETER Experiment Name: At_Drought_Flowers_cDNA_P Parameter: Treatment Value: Drought vs. No Drought
  misc_feature: MA Experiment ID: 108501 Result: Up-regulated in Transcription
  misc_feature: MA Experiment 108501 PARAMETER Experiment Name: At_ap2_floral_buds_cDNA_P Parameter: Plant Line Value: ap2 (Ler.)
  misc_feature: MA Experiment 108501 PARAMETER Experiment Name: At_ap2_floral_buds_cDNA_P Parameter: Tissue Value: Closed Flower
  misc_feature: MA Experiment ID: 20000069 Result: Down-regulated in Transcription
  misc_feature: MA Experiment 20000069 PARAMETER Experiment Name: At_100uM_ABA_Mutants_cDNA_P Parameter: Plant Line Value: CS23
  misc_feature: MA Experiment 20000069 PARAMETER Experiment Name: At_100uM_ABA_Mutants_cDNA_P Parameter: Timepoint (hr) Value: 6
  misc_feature: MA Experiment 20000069 PARAMETER Experiment Name: At_100uM_ABA_Mutants_cDNA_P Parameter: Tissue Value: Aerial
  misc_feature: MA Experiment 20000069 PARAMETER Experiment Name: At_100uM_ABA_Mutants_cDNA_P Parameter: Treatment Value: 100uM ABA vs. No Treatment
  misc_feature: MA Experiment ID: 20000070 Result: Down-regulated in Transcription
  misc_feature: MA Experiment 20000070 PARAMETER Experiment Name: At_100uM_ABA_Mutants_cDNA_P Parameter: Plant Line Value: CS24
  misc_feature: MA Experiment 20000070 PARAMETER Experiment Name: At_100uM_ABA_Mutants_cDNA_P Parameter: Timepoint (hr) Value: 6
  misc_feature: MA Experiment 20000070 PARAMETER Experiment Name: At_100uM_ABA_Mutants_cDNA_P Parameter: Tissue Value: Aerial
  misc_feature: MA Experiment 20000070 PARAMETER Experiment Name: At_100uM_ABA_Mutants_cDNA_P Parameter: Treatment Value: 100uM ABA vs. No Treatment
  misc_feature: MA Experiment ID: 20000071 Result: Down-regulated in Transcription
  misc_feature: MA Experiment 20000071 PARAMETER Experiment Name: At_100uM_ABA_Mutants_cDNA_P Parameter: Plant Line Value: CS8104
  misc_feature: MA Experiment 20000071 PARAMETER Experiment Name: At_100uM_ABA_Mutants_cDNA_P Parameter: Timepoint (hr) Value: 6
  misc_feature: MA Experiment 20000071 PARAMETER Experiment Name: At_100uM_ABA_Mutants_cDNA_P Parameter: Tissue Value: Aerial
  misc_feature: MA Experiment 20000071 PARAMETER Experiment Name: At_100uM_ABA_Mutants_cDNA_P Parameter: Treatment Value: 100uM ABA vs. No Treatment
  misc_feature: MA Experiment ID: 20000086 Result: Down-regulated in Transcription
  misc_feature: MA Experiment 20000086 PARAMETER Experiment Name: At_100uM_ABA_Mutants_cDNA_P Parameter: Plant Line Value: CS22
  misc_feature: MA Experiment 20000086 PARAMETER Experiment Name: At_100uM_ABA_Mutants_cDNA_P Parameter: Timepoint (hr) Value: 6
  misc_feature: MA Experiment 20000086 PARAMETER Experiment Name: At_100uM_ABA_Mutants_cDNA_P Parameter: Tissue Value: Aerial
  misc_feature: MA Experiment 20000086 PARAMETER Experiment Name: At_100uM_ABA_Mutants_cDNA_P Parameter: Treatment Value: 100uM ABA vs. No Treatment
  misc_feature: MA Experiment ID: 20000087 Result: Down-regulated in Transcription
  misc_feature: MA Experiment 20000087 PARAMETER Experiment Name: At_100uM_ABA_Mutants_cDNA_P Parameter: Plant Line Value: WS
  misc_feature: MA Experiment 20000087 PARAMETER Experiment Name: At_100uM_ABA_Mutants_cDNA_P Parameter: Timepoint (hr) Value: 6
  misc_feature: MA Experiment 20000087 PARAMETER Experiment Name: At_100uM_ABA_Mutants_cDNA_P Parameter: Tissue Value: Aerial
  misc_feature: MA Experiment 20000087 PARAMETER Experiment Name: At_100uM_ABA_Mutants_cDNA_P Parameter: Treatment Value: 100uM ABA vs. No Treatment
  misc_feature: MA Experiment ID: 20000088 Result: Down-regulated in Transcription
  misc_feature: MA Experiment 20000088 PARAMETER Experiment Name: At_100uM_ABA_Mutants_cDNA_P Parameter: Plant Line Value: Landsberg
  misc_feature: MA Experiment 20000088 PARAMETER Experiment Name: At_100uM_ABA_Mutants_cDNA_P Parameter: Timepoint (hr) Value: 6
  misc_feature: MA Experiment 20000088 PARAMETER Experiment Name: At_100uM_ABA_Mutants_cDNA_P Parameter: Tissue Value: Aerial
  misc_feature: MA Experiment 20000088 PARAMETER Experiment Name: At_100uM_ABA_Mutants_cDNA_P Parameter: Treatment Value: 100uM ABA vs. No Treatment
  misc_feature: MA Experiment ID: 20000089 Result: Down-regulated in Transcription
  misc_feature: MA Experiment ID: 20000090 Result: Down-regulated in Transcription
  misc_feature: MA Experiment ID: 20000113 Result: Up-regulated in Transcription
  misc_feature: MA Experiment 20000113 PARAMETER Experiment Name: At_42deg_Heat_cDNA_P Parameter: Temperature (deg C) Value: 42 vs. 22
  misc_feature: MA Experiment 20000113 PARAMETER Experiment Name: At_42deg_Heat_cDNA_P Parameter: Timepoint (hr) Value: 8
  misc_feature: MA Experiment 20000113 PARAMETER Experiment Name: At_42deg_Heat_cDNA_P Parameter: Tissue Value: Aerial
  misc_feature: MA Experiment ID: 20000117 Result: Down-regulated in Transcription
  misc_feature: MA Experiment 20000117 PARAMETER Experiment Name: At_100uM_ABA_Mutants_cDNA_P Parameter: Plant Line Value: Columbia
  misc_feature: MA Experiment 20000117 PARAMETER Experiment Name: At_100uM_ABA_Mutants_cDNA_P Parameter: Timepoint (hr) Value: 6
  misc_feature: MA Experiment 20000117 PARAMETER Experiment Name: At_100uM_ABA_Mutants_cDNA_P Parameter: Tissue Value: Aerial
  misc_feature: MA Experiment 20000117 PARAMETER Experiment Name: At_100uM_ABA_Mutants_cDNA_P Parameter: Treatment Value: 100uM ABA vs. No Treatment
  misc_feature: MA Experiment ID: 20000144 Result: Up-regulated in Transcription
  misc_feature: MA Experiment 20000144 PARAMETER Experiment Name: At_42deg_Heat_cDNA_P Parameter: Temperature (deg C) Value: 42 vs. 22
  misc_feature: MA Experiment 20000144 PARAMETER Experiment Name: At_42deg_Heat_cDNA_P Parameter: Timepoint (hr) Value: 1
  misc_feature: MA Experiment 20000144 PARAMETER Experiment Name: At_42deg_Heat_cDNA_P Parameter: Tissue Value: Aerial
  misc_feature: MA Experiment ID: 20000171 Result: Up-regulated in Transcription
  misc_feature: MA Experiment 20000171 PARAMETER Experiment Name: At_42deg_Heat_P Parameter: Age (day) Value: 14
  misc_feature: MA Experiment 20000171 PARAMETER Experiment Name: At_42deg_Heat_P Parameter: Organism Value: A. thaliana
  misc_feature: MA Experiment 20000171 PARAMETER Experiment Name: At_42deg_Heat_P Parameter: Plant Line Value: WS
  misc_feature: MA Experiment 20000171 PARAMETER Experiment Name: At_42deg_Heat_P Parameter: Temperature (deg C) Value: 42 vs. 22
  misc_feature: MA Experiment 20000171 PARAMETER Experiment Name: At_42deg_Heat_P Parameter: Timepoint (hr) Value: 1
  misc_feature: MA Experiment 20000171 PARAMETER Experiment Name: At_42deg_Heat_P Parameter: Tissue Value: Aerial
  misc_feature: MA Experiment ID: 20000173 Result: Up-regulated in Transcription
  misc_feature: MA Experiment 20000173 PARAMETER Experiment Name: At_42deg_Heat_P Parameter: Age (day) Value: 14
  misc_feature: MA Experiment 20000173 PARAMETER Experiment Name: At_42deg_Heat_P Parameter: Organism Value: A. thaliana
  misc_feature: MA Experiment 20000173 PARAMETER Experiment Name: At_42deg_Heat_P Parameter: Plant Line Value: WS
  misc_feature: MA Experiment 20000173 PARAMETER Experiment Name: At_42deg_Heat_P Parameter: Temperature (deg C) Value: 42 vs. 22
  misc_feature: MA Experiment 20000173 PARAMETER Experiment Name: At_42deg_Heat_P Parameter: Timepoint (hr) Value: 6
  misc_feature: MA Experiment 20000173 PARAMETER Experiment Name: At_42deg_Heat_P Parameter: Tissue Value: Aerial
  misc_feature: MA Experiment ID: 20000179 Result: Up-regulated in Transcription
  misc_feature: MA Experiment 20000179 PARAMETER Experiment Name: At_Germinating_Seeds_P Parameter: Age (hr) Value: 6 vs. 0
  misc_feature: MA Experiment 20000179 PARAMETER Experiment Name: At_Germinating_Seeds_P Parameter: Tissue Value: Germinating Seeds
  misc_feature: MA Experiment ID: 20000182 Result: Up-regulated in Transcription
  misc_feature: MA Experiment 20000182 PARAMETER Experiment Name: At_2mM_SA_P Parameter: Age (day) Value: 14
  misc_feature: MA Experiment 20000182 PARAMETER Experiment Name: At_2mM_SA_P Parameter: Organism Value: A. thaliana
  misc_feature: MA Experiment 20000182 PARAMETER Experiment Name: At_2mM_SA_P Parameter: Plant Line Value: WS
  misc_feature: MA Experiment 20000182 PARAMETER Experiment Name: At_2mM_SA_P Parameter: Timepoint (hr) Value: 6
  misc_feature: MA Experiment 20000182 PARAMETER Experiment Name: At_2mM_SA_P Parameter: Tissue Value: Aerial
  misc_feature: MA Experiment 20000182 PARAMETER Experiment Name: At_2mM_SA_P Parameter: Treatment Value: 2mM SA vs. No Treatment
  misc_feature: MA Experiment ID: 20000184 Result: Up-regulated in Transcription
  misc_feature: MA Experiment 20000184 PARAMETER Experiment Name: At_Shoots__P Parameter: Age (day) Value: 7
  misc_feature: MA Experiment 20000184 PARAMETER Experiment Name: At_Shoots__P Parameter: Tissue Value: Shoots vs. Whole Plant
  misc_feature: MA Experiment ID: 20000185 Result: Up-regulated in Transcription
  misc_feature: MA Experiment 20000185 PARAMETER Experiment Name: At_Roots__P Parameter: Age (day) Value: 7 vs. 21
  misc_feature: MA Experiment 20000185 PARAMETER Experiment Name: At_Roots__P Parameter: Organism Value: A. thaliana
  misc_feature: MA Experiment 20000185 PARAMETER Experiment Name: At_Roots__P Parameter: Tissue Value: Roots vs. Whole Plant
  misc_feature: MA Experiment ID: 20000227 Result: Up-regulated in Transcription
  misc_feature: MA Experiment 20000227 PARAMETER Experiment Name: At_Root-Tips-vs-Tops_P Parameter: Tissue Value: Root Tips vs. Root Tops
  misc_feature: MA Experiment ID: 20000234 Result: Up-regulated in Transcription
  misc_feature: MA Experiment 20000234 PARAMETER Experiment Name: At_Siliques_P Parameter: Age (day) Value: 21
  misc_feature: MA Experiment 20000234 PARAMETER Experiment Name: At_Siliques_P Parameter: Organism Value: A. thaliana
  misc_feature: MA Experiment 20000234 PARAMETER Experiment Name: At_Siliques_P Parameter: Plant Line Value: WS
  misc_feature: MA Experiment 20000234 PARAMETER Experiment Name: At_Siliques_P Parameter: Tissue Value: Less Than 5mm Siliques vs. Whole Plant
  misc_feature: MA Experiment ID: 20000264 Result: Up-regulated in Transcription
  misc_feature: MA Experiment 20000264 PARAMETER Experiment Name: At_Open_Flower_P Parameter: Age (day) Value: 21
  misc_feature: MA Experiment 20000264 PARAMETER Experiment Name: At_Open_Flower_P Parameter: Plant Line Value: WS
  misc_feature: MA Experiment 20000264 PARAMETER Experiment Name: At_Open_Flower_P Parameter: Tissue Value: Open Flower vs. Whole Plant
  misc_feature: MA Experiment ID: 20000265 Result: Up-regulated in Transcription
  misc_feature: MA Experiment 20000265 PARAMETER Experiment Name: At_Open_Flower_P Parameter: Age (day) Value: 21
  misc_feature: MA Experiment 20000265 PARAMETER Experiment Name: At_Open_Flower_P Parameter: Plant Line Value: WS
  misc_feature: MA Experiment 20000265 PARAMETER Experiment Name: At_Open_Flower_P Parameter: Tissue Value: Closed Flower vs. Whole Plant
  misc_feature: MA Experiment ID: 20000267 Result: Up-regulated in Transcription
  misc_feature: MA Experiment 20000267 PARAMETER Experiment Name: At_Drought_P Parameter: Age (day) Value: 7
  misc_feature: MA Experiment 20000267 PARAMETER Experiment Name: At_Drought_P Parameter: Organism Value: A. thaliana
  misc_feature: MA Experiment 20000267 PARAMETER Experiment Name: At_Drought_P Parameter: Plant Line Value: WS
  misc_feature: MA Experiment 20000267 PARAMETER Experiment Name: At_Drought_P Parameter: Timepoint (hr) Value: 6
  misc_feature: MA Experiment 20000267 PARAMETER Experiment Name: At_Drought_P Parameter: Tissue Value: Whole Plant
  misc_feature: MA Experiment 20000267 PARAMETER Experiment Name: At_Drought_P Parameter: Treatment Value: Drought vs. No Drought
  misc_feature: MA Experiment ID: 20000268 Result: Up-regulated in Transcription
  misc_feature: MA Experiment 20000268 PARAMETER Experiment Name: At_100mM_NaCl__P Parameter: Age (day) Value: 14
  misc_feature: MA Experiment 20000268 PARAMETER Experiment Name: At_100mM_NaCl__P Parameter: Organism Value: A. thaliana
  misc_feature: MA Experiment 20000268 PARAMETER Experiment Name: At_100mM_NaCl__P Parameter: Plant Line Value: WS
  misc_feature: MA Experiment 20000268 PARAMETER Experiment Name: At_100mM_NaCl__P Parameter: Timepoint (hr) Value: 6
  misc_feature: MA Experiment 20000268 PARAMETER Experiment Name: At_100mM_NaCl__P Parameter: Tissue Value: Whole Plant
  misc_feature: MA Experiment 20000268 PARAMETER Experiment Name: At_100mM_NaCl__P Parameter: Treatment Value: 100mM NaCl vs. No Treatment
  misc_feature: MA Experiment ID: 20000286 Result: Up-regulated in Transcription
  misc_feature: MA Experiment 20000286 PARAMETER Experiment Name: At_Open_Flower_P Parameter: Age (day) Value: 21
  misc_feature: MA Experiment 20000286 PARAMETER Experiment Name: At_Open_Flower_P Parameter: Plant Line Value: WS
  misc_feature: MA Experiment 20000286 PARAMETER Experiment Name: At_Open_Flower_P Parameter: Tissue Value: Half Open vs. Whole Plant
  misc_feature: MA Experiment ID: 20000308 Result: Up-regulated in Transcription
  misc_feature: MA Experiment 20000308 PARAMETER Experiment Name: At_100mM_NaCl__P Parameter: Age (day) Value: 17
  misc_feature: MA Experiment 20000308 PARAMETER Experiment Name: At_100mM_NaCl__P Parameter: Organism Value: A. thaliana
  misc_feature: MA Experiment 20000308 PARAMETER Experiment Name: At_100mM_NaCl__P Parameter: Plant Line Value: WS
  misc_feature: MA Experiment 20000308 PARAMETER Experiment Name: At_100mM_NaCl__P Parameter: Timepoint (hr) Value: 72
  misc_feature: MA Experiment 20000308 PARAMETER Experiment Name: At_100mM_NaCl__P Parameter: Tissue Value: Whole Plant
  misc_feature: MA Experiment 20000308 PARAMETER Experiment Name: At_100mM_NaCl__P Parameter: Treatment Value: 100mM NaCl vs. No Treatment
  misc_feature: MA Experiment ID: 20000436 Result: Up-regulated in Transcription
  misc_feature: MA Experiment 20000436 PARAMETER Experiment Name: At_Drought_P Parameter: Age (day) Value: 7
  misc_feature: MA Experiment 20000436 PARAMETER Experiment Name: At_Drought_P Parameter: Organism Value: A. thaliana
  misc_feature: MA Experiment 20000436 PARAMETER Experiment Name: At_Drought_P Parameter: Plant Line Value: WS
  misc_feature: MA Experiment 20000436 PARAMETER Experiment Name: At_Drought_P Parameter: Timepoint (hr) Value: 12
  misc_feature: MA Experiment 20000436 PARAMETER Experiment Name: At_Drought_P Parameter: Tissue Value: Whole Plant
  misc_feature: MA Experiment 20000436 PARAMETER Experiment Name: At_Drought_P Parameter: Treatment Value: Drought vs. No Drought
  misc_feature: MA Experiment ID: 20000437 Result: Up-regulated in Transcription
  misc_feature: MA Experiment 20000437 PARAMETER Experiment Name: At_Drought_P Parameter: Age (day) Value: 8
  misc_feature: MA Experiment 20000437 PARAMETER Experiment Name: At_Drought_P Parameter: Organism Value: A. thaliana
  misc_feature: MA Experiment 20000437 PARAMETER Experiment Name: At_Drought_P Parameter: Plant Line Value: WS
  misc_feature: MA Experiment 20000437 PARAMETER Experiment Name: At_Drought_P Parameter: Timepoint (hr) Value: 24
  misc_feature: MA Experiment 20000437 PARAMETER Experiment Name: At_Drought_P Parameter: Tissue Value: Whole Plant
  misc_feature: MA Experiment 20000437 PARAMETER Experiment Name: At_Drought_P Parameter: Treatment Value: Drought vs. No Drought
  misc_feature: MA Experiment ID: 20000439 Result: Up-regulated in Transcription
  misc_feature: MA Experiment 20000439 PARAMETER Experiment Name: At_Roots__P Parameter: Age (day) Value: 14 vs. 21
  misc_feature: MA Experiment 20000439 PARAMETER Experiment Name: At_Roots__P Parameter: Organism Value: A. thaliana
  misc_feature: MA Experiment 20000439 PARAMETER Experiment Name: At_Roots__P Parameter: Tissue Value: Roots vs. Whole Plant
  misc_feature: MA Experiment ID: 20000441 Result: Down-regulated in Transcription
  misc_feature: MA Experiment 20000441 PARAMETER Experiment Name: At_1uM_BR-BRZ__P Parameter: Tissue Value: Shoot Apices
  misc_feature: MA Experiment 20000441 PARAMETER Experiment Name: At_1uM_BR-BRZ__P Parameter: Treatment Value: 1uM BR vs. No Treatment
  misc_feature: MA Experiment ID: 20000451 Result: Up-regulated in Transcription
  misc_feature: MA Experiment 20000451 PARAMETER Experiment Name: At_CS6879_Shoots-Roots_P Parameter: Age (day) Value: 14
  misc_feature: MA Experiment 20000451 PARAMETER Experiment Name: At_CS6879_Shoots-Roots_P Parameter: Organism Value: A. thaliana
  misc_feature: MA Experiment 20000451 PARAMETER Experiment Name: At_CS6879_Shoots-Roots_P Parameter: Plant Line Value: CS6879 vs. WS
  misc_feature: MA Experiment 20000451 PARAMETER Experiment Name: At_CS6879_Shoots-Roots_P Parameter: Tissue Value: Roots
  misc_feature: MA Experiment ID: 20000456 Result: Up-regulated in Transcription
  misc_feature: MA Experiment 20000456 PARAMETER Experiment Name: At_100uM_BA_P Parameter: Age (day) Value: 14
  misc_feature: MA Experiment 20000456 PARAMETER Experiment Name: At_100uM_BA_P Parameter: Organism Value: A. thaliana
  misc_feature: MA Experiment 20000456 PARAMETER Experiment Name: At_100uM_BA_P Parameter: Plant Line Value: WS
  misc_feature: MA Experiment 20000456 PARAMETER Experiment Name: At_100uM_BA_P Parameter: Timepoint (hr) Value: 6
  misc_feature: MA Experiment 20000456 PARAMETER Experiment Name: At_100uM_BA_P Parameter: Tissue Value: Aerial
  misc_feature: MA Experiment 20000456 PARAMETER Experiment Name: At_100uM_BA_P Parameter: Treatment Value: 100uM BA vs. No Treatment
  misc_feature: MA Experiment ID: 20000495 Result: Down-regulated in Transcription
  misc_feature: MA Experiment 20000495 PARAMETER Experiment Name: At_Guard_Cells_P Parameter: Harvest Date Value: 8/2/2002
  misc_feature: MA Experiment 20000495 PARAMETER Experiment Name: At_Guard_Cells_P Parameter: Organism Value: A. thaliana
  misc_feature: MA Experiment 20000495 PARAMETER Experiment Name: At_Guard_Cells_P Parameter: Tissue Value: Guard Cells vs. Leaves
  misc_feature: MA Experiment ID: 20000506 Result: Up-regulated in Transcription
  misc_feature: MA Experiment 20000506 PARAMETER Experiment Name: At_Wounding_P Parameter: Organism Value: A. thaliana
  misc_feature: MA Experiment 20000506 PARAMETER Experiment Name: At_Wounding_P Parameter: Plant Line Value: WS
  misc_feature: MA Experiment 20000506 PARAMETER Experiment Name: At_Wounding_P Parameter: Timepoint (hr) Value: 6
  misc_feature: MA Experiment 20000506 PARAMETER Experiment Name: At_Wounding_P Parameter: Tissue Value: Aerial
  misc_feature: MA Experiment 20000506 PARAMETER Experiment Name: At_Wounding_P Parameter: Treatment Value: Wounding vs. No Wounding
  misc_feature: MA Experiment ID: 20000794 Result: Up-regulated in Transcription
  misc_feature: MA Experiment 20000794 PARAMETER Experiment Name: At_Petals_P Parameter: Age (day) Value: 23-25 days
  misc_feature: MA Experiment 20000794 PARAMETER Experiment Name: At_Petals_P Parameter: Plant Line Value: WS
  misc_feature: MA Experiment 20000794 PARAMETER Experiment Name: At_Petals_P Parameter: Tissue Value: Petals vs. Whole plant
  misc_feature: MA Experiment ID: 20001247 Result: Down-regulated in Transcription
  misc_feature: MA Experiment 20001247 PARAMETER Experiment Name: At_Far-red-induction_P Parameter: Age (day) Value: 7
  misc_feature: MA Experiment 20001247 PARAMETER Experiment Name: At_Far-red-induction_P Parameter: Light Value: Far-red vs. White
  misc_feature: MA Experiment 20001247 PARAMETER Experiment Name: At_Far-red-induction_P Parameter: Organism Value: A. thaliana
  misc_feature: MA Experiment 20001247 PARAMETER Experiment Name: At_Far-red-induction_P Parameter: Plant Line Value: Columbia
  misc_feature: MA Experiment 20001247 PARAMETER Experiment Name: At_Far-red-induction_P Parameter: Timepoint (hr) Value: 1
  misc_feature: MA Experiment 20001247 PARAMETER Experiment Name: At_Far-red-induction_P Parameter: Tissue Value: Whole Plant
  misc_feature: MA Experiment ID: 20001458 Result: Down-regulated in Transcription
  misc_feature: MA Experiment 20001458 PARAMETER Experiment Name: At_50mM_NH4NO3_L-to-H_P Parameter: Age (day) Value: Undefined
  misc_feature: MA Experiment 20001458 PARAMETER Experiment Name: At_50mM_NH4NO3_L-to-H_P Parameter: Organism Value: Undefined
  misc_feature: MA Experiment 20001458 PARAMETER Experiment Name: At_50mM_NH4NO3_L-to-H_P Parameter: Plant Line Value: Undefined
  misc_feature: MA Experiment 20001458 PARAMETER Experiment Name: At_50mM_NH4NO3_L-to-H_P Parameter: Timepoint (hr) Value: 2
  misc_feature: MA Experiment 20001458 PARAMETER Experiment Name: At_50mM_NH4NO3_L-to-H_P Parameter: Tissue Value: Siliques
  misc_feature: MA Experiment 20001458 PARAMETER Experiment Name: At_50mM_NH4NO3_L-to-H_P Parameter: Treatment Value: 50mM NH4NO3 vs. 100mM Manitol
  misc_feature: MA Experiment ID: 20001504 Result: Up-regulated in Transcription
  misc_feature: MA Experiment 20001504 PARAMETER Experiment Name: At_Far-red-enriched_P Parameter: Age (day) Value: 10
  misc_feature: MA Experiment 20001504 PARAMETER Experiment Name: At_Far-red-enriched_P Parameter: Light Value: Far-red enriched vs. White
  misc_feature: MA Experiment 20001504 PARAMETER Experiment Name: At_Far-red-enriched_P Parameter: Organism Value: A. thaliana
  misc_feature: MA Experiment 20001504 PARAMETER Experiment Name: At_Far-red-enriched_P Parameter: Plant Line Value: Columbia
  misc_feature: MA Experiment 20001504 PARAMETER Experiment Name: At_Far-red-enriched_P Parameter: Timepoint (day) Value: 6
  misc_feature: MA Experiment 20001504 PARAMETER Experiment Name: At_Far-red-enriched_P Parameter: Tissue Value: Whole Plant
  misc_feature: MA Experiment ID: 20001554 Result: Up-regulated in Transcription
  misc_feature: MA Experiment 20001554 PARAMETER Experiment Name: At_Drought_Soil_Dry_P Parameter: Age (day) Value: 21
  misc_feature: MA Experiment 20001554 PARAMETER Experiment Name: At_Drought_Soil_Dry_P Parameter: Organism Value: A. thaliana
  misc_feature: MA Experiment 20001554 PARAMETER Experiment Name: At_Drought_Soil_Dry_P Parameter: Plant Line Value: WS
  misc_feature: MA Experiment 20001554 PARAMETER Experiment Name: At_Drought_Soil_Dry_P Parameter: Post Timepoint (hr) Value: None
  misc_feature: MA Experiment 20001554 PARAMETER Experiment Name: At_Drought_Soil_Dry_P Parameter: Post-Treatment Value: None
  misc_feature: MA Experiment 20001554 PARAMETER Experiment Name: At_Drought_Soil_Dry_P Parameter: Timepoint (day) Value: 7
  misc_feature: MA Experiment 20001554 PARAMETER Experiment Name: At_Drought_Soil_Dry_P Parameter: Treatment Value: Drought vs. No Drought
  misc_feature: MA Experiment ID: 20001555 Result: Up-regulated in Transcription
  misc_feature: MA Experiment 20001555 PARAMETER Experiment Name: At_Drought_Soil_Dry_P Parameter: Age (day) Value: 24
  misc_feature: MA Experiment 20001555 PARAMETER Experiment Name: At_Drought_Soil_Dry_P Parameter: Organism Value: A. thaliana
  misc_feature: MA Experiment 20001555 PARAMETER Experiment Name: At_Drought_Soil_Dry_P Parameter: Plant Line Value: WS
  misc_feature: MA Experiment 20001555 PARAMETER Experiment Name: At_Drought_Soil_Dry_P Parameter: Post Timepoint (hr) Value: None
  misc_feature: MA Experiment 20001555 PARAMETER Experiment Name: At_Drought_Soil_Dry_P Parameter: Post-Treatment Value: None
  misc_feature: MA Experiment 20001555 PARAMETER Experiment Name: At_Drought_Soil_Dry_P Parameter: Timepoint (day) Value: 10
  misc_feature: MA Experiment 20001555 PARAMETER Experiment Name: At_Drought_Soil_Dry_P Parameter: Treatment Value: Drought vs. No Drought
  misc_feature: MA Experiment ID: 20001556 Result: Up-regulated in Transcription
  misc_feature: MA Experiment 20001556 PARAMETER Experiment Name: At_Drought_Soil_Dry_P Parameter: Age (day) Value: 26
  misc_feature: MA Experiment 20001556 PARAMETER Experiment Name: At_Drought_Soil_Dry_P Parameter: Organism Value: A. thaliana
  misc_feature: MA Experiment 20001556 PARAMETER Experiment Name: At_Drought_Soil_Dry_P Parameter: Plant Line Value: WS
  misc_feature: MA Experiment 20001556 PARAMETER Experiment Name: At_Drought_Soil_Dry_P Parameter: Post Timepoint (hr) Value: None
  misc_feature: MA Experiment 20001556 PARAMETER Experiment Name: At_Drought_Soil_Dry_P Parameter: Post-Treatment Value: None
  misc_feature: MA Experiment 20001556 PARAMETER Experiment Name: At_Drought_Soil_Dry_P Parameter: Timepoint (day) Value: 12
  misc_feature: MA Experiment 20001556 PARAMETER Experiment Name: At_Drought_Soil_Dry_P Parameter: Treatment Value: Drought vs. No Drought
  misc_feature: MA Experiment ID: 20001557 Result: Up-regulated in Transcription
  misc_feature: MA Experiment 20001557 PARAMETER Experiment Name: At_Drought_Soil_Dry_P Parameter: Age (day) Value: 27
  misc_feature: MA Experiment 20001557 PARAMETER Experiment Name: At_Drought_Soil_Dry_P Parameter: Organism Value: A. thaliana
  misc_feature: MA Experiment 20001557 PARAMETER Experiment Name: At_Drought_Soil_Dry_P Parameter: Plant Line Value: WS
  misc_feature: MA Experiment 20001557 PARAMETER Experiment Name: At_Drought_Soil_Dry_P Parameter: Post Timepoint (hr) Value: 3
  misc_feature: MA Experiment 20001557 PARAMETER Experiment Name: At_Drought_Soil_Dry_P Parameter: Post-Treatment Value: Re-Water vs. No Drought
  misc_feature: MA Experiment 20001557 PARAMETER Experiment Name: At_Drought_Soil_Dry_P Parameter: Timepoint (day) Value: 13
  misc_feature: MA Experiment 20001557 PARAMETER Experiment Name: At_Drought_Soil_Dry_P Parameter: Treatment Value: Drought vs. No Drought
  misc_feature: MA Experiment ID: 20001559 Result: Up-regulated in Transcription
  misc_feature: MA Experiment 20001559 PARAMETER Experiment Name: At_Drought_Soil_Dry_P Parameter: Age (day) Value: 28
  misc_feature: MA Experiment 20001559 PARAMETER Experiment Name: At_Drought_Soil_Dry_P Parameter: Organism Value: A. thaliana
  misc_feature: MA Experiment 20001559 PARAMETER Experiment Name: At_Drought_Soil_Dry_P Parameter: Plant Line Value: WS
  misc_feature: MA Experiment 20001559 PARAMETER Experiment Name: At_Drought_Soil_Dry_P Parameter: Post Timepoint (hr) Value: 29
  misc_feature: MA Experiment 20001559 PARAMETER Experiment Name: At_Drought_Soil_Dry_P Parameter: Post-Treatment Value: Re-Water vs. No Drought
  misc_feature: MA Experiment 20001559 PARAMETER Experiment Name: At_Drought_Soil_Dry_P Parameter: Timepoint (day) Value: 14
  misc_feature: MA Experiment 20001559 PARAMETER Experiment Name: At_Drought_Soil_Dry_P Parameter: Treatment Value: Drought vs. No Drought
  misc_feature: MA Experiment ID: 20001757 Result: Down-regulated in Transcription
  misc_feature: MA Experiment 20001757 PARAMETER Experiment Name: At_50mM_NH4NO3_L-to-H_P Parameter: Timepoint (hr) Value: 6
  misc_feature: MA Experiment 20001757 PARAMETER Experiment Name: At_50mM_NH4NO3_L-to-H_P Parameter: Tissue Value: Leaf
  misc_feature: MA Experiment 20001757 PARAMETER Experiment Name: At_50mM_NH4NO3_L-to-H_P Parameter: Treatment Value: 50mM NH4NO3 vs 100mM Mannitol
  misc_feature: MA Experiment ID: 20001771 Result: Up-regulated in Transcription
  misc_feature: MA Experiment 20001771 PARAMETER Experiment Name: At_Far-red-enriched-adult_P Parameter: Age (day) Value: 28
  misc_feature: MA Experiment 20001771 PARAMETER Experiment Name: At_Far-red-enriched-adult_P Parameter: Light Value: Far-red enriched vs. White
  misc_feature: MA Experiment 20001771 PARAMETER Experiment Name: At_Far-red-enriched-adult_P Parameter: Organism Value: A. thaliana
  misc_feature: MA Experiment 20001771 PARAMETER Experiment Name: At_Far-red-enriched-adult_P Parameter: Plant Line Value: Columbia
  misc_feature: MA Experiment 20001771 PARAMETER Experiment Name: At_Far-red-enriched-adult_P Parameter: Timepoint (hr) Value: 16
  misc_feature: MA Experiment 20001771 PARAMETER Experiment Name: At_Far-red-enriched-adult_P Parameter: Tissue Value: Aerial
  misc_feature: MA Experiment ID: 20001904 Result: Up-regulated in Transcription
  misc_feature: MA Experiment 20001904 PARAMETER Experiment Name: At_Drought_Reproduction_P Parameter: Age (day) Value: 37
  misc_feature: MA Experiment 20001904 PARAMETER Experiment Name: At_Drought_Reproduction_P Parameter: Organism Value: A. thaliana
  misc_feature: MA Experiment 20001904 PARAMETER Experiment Name: At_Drought_Reproduction_P Parameter: Plant Line Value: WS
  misc_feature: MA Experiment 20001904 PARAMETER Experiment Name: At_Drought_Reproduction_P Parameter: Timepoint (day) Value: 7
  misc_feature: MA Experiment 20001904 PARAMETER Experiment Name: At_Drought_Reproduction_P Parameter: Tissue Value: Rosettes
  misc_feature: MA Experiment 20001904 PARAMETER Experiment Name: At_Drought_Reproduction_P Parameter: Treatment Value: Drought vs. No Drought
  misc_feature: MA Experiment ID: 20001905 Result: Up-regulated in Transcription
  misc_feature: MA Experiment 20001905 PARAMETER Experiment Name: At_Drought_Reproduction_P Parameter: Age (day) Value: 40
  misc_feature: MA Experiment 20001905 PARAMETER Experiment Name: At_Drought_Reproduction_P Parameter: Organism Value: A. thaliana
  misc_feature: MA Experiment 20001905 PARAMETER Experiment Name: At_Drought_Reproduction_P Parameter: Plant Line Value: WS
  misc_feature: MA Experiment 20001905 PARAMETER Experiment Name: At_Drought_Reproduction_P Parameter: Timepoint (day) Value: 10
  misc_feature: MA Experiment 20001905 PARAMETER Experiment Name: At_Drought_Reproduction_P Parameter: Tissue Value: Rosettes
  misc_feature: MA Experiment 20001905 PARAMETER Experiment Name: At_Drought_Reproduction_P Parameter: Treatment Value: Drought vs. No Drought
  misc_feature: MA Experiment ID: 20001906 Result: Up-regulated in Transcription
  misc_feature: MA Experiment 20001906 PARAMETER Experiment Name: At_Drought_Reproduction_P Parameter: Age (day) Value: 35
  misc_feature: MA Experiment 20001906 PARAMETER Experiment Name: At_Drought_Reproduction_P Parameter: Organism Value: A. thaliana
  misc_feature: MA Experiment 20001906 PARAMETER Experiment Name: At_Drought_Reproduction_P Parameter: Plant Line Value: WS
  misc_feature: MA Experiment 20001906 PARAMETER Experiment Name: At_Drought_Reproduction_P Parameter: Timepoint (day) Value: 5
  misc_feature: MA Experiment 20001906 PARAMETER Experiment Name: At_Drought_Reproduction_P Parameter: Tissue Value: Siliques
  misc_feature: MA Experiment 20001906 PARAMETER Experiment Name: At_Drought_Reproduction_P Parameter: Treatment Value: Drought vs. No Drought
  misc_feature: MA Experiment ID: 20001908 Result: Up-regulated in Transcription
  misc_feature: MA Experiment 20001908 PARAMETER Experiment Name: At_Drought_Reproduction_P Parameter: Age (day) Value: 40
  misc_feature: MA Experiment 20001908 PARAMETER Experiment Name: At_Drought_Reproduction_P Parameter: Organism Value: A. thaliana
  misc_feature: MA Experiment 20001908 PARAMETER Experiment Name: At_Drought_Reproduction_P Parameter: Plant Line Value: WS
  misc_feature: MA Experiment 20001908 PARAMETER Experiment Name: At_Drought_Reproduction_P Parameter: Timepoint (day) Value: 10
  misc_feature: MA Experiment 20001908 PARAMETER Experiment Name: At_Drought_Reproduction_P Parameter: Tissue Value: Siliques
  misc_feature: MA Experiment 20001908 PARAMETER Experiment Name: At_Drought_Reproduction_P Parameter: Treatment Value: Drought vs. No Drought

SEQ ID NO: 33153 - protein, 195 aa, Arabidopsis thaliana; identical to SEQ ID NO: 29563
  peptide (1)..(195): Ceres Seq. ID no. 12332128
  misc_feature (1)..(192): Homolog of NCBI NO: 28194659 NR Description: putative early light induced protein [Arachis
  misc_feature (8)..(195): Homolog of NCBI NO: 25315849 NR Description: early light-inducable protein [imported] -
  misc_feature (1)..(194): Homolog of NCBI NO: 7488128 NR Description: probable light induced protein - Arabidopsis
  misc_feature (1)..(195): Homolog of NCBI NO: 18414282 NR Description: Expressed protein
  misc_feature (1)..(195): Homolog of NCBI NO: 21618071 NR Description: light-induced protein-like protein [Arabidopsis
  misc_feature (1)..(195): Homolog of NCBI NO: 38123375 NR Description: ELIP [Brassica rapa subsp. pekinensis]
  misc_feature (1)..(195): Homolog of NCBI NO: 15228866 NR Description: early light-induced protein

SEQ ID NO: 33154 - protein, 188 aa, Arabidopsis thaliana; identical to SEQ ID NO: 29564
  peptide (1)..(188): Ceres Seq. ID no. 12332129
  misc_feature (1)..(185): Homolog of NCBI NO: 28194659 NR Description: putative early light induced protein [Arachis
  misc_feature (1)..(188): Homolog of NCBI NO: 25315849 NR Description: early light-inducable protein [imported] -
  misc_feature (1)..(187): Homolog of NCBI NO: 7488128 NR Description: probable light induced protein - Arabidopsis
  misc_feature (1)..(188): Homolog of NCBI NO: 18414282 NR Description: Expressed protein
  misc_feature (1)..(188): Homolog of NCBI NO: 21618071 NR Description: light-induced protein-like protein [Arabidopsis
  misc_feature (1)..(188): Homolog of NCBI NO: 38123375 NR Description: ELIP [Brassica rapa subsp. pekinensis]
  misc_feature (1)..(188): Homolog of NCBI NO: 15228866 NR Description: early light-induced protein

SEQ ID NO: 33155 - protein, 150 aa, Arabidopsis thaliana; identical to SEQ ID NO: 29565
  peptide (1)..(150): Ceres Seq. ID no. 12332130
  misc_feature (1)..(147): Homolog of NCBI NO: 28194659 NR Description: putative early light induced protein [Arachis
  misc_feature (1)..(150): Homolog of NCBI NO: 25315849 NR Description: early light-inducable protein [imported] -
  misc_feature (1)..(149): Homolog of NCBI NO: 7488128 NR Description: probable light induced protein - Arabidopsis
  misc_feature (1)..(150): Homolog of NCBI NO: 18414282 NR Description: Expressed protein
  misc_feature (1)..(150): Homolog of NCBI NO: 21618071 NR Description: light-induced protein-like protein [Arabidopsis
  misc_feature (1)..(150): Homolog of NCBI NO: 38123375 NR Description: ELIP [Brassica rapa subsp. pekinensis]
  misc_feature (1)..(150): Homolog of NCBI NO: 15228866 NR Description: early light-induced protein

SEQ ID NO: 33156 - DNA, 854 bp, Arabidopsis thaliana; identical to SEQ ID NO: 29566
  misc_feature (1)..(854): Ceres Seq. ID no. 12369952
  misc_feature: MA Experiment ID: 108434 Result: Up-regulated in Transcription
  misc_feature: MA Experiment 108434 PARAMETER Experiment Name: At_Root_Tips_cDNA_P Parameter: Tissue Value: Root Tips
  misc_feature: MA Experiment ID: 108462 Result: Down-regulated in Transcription
  misc_feature: MA Experiment 108462 PARAMETER Experiment Name: At_Germinating_Seeds_cDNA_P Parameter: Age (day) Value: 2 vs. 0
  misc_feature: MA Experiment 108462 PARAMETER Experiment Name: At_Germinating_Seeds_cDNA_P Parameter: Tissue Value: Germinating Seeds
  misc_feature: MA Experiment ID: 108463 Result: Down-regulated in Transcription
  misc_feature: MA Experiment 108463 PARAMETER Experiment Name: At_Germinating_Seeds_cDNA_P Parameter: Age (day) Value: 3 vs. 0
  misc_feature: MA Experiment 108463 PARAMETER Experiment Name: At_Germinating_Seeds_cDNA_P Parameter: Tissue Value: Germinating Seeds
  misc_feature: MA Experiment ID: 108464 Result: Down-regulated in Transcription
  misc_feature: MA Experiment 108464 PARAMETER Experiment Name: At_Germinating_Seeds_cDNA_P Parameter: Age (day) Value: 4 vs. 0
  misc_feature: MA Experiment 108464 PARAMETER Experiment Name: At_Germinating_Seeds_cDNA_P Parameter: Tissue Value: Germinating Seeds
  misc_feature: MA Experiment ID: 108595 Result: Up-regulated in Transcription
  misc_feature: MA Experiment 108595 PARAMETER Experiment Name: At_Ler-pi_Ovule_cDNA_P Parameter: Plant Line Value: null
  misc_feature: MA Experiment ID: 20000224 Result: Down-regulated in Transcription

SEQ ID NO: 33157 - protein, 227 aa, Arabidopsis thaliana; identical to SEQ ID NO: 29567
  peptide (1)..(227): Ceres Seq. ID no. 12369953
  misc_feature (24)..(205): Pfam Name: Proteasome A-type and B-type Pfam Description: Proteasome A-type and B-type
  misc_feature (24)..(211): Homolog of NCBI NO: 33302636 NR Description: Probable proteasome subunit beta type 2
  misc_feature (24)..(209): Homolog of NCBI NO: 8394079 NR Description: proteasome (prosome, macropain) subunit, beta
  misc_feature (24)..(212): Homolog of NCBI NO: 30585195 NR Description: Homo sapiens proteasome (prosome, macropain)
  misc_feature (24)..(212): Homolog of NCBI NO: 4506195 NR Description: proteasome beta 2 subunit
  misc_feature (24)..(212): Homolog of NCBI NO: 29841035 NR Description: similar to NM_017284 proteasome (prosome,
  misc_feature (24)..(157): Homolog of NCBI NO: 14594929 NR Description: putative beta4 proteasome subunit [Nicotiana
  misc_feature (24)..(216): Homolog of NCBI NO: 17380213 NR Description: Proteasome subunit beta type 2 (20S proteasome
  misc_feature (24)..(216): Homolog of NCBI NO: 27552546 NR Description: 20S proteasome beta 4 subunit
  misc_feature (24)..(221): Homolog of NCBI NO: 15233580 NR Description: 20S proteasome beta subunit D2 (PBD2)
  misc_feature (24)..(227): Homolog of NCBI NO: 15228805 NR Description: 20S proteasome beta subunit D (PBD1)

SEQ ID NO: 33158 - protein, 204 aa, Arabidopsis thaliana; identical to SEQ ID NO: 29568
  peptide (1)..(204): Ceres Seq. ID no. 12369954
  misc_feature (1)..(182): Pfam Name: Proteasome A-type and B-type Pfam Description: Proteasome A-type and B-type
  misc_feature (1)..(188): Homolog of NCBI NO: 33302636 NR Description: Probable proteasome subunit beta type 2
  misc_feature (1)..(186): Homolog of NCBI NO: 8394079 NR Description: proteasome (prosome, macropain) subunit, beta
  misc_feature (1)..(189): Homolog of NCBI NO: 30585195 NR Description: Homo sapiens proteasome (prosome, macropain)
  misc_feature (1)..(189): Homolog of NCBI NO: 4506195 NR Description: proteasome beta 2 subunit
  misc_feature (1)..(189): Homolog of NCBI NO: 29841035 NR Description: similar to NM_017284 proteasome (prosome,
  misc_feature (1)..(134): Homolog of NCBI NO: 14594929 NR Description: putative beta4 proteasome subunit [Nicotiana
  misc_feature (1)..(193): Homolog of NCBI NO: 17380213 NR Description: Proteasome subunit beta type 2 (20S proteasome
  misc_feature (1)..(193): Homolog of NCBI NO: 27552546 NR Description: 20S proteasome beta 4 subunit
  misc_feature (1)..(198): Homolog of NCBI NO: 15233580 NR Description: 20S proteasome beta subunit D2 (PBD2)
  misc_feature (1)..(204): Homolog of NCBI NO: 15228805 NR Description: 20S proteasome beta subunit D (PBD1)

SEQ ID NO: 33159 - protein, 169 aa, Arabidopsis thaliana; identical to SEQ ID NO: 29569
  peptide (1)..(169): Ceres Seq. ID no. 12369955
  misc_feature (1)..(147): Pfam Name: Proteasome A-type and B-type Pfam Description: Proteasome A-type and B-type
  misc_feature (1)..(153): Homolog of NCBI NO: 33302636 NR Description: Probable proteasome subunit beta type 2
  misc_feature (1)..(151): Homolog of NCBI NO: 8394079 NR Description: proteasome (prosome, macropain) subunit, beta
  misc_feature (1)..(154): Homolog of NCBI NO: 30585195 NR Description: Homo sapiens proteasome (prosome, macropain)
  misc_feature (1)..(154): Homolog of NCBI NO: 4506195 NR Description: proteasome beta 2 subunit
  misc_feature (1)..(154): Homolog of NCBI NO: 29841035 NR Description: similar to NM_017284 proteasome (prosome,
  misc_feature (1)..(99): Homolog of NCBI NO: 14594929 NR Description: putative beta4 proteasome subunit [Nicotiana
  misc_feature (1)..(158): Homolog of NCBI NO: 17380213 NR Description: Proteasome subunit beta type 2 (20S proteasome
  misc_feature (1)..(158): Homolog of NCBI NO: 27552546 NR Description: 20S proteasome beta 4 subunit
  misc_feature (1)..(163): Homolog of NCBI NO: 15233580 NR Description: 20S proteasome beta subunit D2 (PBD2)
  misc_feature (1)..(169): Homolog of NCBI NO: 15228805 NR Description: 20S proteasome beta subunit D (PBD1)

SEQ ID NO: 33160 - DNA, 979 bp, Arabidopsis thaliana; identical to SEQ ID NO: 29570
  misc_feature (1)..(979): Ceres Seq. ID no. 12333275
  misc_feature: MA Experiment ID: 108474 Result: Down-regulated in Transcription
  misc_feature: MA Experiment 108474 PARAMETER Experiment Name: At_Drought_Flowers_cDNA_P Parameter: Timepoint (hr) Value: null
  misc_feature: MA Experiment 108474 PARAMETER Experiment Name: At_Drought_Flowers_cDNA_P Parameter: Treatment Value: Drought vs. No Drought
  misc_feature: MA Experiment ID: 20000180 Result: Down-regulated in Transcription
  misc_feature: MA Experiment 20000180 PARAMETER Experiment Name: At_Germinating_Seeds_P Parameter: Age (hr) Value: 24 vs. 0
  misc_feature: MA Experiment 20000180 PARAMETER Experiment Name: At_Germinating_Seeds_P Parameter: Tissue Value: Germinating Seeds

SEQ ID NO: 33161 - protein, 152 aa, Arabidopsis thaliana; identical to SEQ ID NO: 29571
  peptide (1)..(152): Ceres Seq. ID no. 12333276
  misc_feature (126)..(152): Homolog of NCBI NO: 18415199 NR Description: expressed protein
  misc_feature (126)..(152): Homolog of NCBI NO: 21617913 NR Description: unknown [Arabidopsis thaliana]
  misc_feature (10)..(134): Homolog of NCBI NO: 21617913 NR Description: unknown [Arabidopsis thaliana]
  misc_feature (10)..(134): Homolog of NCBI NO: 18415199 NR Description: expressed protein
  misc_feature (10)..(134): Homolog of NCBI NO: 34910820 NR Description: P0456A01.15 [Oryza sativa (japonica
  misc_feature (139)..(152): Homolog of NCBI NO: 34910820 NR Description: P0456A01.15 [Oryza sativa (japonica
  misc_feature (10)..(150): Homolog of NCBI NO: 34909516 NR Description: P0481E12.28 [Oryza sativa (japonica
  misc_feature (10)..(134): Homolog of NCBI NO: 15242474 NR Description: putative protein
  misc_feature (10)..(142): Homolog of NCBI NO: 9758672 NR Description: gene_id:MRA19.8~pir||T05029~strong similarity to
  misc_feature (10)..(142): Homolog of NCBI NO: 7452426 NR Description: hypothetical protein F13C5.90 - Arabidopsis

SEQ ID NO: 33162 - protein, 143 aa, Arabidopsis thaliana; identical to SEQ ID NO: 29572
  peptide (1)..(143): Ceres Seq. ID no. 12333277
  misc_feature (117)..(143): Homolog of NCBI NO: 18415199 NR Description: expressed protein
  misc_feature (117)..(143): Homolog of NCBI NO: 21617913 NR Description: unknown [Arabidopsis thaliana]
  misc_feature (1)..(125): Homolog of NCBI NO: 21617913 NR Description: unknown [Arabidopsis thaliana]
  misc_feature (1)..(125): Homolog of NCBI NO: 18415199 NR Description: expressed protein
  misc_feature (1)..(125): Homolog of NCBI NO: 34910820 NR Description: P0456A01.15 [Oryza sativa (japonica
  misc_feature (130)..(143): Homolog of NCBI NO: 34910820 NR Description: P0456A01.15 [Oryza sativa (japonica
  misc_feature (1)..(141): Homolog of NCBI NO: 34909516 NR Description: P0481E12.28 [Oryza sativa (japonica
  misc_feature (1)..(125): Homolog of NCBI NO: 15242474 NR Description: putative protein
  misc_feature (1)..(133): Homolog of NCBI NO: 9758672 NR Description: gene_id:MRA19.8~pir||T05029~strong similarity to
  misc_feature (1)..(133): Homolog of NCBI NO: 7452426 NR Description: hypothetical protein F13C5.90 - Arabidopsis

SEQ ID NO: 33163 - protein, 122 aa, Arabidopsis thaliana; identical to SEQ ID NO: 29573
  peptide (1)..(122): Ceres Seq. ID no. 12333278
  misc_feature (96)..(122): Homolog of NCBI NO: 18415199 NR Description: expressed protein
  misc_feature (96)..(122): Homolog of NCBI NO: 21617913 NR Description: unknown [Arabidopsis thaliana]
  misc_feature (1)..(104): Homolog of NCBI NO: 21617913 NR Description: unknown [Arabidopsis thaliana]
  misc_feature (1)..(104): Homolog of NCBI NO: 18415199 NR Description: expressed protein
  misc_feature (1)..(104): Homolog of NCBI NO: 34910820 NR Description: P0456A01.15 [Oryza sativa (japonica
  misc_feature (109)..(122): Homolog of NCBI NO: 34910820 NR Description: P0456A01.15 [Oryza sativa (japonica
  misc_feature (1)..(120): Homolog of NCBI NO: 34909516 NR Description: P0481E12.28 [Oryza sativa (japonica
  misc_feature (1)..(104): Homolog of NCBI NO: 15242474 NR Description: putative protein
  misc_feature (1)..(112): Homolog of NCBI NO: 9758672 NR Description: gene_id:MRA19.8~pir||T05029~strong similarity to
  misc_feature (1)..(112): Homolog of NCBI NO: 7452426 NR Description: hypothetical protein F13C5.90 - Arabidopsis

SEQ ID NO: 33164 - DNA, 930 bp, Arabidopsis thaliana; identical to SEQ ID NO: 29574
  misc_feature (1)..(930): Ceres Seq. ID no. 12370141
  misc_feature: MA Experiment ID: 108595 Result: Down-regulated in Transcription
  misc_feature: MA Experiment 108595 PARAMETER Experiment Name: At_Ler-pi_Ovule_cDNA_P Parameter: Plant Line Value: null

SEQ ID NO: 33165 - protein, 231 aa, Arabidopsis thaliana; identical to SEQ ID NO: 29575
  peptide (1)..(231): Ceres Seq. ID no. 12370142
  misc_feature (18)..(226): Homolog of NCBI NO: 30584207 NR Description: Homo sapiens superoxide dismutase 2,
  misc_feature (1)..(229): Homolog of NCBI NO: 464775 NR Description: Superoxide dismutase [Mn], mitochondrial
  misc_feature (2)..(229): Homolog of NCBI NO: 9929159 NR Description: manganese superoxide dismutase [Digitalis lanata]
  misc_feature (1)..(229): Homolog of NCBI NO: 3915002 NR Description: Superoxide dismutase [Mn], mitochondrial
  misc_feature (1)..(229): Homolog of NCBI NO: 134672 NR Description: Superoxide dismutase [Mn], mitochondrial
  misc_feature (1)..(229): Homolog of NCBI NO: 7433350 NR Description: superoxide dismutase (EC 1.15.1.1) (Mn) - radish
  misc_feature (1)..(229): Homolog of NCBI NO: 15778185 NR Description: superoxide dismutase [Raphanus sativus]
  misc_feature (1)..(231): Homolog of NCBI NO: 21553457 NR Description: putative (Mn) superoxide dismutase [Arabidopsis
  misc_feature (1)..(231): Homolog of NCBI NO: 11256334 NR Description: superoxide dismutase (EC 1.15.1.1) (Mn)
  misc_feature (1)..(231): Homolog of NCBI NO: 15228407 NR Description: manganese superoxide dismutase (MSD1)

SEQ ID NO: 33166 - protein, 180 aa, Arabidopsis thaliana; identical to SEQ ID NO: 29576
  peptide (1)..(180): Ceres Seq. ID no. 12370143
  misc_feature (1)..(175): Homolog of NCBI NO: 30584207 NR Description: Homo sapiens superoxide dismutase 2,
  misc_feature (1)..(178): Homolog of NCBI NO: 464775 NR Description: Superoxide dismutase [Mn], mitochondrial
  misc_feature (1)..(178): Homolog of NCBI NO: 9929159 NR Description: manganese superoxide dismutase [Digitalis lanata]
  misc_feature (1)..(178): Homolog of NCBI NO: 3915002 NR Description: Superoxide dismutase [Mn], mitochondrial
  misc_feature (1)..(178): Homolog of NCBI NO: 134672 NR Description: Superoxide dismutase [Mn], mitochondrial
  misc_feature (1)..(178): Homolog of NCBI NO: 7433350 NR Description: superoxide dismutase (EC 1.15.1.1) (Mn) - radish
  misc_feature (1)..(178): Homolog of NCBI NO: 15778185 NR Description: superoxide dismutase [Raphanus sativus]
  misc_feature (1)..(180): Homolog of NCBI NO: 21553457 NR Description: putative (Mn) superoxide dismutase [Arabidopsis
  misc_feature (1)..(180): Homolog of NCBI NO: 11256334 NR Description: superoxide dismutase (EC 1.15.1.1) (Mn)
  misc_feature (1)..(180): Homolog of NCBI NO: 15228407 NR Description: manganese superoxide dismutase (MSD1)

SEQ ID NO: 33167 - DNA, 1440 bp, Arabidopsis thaliana; identical to SEQ ID NO: 29577
  misc_feature (1)..(1440): Ceres Seq. ID no. 12370638
  misc_feature: MA Experiment ID: 108434 Result: Up-regulated in Transcription
  misc_feature: MA Experiment 108434 PARAMETER Experiment Name: At_Root_Tips_cDNA_P Parameter: Tissue Value: Root Tips
  misc_feature: MA Experiment ID: 108462 Result: Down-regulated in Transcription
  misc_feature: MA Experiment 108462 PARAMETER Experiment Name: At_Germinating_Seeds_cDNA_P Parameter: Age (day) Value: 2 vs. 0
  misc_feature: MA Experiment 108462 PARAMETER Experiment Name: At_Germinating_Seeds_cDNA_P Parameter: Tissue Value: Germinating Seeds
  misc_feature: MA Experiment ID: 108463 Result: Down-regulated in Transcription
  misc_feature: MA Experiment 108463 PARAMETER Experiment Name: At_Germinating_Seeds_cDNA_P Parameter: Age (day) Value: 3 vs. 0
  misc_feature: MA Experiment 108463 PARAMETER Experiment Name: At_Germinating_Seeds_cDNA_P Parameter: Tissue Value: Germinating Seeds
  misc_feature: MA Experiment ID: 108464 Result: Down-regulated in Transcription
  misc_feature: MA Experiment 108464 PARAMETER Experiment Name: At_Germinating_Seeds_cDNA_P Parameter: Age (day) Value: 4 vs. 0
  misc_feature: MA Experiment 108464 PARAMETER Experiment Name: At_Germinating_Seeds_cDNA_P Parameter: Tissue Value: Germinating Seeds
  misc_feature: MA Experiment ID: 20000173 Result: Up-regulated in Transcription
  misc_feature: MA Experiment 20000173 PARAMETER Experiment Name: At_42deg_Heat_P Parameter: Age (day) Value: 14
  misc_feature: MA Experiment 20000173 PARAMETER Experiment Name: At_42deg_Heat_P Parameter: Organism Value: A. thaliana
  misc_feature: MA Experiment 20000173 PARAMETER Experiment Name: At_42deg_Heat_P Parameter: Plant Line Value: WS
  misc_feature: MA Experiment 20000173 PARAMETER Experiment Name: At_42deg_Heat_P Parameter: Temperature (deg C) Value: 42 vs. 22
  misc_feature: MA Experiment 20000173 PARAMETER Experiment Name: At_42deg_Heat_P Parameter: Timepoint (hr) Value: 6
  misc_feature: MA Experiment 20000173 PARAMETER Experiment Name: At_42deg_Heat_P Parameter: Tissue Value: Aerial
  misc_feature: MA Experiment ID: 20000224 Result: Down-regulated in Transcription
  misc_feature: MA Experiment ID: 20000227 Result: Up-regulated in Transcription
  misc_feature: MA Experiment 20000227 PARAMETER Experiment Name: At_Root-Tips-vs-Tops_P Parameter: Tissue Value: Root Tips vs. Root Tops
  misc_feature: MA Experiment ID: 20000437 Result: Down-regulated in Transcription
  misc_feature: MA Experiment 20000437 PARAMETER Experiment Name: At_Drought_P Parameter: Age (day) Value: 8
  misc_feature: MA Experiment 20000437 PARAMETER Experiment Name: At_Drought_P Parameter: Organism Value: A. thaliana
  misc_feature: MA Experiment 20000437 PARAMETER Experiment Name: At_Drought_P Parameter: Plant Line Value: WS
  misc_feature: MA Experiment 20000437 PARAMETER Experiment Name: At_Drought_P Parameter: Timepoint (hr) Value: 24
  misc_feature: MA Experiment 20000437 PARAMETER Experiment Name: At_Drought_P Parameter: Tissue Value: Whole Plant
  misc_feature: MA Experiment 20000437 PARAMETER Experiment Name: At_Drought_P Parameter: Treatment Value: Drought vs. No Drought
  misc_feature: MA Experiment ID: 20000794 Result: Down-regulated in Transcription
  misc_feature: MA Experiment 20000794 PARAMETER Experiment Name: At_Petals_P Parameter: Age (day) Value: 23-25 days
  misc_feature: MA Experiment 20000794 PARAMETER Experiment Name: At_Petals_P Parameter: Plant Line Value: WS
  misc_feature: MA Experiment 20000794 PARAMETER Experiment Name: At_Petals_P Parameter: Tissue Value: Petals vs. Whole plant
  misc_feature: MA Experiment ID: 20001557 Result: Up-regulated in Transcription
  misc_feature: MA Experiment 20001557 PARAMETER Experiment Name: At_Drought_Soil_Dry_P Parameter: Age (day) Value: 27
  misc_feature: MA Experiment 20001557 PARAMETER Experiment Name: At_Drought_Soil_Dry_P Parameter: Organism Value: A. thaliana
  misc_feature: MA Experiment 20001557 PARAMETER Experiment Name: At_Drought_Soil_Dry_P Parameter: Plant Line Value: WS
  misc_feature: MA Experiment 20001557 PARAMETER Experiment Name: At_Drought_Soil_Dry_P Parameter: Post Timepoint (hr) Value: 3
  misc_feature: MA Experiment 20001557 PARAMETER Experiment Name: At_Drought_Soil_Dry_P Parameter: Post-Treatment Value: Re-Water vs. No Drought
  misc_feature: MA Experiment 20001557 PARAMETER Experiment Name: At_Drought_Soil_Dry_P Parameter: Timepoint (day) Value: 13
  misc_feature: MA Experiment 20001557 PARAMETER Experiment Name: At_Drought_Soil_Dry_P Parameter: Treatment Value: Drought vs. No Drought
  misc_feature: MA Experiment ID: 20001558 Result: Up-regulated in Transcription
  misc_feature: MA Experiment 20001558 PARAMETER Experiment Name: At_Drought_Soil_Dry_P Parameter: Age (day) Value: 27
  misc_feature: MA Experiment 20001558 PARAMETER Experiment Name: At_Drought_Soil_Dry_P Parameter: Organism Value: A. thaliana
  misc_feature: MA Experiment 20001558 PARAMETER Experiment Name: At_Drought_Soil_Dry_P Parameter: Plant Line Value: WS
  misc_feature: MA Experiment 20001558 PARAMETER Experiment Name: At_Drought_Soil_Dry_P Parameter: Post Timepoint (hr) Value: 6
  misc_feature: MA Experiment 20001558 PARAMETER Experiment Name: At_Drought_Soil_Dry_P Parameter: Post-Treatment Value: Re-Water vs. No Drought
  misc_feature: MA Experiment 20001558 PARAMETER Experiment Name: At_Drought_Soil_Dry_P Parameter: Timepoint (day) Value: 13
  misc_feature: MA Experiment 20001558 PARAMETER Experiment Name: At_Drought_Soil_Dry_P Parameter: Treatment Value: Drought vs. No Drought
  misc_feature: MA Experiment ID: 20001757 Result: Up-regulated in Transcription
  misc_feature: MA Experiment 20001757 PARAMETER Experiment Name: At_50mM_NH4NO3_L-to-H_P Parameter: Timepoint (hr) Value: 6
  misc_feature: MA Experiment 20001757 PARAMETER Experiment Name: At_50mM_NH4NO3_L-to-H_P Parameter: Tissue Value: Leaf
  misc_feature: MA Experiment 20001757 PARAMETER Experiment Name: At_50mM_NH4NO3_L-to-H_P Parameter: Treatment Value: 50mM NH4NO3 vs 100mM Mannitol

SEQ ID NO: 33168 - protein, 410 aa, Arabidopsis thaliana; identical to SEQ ID NO: 29578
  peptide (1)..(410): Ceres Seq. ID no. 12370639
  misc_feature (71)..(364): Pfam Name: Ribosomal protein L3 Pfam Description: Ribosomal protein L3
  misc_feature (22)..(410): Homolog of NCBI NO: 4506649 NR Description: ribosomal protein L3
  misc_feature (22)..(410): Homolog of NCBI NO: 27769202 NR Description: Similar to ribosomal protein L3 [Xenopus laevis]
  misc_feature (22)..(410): Homolog of NCBI NO: 1350745 NR Description: 60S RIBOSOMAL PROTEIN L3
  misc_feature (22)..(405): Homolog of NCBI NO: 6688812 NR Description: L3 Ribosomal protein [Medicago sativa subsp. x
  misc_feature (22)..(408): Homolog of NCBI NO: 548770 NR Description: 60S RIBOSOMAL PROTEIN L3
  misc_feature (22)..(410): Homolog of NCBI NO: 81658 NR Description: ribosomal protein L3.e (clone ARP2), cytosolic -
  misc_feature (22)..(410): Homolog of NCBI NO: 15220533 NR Description: ribosomal protein; protein id: At1g61580.1
  misc_feature (22)..(410): Homolog of NCBI NO: 81657 NR Description: ribosomal protein L3.e (clone ARP1), cytosolic -
  misc_feature (22)..(410): Homolog of NCBI NO: 23397228 NR Description: putative ribosomal protein [Arabidopsis thaliana]
  misc_feature (22)..(410): Homolog of NCBI NO: 15218306 NR Description: ribosomal protein

SEQ ID NO: 33169 - protein, 389 aa, Arabidopsis thaliana; identical to SEQ ID NO: 29579
  peptide (1)..(389): Ceres Seq. ID no. 12370640
  misc_feature (50)..(343): Pfam Name: Ribosomal protein L3 Pfam Description: Ribosomal protein L3
  misc_feature (1)..(389): Homolog of NCBI NO: 4506649 NR Description: ribosomal protein L3
  misc_feature (1)..(389): Homolog of NCBI NO: 27769202 NR Description: Similar to ribosomal protein L3 [Xenopus laevis]
  misc_feature (1)..(389): Homolog of NCBI NO: 1350745 NR Description: 60S RIBOSOMAL PROTEIN L3
  misc_feature (1)..(384): Homolog of NCBI NO: 6688812 NR Description: L3 Ribosomal protein [Medicago sativa subsp. x
  misc_feature (1)..(387): Homolog of NCBI NO: 548770 NR Description: 60S RIBOSOMAL PROTEIN L3
  misc_feature (1)..(389): Homolog of NCBI NO: 81658 NR Description: ribosomal protein L3.e (clone ARP2), cytosolic -
  misc_feature (1)..(389): Homolog of NCBI NO: 15220533 NR Description: ribosomal protein; protein id: At1g61580.1
  misc_feature (1)..(389): Homolog of NCBI NO: 81657 NR Description: ribosomal protein L3.e (clone ARP1), cytosolic -
  misc_feature (1)..(389): Homolog of NCBI NO: 23397228 NR Description: putative ribosomal protein [Arabidopsis thaliana]
  misc_feature (1)..(389): Homolog of NCBI NO: 15218306 NR Description: ribosomal protein

SEQ ID NO: 33170 - protein, 343 aa, Arabidopsis thaliana; identical to SEQ ID NO: 29580
  peptide (1)..(343): Ceres Seq. ID no. 12370641
  misc_feature (4)..(297): Pfam Name: Ribosomal protein L3 Pfam Description: Ribosomal protein L3
  misc_feature (1)..(343): Homolog of NCBI NO: 4506649 NR Description: ribosomal protein L3
  misc_feature (1)..(343): Homolog of NCBI NO: 27769202 NR Description: Similar to ribosomal protein L3 [Xenopus laevis]
  misc_feature (1)..(343): Homolog of NCBI NO: 1350745 NR Description: 60S RIBOSOMAL PROTEIN L3
  misc_feature (1)..(338): Homolog of NCBI NO: 6688812 NR Description: L3 Ribosomal protein [Medicago sativa subsp. x
  misc_feature (1)..(341): Homolog of NCBI NO: 548770 NR Description: 60S RIBOSOMAL PROTEIN L3
  misc_feature (1)..(343): Homolog of NCBI NO: 81658 NR Description: ribosomal protein L3.e (clone ARP2), cytosolic -
  misc_feature (1)..(343): Homolog of NCBI NO: 15220533 NR Description: ribosomal protein; protein id: At1g61580.1
  misc_feature (1)..(343): Homolog of NCBI NO: 81657 NR Description: ribosomal protein L3.e (clone ARP1), cytosolic -
  misc_feature (1)..(343): Homolog of NCBI NO: 23397228 NR Description: putative ribosomal protein [Arabidopsis thaliana]
  misc_feature (1)..(343): Homolog of NCBI NO: 15218306 NR Description: ribosomal protein

SEQ ID NO: 33171 - DNA, 1188 bp, Arabidopsis thaliana; identical to SEQ ID NO: 25989
  misc_feature (1)..(1188): Ceres Seq. ID no. 12396278
  misc_feature: MA Experiment ID: 108434 Result: Down-regulated in Transcription
  misc_feature: MA Experiment 108434 PARAMETER Experiment Name: At_Root_Tips_cDNA_P Parameter: Tissue Value: Root Tips
  misc_feature: MA Experiment ID: 108435 Result: Down-regulated in Transcription
  misc_feature: MA Experiment 108435 PARAMETER Experiment Name: At_stm_Mutants_cDNA_P Parameter: Plant Line Value: wt Landsburg vs stm
  misc_feature: MA Experiment 108435 PARAMETER Experiment Name: At_stm_Mutants_cDNA_P Parameter: Tissue Value: Shoot Apical Meristem Region
  misc_feature: MA Experiment ID: 108461 Result: Up-regulated in Transcription
  misc_feature: MA Experiment 108461 PARAMETER Experiment Name: At_Germinating_Seeds_cDNA_P Parameter: Age (day) Value: 1 vs. 0
  misc_feature: MA Experiment 108461 PARAMETER Experiment Name: At_Germinating_Seeds_cDNA_P Parameter: Tissue Value: Germinating Seeds
  misc_feature: MA Experiment ID: 108462 Result: Up-regulated in Transcription
  misc_feature: MA Experiment 108462 PARAMETER Experiment Name: At_Germinating_Seeds_cDNA_P Parameter: Age (day) Value: 2 vs. 0
  misc_feature: MA Experiment 108462 PARAMETER Experiment Name: At_Germinating_Seeds_cDNA_P Parameter: Tissue Value: Germinating Seeds
  misc_feature: MA Experiment ID: 108463 Result: Up-regulated in Transcription
  misc_feature: MA Experiment 108463 PARAMETER Experiment Name: At_Germinating_Seeds_cDNA_P Parameter: Age (day) Value: 3 vs. 0
  misc_feature: MA Experiment 108463 PARAMETER Experiment Name: At_Germinating_Seeds_cDNA_P Parameter: Tissue Value: Germinating Seeds
  misc_feature: MA Experiment ID: 108464 Result: Up-regulated in Transcription
  misc_feature: MA Experiment 108464 PARAMETER Experiment Name: At_Germinating_Seeds_cDNA_P Parameter: Age (day) Value: 4 vs. 0
  misc_feature: MA Experiment 108464 PARAMETER Experiment Name: At_Germinating_Seeds_cDNA_P Parameter: Tissue Value: Germinating Seeds
  misc_feature: MA Experiment ID: 108469 Result: Up-regulated in Transcription
  misc_feature: MA Experiment ID: 108488 Result: Down-regulated in Transcription
  misc_feature: MA Experiment ID: 108573 Result: Down-regulated in Transcription
  misc_feature: MA Experiment 108573 PARAMETER Experiment Name: At_Drought_cDNA_P Parameter: Timepoint (hr) Value: 6
  misc_feature: MA Experiment 108573 PARAMETER Experiment Name: At_Drought_cDNA_P Parameter: Tissue Value: Aerial
  misc_feature: MA Experiment 108573 PARAMETER Experiment Name: At_Drought_cDNA_P Parameter: Treatment Value: Drought vs. No Drought
  misc_feature: MA Experiment ID: 108577 Result: Down-regulated in Transcription
  misc_feature: MA Experiment 108577 PARAMETER Experiment Name: At_42deg_Heat_cDNA_P Parameter: Temperature (deg C) Value: 42 vs. 22
  misc_feature: MA Experiment 108577 PARAMETER Experiment Name: At_42deg_Heat_cDNA_P Parameter: Timepoint (hr) Value: 6
  misc_feature: MA Experiment 108577 PARAMETER Experiment Name: At_42deg_Heat_cDNA_P Parameter: Tissue Value: Aerial
  misc_feature: MA Experiment ID: 108594 Result: Down-regulated in Transcription
  misc_feature: MA Experiment 108594 PARAMETER Experiment Name: At_Ler-rhl_Root_cDNA_P Parameter: Plant Line Value: null
  misc_feature: MA Experiment ID: 108595 Result: Down-regulated in Transcription
  misc_feature: MA Experiment 108595 PARAMETER Experiment Name: At_Ler-pi_Ovule_cDNA_P Parameter: Plant Line Value: null
  misc_feature: MA Experiment ID: 108668 Result: Up-regulated in Transcription
  misc_feature: MA Experiment 108668 PARAMETER Experiment Name: At_2mM_SA_cDNA_P Parameter: Plant Line Value: WS
  misc_feature: MA Experiment 108668 PARAMETER Experiment Name: At_2mM_SA_cDNA_P Parameter: Timepoint (hr) Value: 6
  misc_feature: MA Experiment 108668 PARAMETER Experiment Name: At_2mM_SA_cDNA_P Parameter: Treatment Value: 2mM SA vs. No Treatment
  misc_feature: MA Experiment ID: 20000088 Result: Up-regulated in Transcription
  misc_feature: MA Experiment 20000088 PARAMETER Experiment Name: At_100uM_ABA_Mutants_cDNA_P Parameter: Plant Line Value: Landsberg
  misc_feature: MA Experiment 20000088 PARAMETER Experiment Name: At_100uM_ABA_Mutants_cDNA_P Parameter: Timepoint (hr) Value: 6
  misc_feature: MA Experiment 20000088 PARAMETER Experiment Name: At_100uM_ABA_Mutants_cDNA_P Parameter: Tissue Value: Aerial
  misc_feature: MA Experiment 20000088 PARAMETER Experiment Name: At_100uM_ABA_Mutants_cDNA_P Parameter: Treatment Value: 100uM ABA vs. No Treatment
  misc_feature: MA Experiment ID: 20000113 Result: Down-regulated in Transcription
  misc_feature: MA Experiment 20000113 PARAMETER Experiment Name: At_42deg_Heat_cDNA_P Parameter: Temperature (deg C) Value: 42 vs. 22
  misc_feature: MA Experiment 20000113 PARAMETER Experiment Name: At_42deg_Heat_cDNA_P Parameter: Timepoint (hr) Value: 8
  misc_feature: MA Experiment 20000113 PARAMETER Experiment Name: At_42deg_Heat_cDNA_P Parameter: Tissue Value: Aerial
  misc_feature: MA Experiment ID: 20000173 Result: Down-regulated in Transcription
  misc_feature: MA Experiment 20000173 PARAMETER Experiment Name: At_42deg_Heat_P Parameter: Age (day) Value: 14
  misc_feature: MA Experiment 20000173 PARAMETER Experiment Name: At_42deg_Heat_P Parameter: Organism Value: A. thaliana
  misc_feature: MA Experiment 20000173 PARAMETER Experiment Name: At_42deg_Heat_P Parameter: Plant Line Value: WS
  misc_feature: MA Experiment 20000173 PARAMETER Experiment Name: At_42deg_Heat_P Parameter: Temperature (deg C) Value: 42 vs. 22
  misc_feature: MA Experiment 20000173 PARAMETER Experiment Name: At_42deg_Heat_P Parameter: Timepoint (hr) Value: 6
  misc_feature: MA Experiment 20000173 PARAMETER Experiment Name: At_42deg_Heat_P Parameter: Tissue Value: Aerial
  misc_feature: MA Experiment ID: 20000179 Result: Down-regulated in Transcription
  misc_feature: MA Experiment 20000179 PARAMETER Experiment Name: At_Germinating_Seeds_P Parameter: Age (hr) Value: 6 vs. 0
  misc_feature: MA Experiment 20000179 PARAMETER Experiment Name: At_Germinating_Seeds_P Parameter: Tissue Value: Germinating Seeds
  misc_feature: MA Experiment ID: 20000180 Result: Up-regulated in Transcription
  misc_feature: MA Experiment 20000180 PARAMETER Experiment Name: At_Germinating_Seeds_P Parameter: Age (hr) Value: 24 vs. 0
  misc_feature: MA Experiment 20000180 PARAMETER Experiment Name: At_Germinating_Seeds_P Parameter: Tissue Value: Germinating Seeds
  misc_feature: MA Experiment ID: 20000182 Result: Up-regulated in Transcription
  misc_feature: MA Experiment 20000182 PARAMETER Experiment Name: At_2mM_SA_P Parameter: Age (day) Value: 14
  misc_feature: MA Experiment 20000182 PARAMETER Experiment Name: At_2mM_SA_P Parameter: Organism Value: A. thaliana
  misc_feature: MA Experiment 20000182 PARAMETER Experiment Name: At_2mM_SA_P Parameter: Plant Line Value: WS
  misc_feature: MA Experiment 20000182 PARAMETER Experiment Name: At_2mM_SA_P Parameter: Timepoint (hr) Value: 6
  misc_feature: MA Experiment 20000182 PARAMETER Experiment Name: At_2mM_SA_P Parameter: Tissue Value: Aerial
  misc_feature: MA Experiment 20000182 PARAMETER Experiment Name: At_2mM_SA_P Parameter: Treatment Value: 2mM SA vs. No Treatment
  misc_feature: MA Experiment ID: 20000184 Result: Up-regulated in Transcription
  misc_feature: MA Experiment 20000184 PARAMETER Experiment Name: At_Shoots__P Parameter: Age (day) Value: 7
  misc_feature: MA Experiment 20000184 PARAMETER Experiment Name: At_Shoots__P Parameter: Tissue Value: Shoots vs. Whole Plant
  misc_feature: MA Experiment ID: 20000234 Result: Down-regulated in Transcription
  misc_feature: MA Experiment 20000234 PARAMETER Experiment Name: At_Siliques_P Parameter: Age (day) Value: 21
  misc_feature: MA Experiment 20000234 PARAMETER Experiment Name: At_Siliques_P Parameter: Organism Value: A. thaliana
  misc_feature: MA Experiment 20000234 PARAMETER Experiment Name: At_Siliques_P Parameter: Plant Line Value: WS
  misc_feature: MA Experiment 20000234 PARAMETER Experiment Name: At_Siliques_P Parameter: Tissue Value: Less Than 5mm Siliques vs. Whole Plant
  misc_feature: MA Experiment ID: 20000264 Result: Down-regulated in Transcription
  misc_feature: MA Experiment 20000264 PARAMETER Experiment Name: At_Open_Flower_P Parameter: Age (day) Value: 21
  misc_feature: MA Experiment 20000264 PARAMETER Experiment Name: At_Open_Flower_P Parameter: Plant Line Value: WS
  misc_feature: MA Experiment 20000264 PARAMETER Experiment Name: At_Open_Flower_P Parameter: Tissue Value: Open Flower vs. Whole Plant
  misc_feature: MA Experiment ID: 20000265 Result: Down-regulated in Transcription
  misc_feature: MA Experiment 20000265 PARAMETER Experiment Name: At_Open_Flower_P Parameter: Age (day) Value: 21
  misc_feature: MA Experiment 20000265 PARAMETER Experiment Name: At_Open_Flower_P Parameter: Plant Line Value: WS
  misc_feature: MA Experiment 20000265 PARAMETER Experiment Name: At_Open_Flower_P Parameter: Tissue Value: Closed Flower vs. Whole Plant
  misc_feature: MA Experiment ID: 20000286 Result: Down-regulated in Transcription
  misc_feature: MA Experiment 20000286 PARAMETER Experiment Name: At_Open_Flower_P Parameter: Age (day) Value: 21
  misc_feature: MA Experiment 20000286 PARAMETER Experiment Name: At_Open_Flower_P Parameter: Plant Line Value: WS
  misc_feature: MA Experiment 20000286 PARAMETER Experiment Name: At_Open_Flower_P Parameter: Tissue Value: Half Open vs. Whole Plant
  misc_feature: MA Experiment ID: 20000436 Result: Down-regulated in Transcription
  misc_feature: MA Experiment 20000436 PARAMETER Experiment Name: At_Drought_P Parameter: Age (day) Value: 7
  misc_feature: MA Experiment 20000436 PARAMETER Experiment Name: At_Drought_P Parameter: Organism Value: A. thaliana
  misc_feature: MA Experiment 20000436 PARAMETER Experiment Name: At_Drought_P Parameter: Plant Line Value: WS
  misc_feature: MA Experiment 20000436 PARAMETER Experiment Name: At_Drought_P Parameter: Timepoint (hr) Value: 12
  misc_feature: MA Experiment 20000436 PARAMETER Experiment Name: At_Drought_P Parameter: Tissue Value: Whole Plant
  misc_feature: MA Experiment 20000436 PARAMETER Experiment Name: At_Drought_P Parameter: Treatment Value: Drought vs. No Drought
  misc_feature: MA Experiment ID: 20000437 Result: Down-regulated in Transcription
  misc_feature: MA Experiment 20000437 PARAMETER Experiment Name: At_Drought_P Parameter: Age (day) Value: 8
  misc_feature: MA Experiment 20000437 PARAMETER Experiment Name: At_Drought_P Parameter: Organism Value: A. thaliana
  misc_feature: MA Experiment 20000437 PARAMETER Experiment Name: At_Drought_P Parameter: Plant Line Value: WS
  misc_feature: MA Experiment 20000437 PARAMETER Experiment Name: At_Drought_P Parameter: Timepoint (hr) Value: 24
  misc_feature: MA Experiment 20000437 PARAMETER Experiment Name: At_Drought_P Parameter: Tissue Value: Whole Plant
  misc_feature: MA Experiment 20000437 PARAMETER Experiment Name: At_Drought_P Parameter: Treatment Value: Drought vs. No Drought
  misc_feature: MA Experiment ID: 20000438 Result: Up-regulated in Transcription
  misc_feature: MA Experiment 20000438 PARAMETER Experiment Name: At_Shoots__P Parameter: Age (day) Value: 14
  misc_feature: MA Experiment 20000438 PARAMETER Experiment Name: At_Shoots__P Parameter: Tissue Value: Shoots vs. Whole Plant
  misc_feature: MA Experiment ID: 20000439 Result: Down-regulated in Transcription
  misc_feature: MA Experiment 20000439 PARAMETER Experiment Name: At_Roots__P Parameter: Age (day) Value: 14 vs. 21
  misc_feature: MA Experiment 20000439 PARAMETER Experiment Name: At_Roots__P Parameter: Organism Value: A. thaliana
  misc_feature: MA Experiment 20000439 PARAMETER Experiment Name: At_Roots__P Parameter: Tissue Value: Roots vs. Whole Plant
  misc_feature: MA Experiment ID: 20000441 Result: Up-regulated in Transcription
  misc_feature: MA Experiment 20000441 PARAMETER Experiment Name: At_1uM_BR-BRZ__P Parameter: Tissue Value: Shoot Apices
  misc_feature: MA Experiment 20000441 PARAMETER Experiment Name: At_1uM_BR-BRZ__P Parameter: Treatment Value: 1uM BR vs. No Treatment
  misc_feature: MA Experiment ID: 20000527 Result: Down-regulated in Transcription
  misc_feature: MA Experiment 20000527 PARAMETER Experiment Name: At_10percent_PEG_P Parameter: Age (day) Value: 20
  misc_feature: MA Experiment 20000527 PARAMETER Experiment Name: At_10percent_PEG_P Parameter: Organism Value: A. thaliana
  misc_feature: MA Experiment 20000527 PARAMETER Experiment Name: At_10percent_PEG_P Parameter: Plant Line Value: WS
  misc_feature: MA Experiment 20000527 PARAMETER Experiment Name: At_10percent_PEG_P Parameter: Timepoint (day) Value: 20
  misc_feature: MA Experiment 20000527 PARAMETER Experiment Name: At_10percent_PEG_P Parameter: Tissue Value: Whole Plant
  misc_feature: MA Experiment 20000527 PARAMETER Experiment Name: At_10percent_PEG_P Parameter: Treatment Value: 10percent PEG vs. No Treatment
  misc_feature: MA Experiment ID: 20001248 Result: Up-regulated in Transcription
  misc_feature: MA Experiment 20001248 PARAMETER Experiment Name: At_Far-red-induction_P Parameter: Age (day) Value: 7
  misc_feature: MA Experiment 20001248 PARAMETER Experiment Name: At_Far-red-induction_P Parameter: Light Value: Far-red vs. White
  misc_feature: MA Experiment 20001248 PARAMETER Experiment Name: At_Far-red-induction_P Parameter: Organism Value: A. thaliana
  misc_feature: MA Experiment 20001248 PARAMETER Experiment Name: At_Far-red-induction_P Parameter: Plant Line Value: Columbia
  misc_feature: MA Experiment 20001248 PARAMETER Experiment Name: At_Far-red-induction_P Parameter: Timepoint (hr) Value: 4
  misc_feature: MA Experiment 20001248 PARAMETER Experiment Name: At_Far-red-induction_P Parameter: Tissue Value: Whole Plant
  misc_feature: MA Experiment ID: 20001554 Result: Down-regulated in Transcription
  misc_feature: MA Experiment 20001554 PARAMETER Experiment Name: At_Drought_Soil_Dry_P Parameter: Age (day) Value: 21
  misc_feature: MA Experiment 20001554 PARAMETER Experiment Name: At_Drought_Soil_Dry_P Parameter: Organism Value: A. thaliana
  misc_feature: MA Experiment 20001554 PARAMETER Experiment Name: At_Drought_Soil_Dry_P Parameter: Plant Line Value: WS
  misc_feature: MA Experiment 20001554 PARAMETER Experiment Name: At_Drought_Soil_Dry_P Parameter: Post Timepoint (hr) Value: None
  misc_feature: MA Experiment 20001554 PARAMETER Experiment Name: At_Drought_Soil_Dry_P Parameter: Post-Treatment Value: None
  misc_feature: MA Experiment 20001554 PARAMETER Experiment Name: At_Drought_Soil_Dry_P Parameter: Timepoint (day) Value: 7
  misc_feature: MA Experiment 20001554 PARAMETER Experiment Name: At_Drought_Soil_Dry_P Parameter: Treatment Value: Drought vs. No Drought
  misc_feature: MA Experiment ID: 20001555 Result: Down-regulated in Transcription
  misc_feature: MA Experiment 20001555 PARAMETER Experiment Name: At_Drought_Soil_Dry_P Parameter: Age (day) Value: 24
  misc_feature: MA Experiment 20001555 PARAMETER Experiment Name: At_Drought_Soil_Dry_P Parameter: Organism Value: A. thaliana
  misc_feature: MA Experiment 20001555 PARAMETER Experiment Name: At_Drought_Soil_Dry_P Parameter: Plant Line Value: WS
  misc_feature: MA Experiment 20001555 PARAMETER Experiment Name: At_Drought_Soil_Dry_P Parameter: Post Timepoint (hr) Value: None
  misc_feature: MA Experiment 20001555 PARAMETER Experiment Name: At_Drought_Soil_Dry_P Parameter: Post-Treatment Value: None
  misc_feature: MA Experiment 20001555 PARAMETER Experiment Name: At_Drought_Soil_Dry_P Parameter: Timepoint (day) Value: 10
  misc_feature: MA Experiment 20001555 PARAMETER Experiment Name: At_Drought_Soil_Dry_P Parameter: Treatment Value: Drought vs. No Drought
  misc_feature: MA Experiment ID: 20001557 Result: Up-regulated in Transcription
  misc_feature: MA Experiment 20001557 PARAMETER Experiment Name: At_Drought_Soil_Dry_P Parameter: Age (day) Value: 27
  misc_feature: MA Experiment 20001557 PARAMETER Experiment Name: At_Drought_Soil_Dry_P Parameter: Organism Value: A. thaliana
  misc_feature: MA Experiment 20001557 PARAMETER Experiment Name: At_Drought_Soil_Dry_P Parameter: Plant Line Value: WS
  misc_feature: MA Experiment 20001557 PARAMETER Experiment Name: At_Drought_Soil_Dry_P Parameter: Post Timepoint (hr) Value: 3
  misc_feature: MA Experiment 20001557 PARAMETER Experiment Name: At_Drought_Soil_Dry_P Parameter: Post-Treatment Value: Re-Water vs. No Drought
  misc_feature: MA Experiment 20001557 PARAMETER Experiment Name: At_Drought_Soil_Dry_P Parameter: Timepoint (day) Value: 13
  misc_feature: MA Experiment 20001557 PARAMETER Experiment Name: At_Drought_Soil_Dry_P Parameter: Treatment Value: Drought vs. No Drought
  misc_feature: MA Experiment ID: 20001905 Result: Up-regulated in Transcription
  misc_feature: MA Experiment 20001905 PARAMETER Experiment Name: At_Drought_Reproduction_P Parameter: Age (day) Value: 40
  misc_feature: MA Experiment 20001905 PARAMETER Experiment Name: At_Drought_Reproduction_P Parameter: Organism Value: A. thaliana
  misc_feature: MA Experiment 20001905 PARAMETER Experiment Name: At_Drought_Reproduction_P Parameter: Plant Line Value: WS
  misc_feature: MA Experiment 20001905 PARAMETER Experiment Name: At_Drought_Reproduction_P Parameter: Timepoint (day) Value: 10
  misc_feature: MA Experiment 20001905 PARAMETER Experiment Name: At_Drought_Reproduction_P Parameter: Tissue Value: Rosettes
  misc_feature: MA Experiment 20001905 PARAMETER Experiment Name: At_Drought_Reproduction_P Parameter: Treatment Value: Drought vs. No Drought
  misc_feature: MA Experiment ID: 20001911 Result: Down-regulated in Transcription
  misc_feature: MA Experiment 20001911 PARAMETER Experiment Name: At_Drought_Reproduction_P Parameter: Age (day) Value: 40
  misc_feature: MA Experiment 20001911 PARAMETER Experiment Name: At_Drought_Reproduction_P Parameter: Organism Value: A. thaliana
  misc_feature: MA Experiment 20001911 PARAMETER Experiment Name: At_Drought_Reproduction_P Parameter: Plant Line Value: WS
  misc_feature: MA Experiment 20001911 PARAMETER Experiment Name: At_Drought_Reproduction_P Parameter: Timepoint (day) Value: 10
  misc_feature: MA Experiment 20001911 PARAMETER Experiment Name: At_Drought_Reproduction_P Parameter: Tissue Value: Flowers
  misc_feature: MA Experiment 20001911 PARAMETER Experiment Name: At_Drought_Reproduction_P Parameter: Treatment Value: Drought vs. No Drought

SEQ ID NO: 33172 - protein, 345 aa, Arabidopsis thaliana; identical to SEQ ID NO: 25990
  peptide (1)..(345): Ceres Seq. ID no. 12396279
  misc_feature (175)..(276): Pfam Name: 2OG-Fe(II) oxygenase superfamily Pfam Description: 2OG-Fe(II) oxygenase superfamily
  misc_feature (175)..(276): Pfam Name: 2OG-Fe(II) oxygenase superfamily Pfam Description: 2OG-Fe(II) oxygenase superfamily
  misc_feature (23)..(345): Homolog of NCBI NO: 1085595 NR Description: 1-aminocyclopropane-1-carboxylate oxidase
  misc_feature (23)..(345): Homolog of NCBI NO: 532530 NR Description: 1-aminocyclopropane-1-carboxylate oxidase
  misc_feature (23)..(345): Homolog of NCBI NO: 584711 NR Description: 1-aminocyclopropane-1-carboxylate oxidase 3 (ACC
  misc_feature (23)..(344): Homolog of NCBI NO: 398994 NR Description: 1-aminocyclopropane-1-carboxylate oxidase (ACC
  misc_feature (23)..(344): Homolog of NCBI NO: 14573463 NR Description: 1-aminocyclopropane-1-carboxylate oxidase
  misc_feature (23)..(345): Homolog of NCBI NO: 1085595 NR Description: 1-aminocyclopropane-1-carboxylate oxidase
  misc_feature (23)..(345): Homolog of NCBI NO: 584711 NR Description: 1-aminocyclopropane-1-carboxylate oxidase 3 (ACC
  misc_feature (23)..(344): Homolog of NCBI NO: 14573463 NR Description: 1-aminocyclopropane-1-carboxylate oxidase
  misc_feature (23)..(345): Homolog of NCBI NO: 15220386 NR Description: 1-aminocyclopropane-1-carboxylate oxidase
  misc_feature (23)..(345): Homolog of NCBI NO: 541861 NR Description: ethylene-forming enzyme - Arabidopsis thaliana
  misc_feature (23)..(345): Homolog of NCBI NO: 13877785 NR Description: putative 1-aminocyclopropane-1-carboxylate
  misc_feature (23)..(345): Homolog of NCBI NO: 27447954 NR Description: putative 1-aminocyclopropane-1-carboxylate
  misc_feature (23)..(345): Homolog of NCBI NO: 7576446 NR Description: 1-aminocyclopropane-1-carboxylate oxidase
  misc_feature (23)..(344): Homolog of NCBI NO: 398994 NR Description: 1-aminocyclopropane-1-carboxylate oxidase (ACC
  misc_feature (23)..(345): Homolog of NCBI NO: 532530 NR Description: 1-aminocyclopropane-1-carboxylate oxidase
  misc_feature (23)..(345): Homolog of NCBI NO: 7576446 NR Description: 1-aminocyclopropane-1-carboxylate oxidase
  misc_feature (23)..(345): Homolog of NCBI NO: 27447954 NR Description: putative 1-aminocyclopropane-1-carboxylate
  misc_feature (23)..(345): Homolog of NCBI NO: 13877785 NR Description: putative 1-aminocyclopropane-1-carboxylate
  misc_feature (23)..(345): Homolog of NCBI NO: 541861 NR Description: ethylene-forming enzyme - Arabidopsis thaliana
  misc_feature (23)..(345): Homolog of NCBI NO: 15220386 NR Description: 1-aminocyclopropane-1-carboxylate oxidase

SEQ ID NO: 33173 - protein, 323 aa, Arabidopsis thaliana; identical to SEQ ID NO: 25991
  peptide (1)..(323): Ceres Seq. ID no. 12396280
  misc_feature (153)..(254): Pfam Name: 2OG-Fe(II) oxygenase superfamily Pfam Description: 2OG-Fe(II) oxygenase superfamily
  misc_feature (153)..(254): Pfam Name: 2OG-Fe(II) oxygenase superfamily Pfam Description: 2OG-Fe(II) oxygenase superfamily
  misc_feature (1)..(323): Homolog of NCBI NO: 1085595 NR Description: 1-aminocyclopropane-1-carboxylate oxidase
  misc_feature (1)..(323): Homolog of NCBI NO: 532530 NR Description: 1-aminocyclopropane-1-carboxylate oxidase
  misc_feature (1)..(323): Homolog of NCBI NO: 584711 NR Description: 1-aminocyclopropane-1-carboxylate oxidase 3 (ACC
  misc_feature (1)..(322): Homolog of NCBI NO: 398994 NR Description: 1-aminocyclopropane-1-carboxylate oxidase (ACC
  misc_feature (1)..(322): Homolog of NCBI NO: 14573463 NR Description: 1-aminocyclopropane-1-carboxylate oxidase
  misc_feature (1)..(323): Homolog of NCBI NO: 1085595 NR Description: 1-aminocyclopropane-1-carboxylate oxidase
  misc_feature (1)..(323): Homolog of NCBI NO: 584711 NR Description: 1-aminocyclopropane-1-carboxylate oxidase 3 (ACC
  misc_feature (1)..(322): Homolog of NCBI NO: 14573463 NR Description: 1-aminocyclopropane-1-carboxylate oxidase
  misc_feature (1)..(323): Homolog of NCBI NO: 15220386 NR Description: 1-aminocyclopropane-1-carboxylate oxidase
  misc_feature (1)..(323): Homolog of NCBI NO: 541861 NR Description: ethylene-forming enzyme - Arabidopsis thaliana
  misc_feature (1)..(323): Homolog of NCBI NO: 13877785 NR Description: putative 1-aminocyclopropane-1-carboxylate
  misc_feature (1)..(323): Homolog of NCBI NO: 27447954 NR Description: putative 1-aminocyclopropane-1-carboxylate
  misc_feature (1)..(323): Homolog of NCBI NO: 7576446 NR Description: 1-aminocyclopropane-1-carboxylate oxidase
  misc_feature (1)..(322): Homolog of NCBI NO: 398994 NR Description: 1-aminocyclopropane-1-carboxylate oxidase (ACC
  misc_feature (1)..(323): Homolog of NCBI NO: 532530 NR Description: 1-aminocyclopropane-1-carboxylate oxidase
  misc_feature (1)..(323): Homolog of NCBI NO: 7576446 NR Description: 1-aminocyclopropane-1-carboxylate oxidase
  misc_feature (1)..(323): Homolog of NCBI NO: 27447954 NR Description: putative 1-aminocyclopropane-1-carboxylate
  misc_feature (1)..(323): Homolog of NCBI NO: 13877785 NR Description: putative 1-aminocyclopropane-1-carboxylate
  misc_feature (1)..(323): Homolog of NCBI NO: 541861 NR Description: ethylene-forming enzyme - Arabidopsis thaliana
  misc_feature (1)..(323): Homolog of NCBI NO: 15220386 NR Description: 1-aminocyclopropane-1-carboxylate oxidase

SEQ ID NO: 33174 - protein, 303 aa, Arabidopsis thaliana; identical to SEQ ID NO: 25992
  peptide (1)..(303): Ceres Seq. ID no. 12396281
  misc_feature (133)..(234): Pfam Name: 2OG-Fe(II) oxygenase superfamily Pfam Description: 2OG-Fe(II) oxygenase superfamily
  misc_feature (133)..(234): Pfam Name: 2OG-Fe(II) oxygenase superfamily Pfam Description: 2OG-Fe(II) oxygenase superfamily
  misc_feature (1)..(303): Homolog of NCBI NO: 1085595 NR Description: 1-aminocyclopropane-1-carboxylate oxidase
  misc_feature (1)..(303): Homolog of NCBI NO: 532530 NR Description: 1-aminocyclopropane-1-carboxylate oxidase
  misc_feature (1)..(303): Homolog of NCBI NO: 584711 NR Description: 1-aminocyclopropane-1-carboxylate oxidase 3 (ACC
  misc_feature (1)..(302): Homolog of NCBI NO: 398994 NR Description: 1-aminocyclopropane-1-carboxylate oxidase (ACC
  misc_feature (1)..(302): Homolog of NCBI NO: 14573463 NR Description: 1-aminocyclopropane-1-carboxylate oxidase
  misc_feature (1)..(303): Homolog of NCBI NO: 1085595 NR Description: 1-aminocyclopropane-1-carboxylate oxidase
  misc_feature (1)..(303): Homolog of NCBI NO: 584711 NR Description: 1-aminocyclopropane-1-carboxylate oxidase 3 (ACC
  misc_feature (1)..(302): Homolog of NCBI NO: 14573463 NR Description: 1-aminocyclopropane-1-carboxylate oxidase
  misc_feature (1)..(303): Homolog of NCBI NO: 15220386 NR Description: 1-aminocyclopropane-1-carboxylate oxidase
  misc_feature (1)..(303): Homolog of NCBI NO: 541861 NR Description: ethylene-forming enzyme - Arabidopsis thaliana
  misc_feature (1)..(303): Homolog of NCBI NO: 13877785 NR Description: putative 1-aminocyclopropane-1-carboxylate
  misc_feature (1)..(303): Homolog of NCBI NO: 27447954 NR Description: putative 1-aminocyclopropane-1-carboxylate
  misc_feature (1)..(303): Homolog of NCBI NO: 7576446 NR Description: 1-aminocyclopropane-1-carboxylate oxidase
  misc_feature (1)..(302): Homolog of NCBI NO: 398994 NR Description: 1-aminocyclopropane-1-carboxylate oxidase (ACC
  misc_feature (1)..(303): Homolog of NCBI NO: 532530 NR Description: 1-aminocyclopropane-1-carboxylate oxidase
  misc_feature (1)..(303): Homolog of NCBI NO: 7576446 NR Description: 1-aminocyclopropane-1-carboxylate oxidase
  misc_feature (1)..(303): Homolog of NCBI NO: 27447954 NR Description: putative 1-aminocyclopropane-1-carboxylate
  misc_feature (1)..(303): Homolog of NCBI NO: 13877785 NR Description: putative 1-aminocyclopropane-1-carboxylate
  misc_feature (1)..(303): Homolog of NCBI NO: 541861 NR Description: ethylene-forming enzyme - Arabidopsis thaliana
  misc_feature (1)..(303): Homolog of NCBI NO: 15220386 NR Description: 1-aminocyclopropane-1-carboxylate oxidase

SEQ ID NO: 33175 - DNA, 946 bp, Arabidopsis thaliana; identical to SEQ ID NO: 29585
  misc_feature (1)..(946): Ceres Seq. ID no. 12441500
  misc_feature: MA Experiment ID: 108434 Result: Down-regulated in Transcription
  misc_feature: MA Experiment 108434 PARAMETER Experiment Name: At_Root_Tips_cDNA_P Parameter: Tissue Value: Root Tips
  misc_feature: MA Experiment ID: 108461 Result: Up-regulated in Transcription
  misc_feature: MA Experiment 108461 PARAMETER Experiment Name: At_Germinating_Seeds_cDNA_P Parameter: Age (day) Value: 1 vs. 0
  misc_feature: MA Experiment 108461 PARAMETER Experiment Name: At_Germinating_Seeds_cDNA_P Parameter: Tissue Value: Germinating Seeds
  misc_feature: MA Experiment ID: 108462 Result: Up-regulated in Transcription
  misc_feature: MA Experiment 108462 PARAMETER Experiment Name: At_Germinating_Seeds_cDNA_P Parameter: Age (day) Value: 2 vs. 0
  misc_feature: MA Experiment 108462 PARAMETER Experiment Name: At_Germinating_Seeds_cDNA_P Parameter: Tissue Value: Germinating Seeds
  misc_feature: MA Experiment ID: 108464 Result: Up-regulated in Transcription
  misc_feature: MA Experiment 108464 PARAMETER Experiment Name: At_Germinating_Seeds_cDNA_P Parameter: Age (day) Value: 4 vs. 0
  misc_feature: MA Experiment 108464 PARAMETER Experiment Name: At_Germinating_Seeds_cDNA_P Parameter: Tissue Value: Germinating Seeds
  misc_feature: MA Experiment ID: 108488 Result: Up-regulated in Transcription
  misc_feature: MA Experiment ID: 108489 Result: Down-regulated in Transcription
  misc_feature: MA Experiment ID: 20000180 Result: Up-regulated in Transcription
  misc_feature: MA Experiment 20000180 PARAMETER Experiment Name: At_Germinating_Seeds_P Parameter: Age (hr) Value: 24 vs. 0
  misc_feature: MA Experiment 20000180 PARAMETER Experiment Name: At_Germinating_Seeds_P Parameter: Tissue Value: Germinating Seeds
  misc_feature: MA Experiment ID: 20000227 Result: Down-regulated in Transcription
  misc_feature: MA Experiment 20000227 PARAMETER Experiment Name: At_Root-Tips-vs-Tops_P Parameter: Tissue Value: Root Tips vs. Root Tops
  misc_feature: MA Experiment ID: 20000265 Result: Down-regulated in Transcription
  misc_feature: MA Experiment 20000265 PARAMETER Experiment Name: At_Open_Flower_P Parameter: Age (day) Value: 21
  misc_feature: MA Experiment 20000265 PARAMETER Experiment Name: At_Open_Flower_P Parameter: Plant Line Value: WS
  misc_feature: MA Experiment 20000265 PARAMETER Experiment Name: At_Open_Flower_P Parameter: Tissue Value: Closed Flower vs. Whole Plant
  misc_feature: MA Experiment ID: 20000269 Result: Down-regulated in Transcription
  misc_feature: MA Experiment 20000269 PARAMETER Experiment Name: At_1mM_KNO3_L-vs-H_Roots_P Parameter: Age (day) Value: 7,10,12
  misc_feature: MA Experiment 20000269 PARAMETER Experiment Name: At_1mM_KNO3_L-vs-H_Roots_P Parameter: Organism Value: A. thaliana
  misc_feature: MA Experiment 20000269 PARAMETER Experiment Name: At_1mM_KNO3_L-vs-H_Roots_P Parameter: Plant Line Value: WS
  misc_feature: MA Experiment 20000269 PARAMETER Experiment Name: At_1mM_KNO3_L-vs-H_Roots_P Parameter: Timepoint (day) Value: 7,10,12
  misc_feature: MA Experiment 20000269 PARAMETER Experiment Name: At_1mM_KNO3_L-vs-H_Roots_P Parameter: Tissue Value: Roots
  misc_feature: MA Experiment 20000269 PARAMETER Experiment Name: At_1mM_KNO3_L-vs-H_Roots_P Parameter: Treatment Value: 1mM KNO3 vs. 50mM KNO3
  misc_feature: MA Experiment ID: 20000286 Result: Down-regulated in Transcription
  misc_feature: MA Experiment 20000286 PARAMETER Experiment Name: At_Open_Flower_P Parameter: Age (day) Value: 21
  misc_feature: MA Experiment 20000286 PARAMETER Experiment Name: At_Open_Flower_P Parameter: Plant Line Value: WS
  misc_feature: MA Experiment 20000286 PARAMETER Experiment Name: At_Open_Flower_P Parameter: Tissue Value: Half Open vs. Whole Plant
  misc_feature: MA Experiment ID: 20000436 Result: Up-regulated in Transcription
  misc_feature: MA Experiment 20000436 PARAMETER Experiment Name: At_Drought_P Parameter: Age (day) Value: 7
  misc_feature: MA Experiment 20000436 PARAMETER Experiment Name: At_Drought_P Parameter: Organism Value: A. thaliana
  misc_feature: MA Experiment 20000436 PARAMETER Experiment Name: At_Drought_P Parameter: Plant Line Value: WS
  misc_feature: MA Experiment 20000436 PARAMETER Experiment Name: At_Drought_P Parameter: Timepoint (hr) Value: 12
  misc_feature: MA Experiment 20000436 PARAMETER Experiment Name: At_Drought_P Parameter: Tissue Value: Whole Plant
  misc_feature: MA Experiment 20000436 PARAMETER Experiment Name: At_Drought_P Parameter: Treatment Value: Drought vs. No Drought
  misc_feature: MA Experiment ID: 20000439 Result: Down-regulated in Transcription
  misc_feature: MA Experiment 20000439 PARAMETER Experiment Name: At_Roots__P Parameter: Age (day) Value: 14 vs. 21
  misc_feature: MA Experiment 20000439 PARAMETER Experiment Name: At_Roots__P Parameter: Organism Value: A. thaliana
  misc_feature: MA Experiment 20000439 PARAMETER Experiment Name: At_Roots__P Parameter: Tissue Value: Roots vs. Whole Plant
  misc_feature: MA Experiment ID: 20000441 Result: Up-regulated in Transcription
  misc_feature: MA Experiment 20000441 PARAMETER Experiment Name: At_1uM_BR-BRZ__P Parameter: Tissue Value: Shoot Apices
  misc_feature: MA Experiment 20000441 PARAMETER Experiment Name: At_1uM_BR-BRZ__P Parameter: Treatment Value: 1uM BR vs. No Treatment
  misc_feature: MA Experiment ID: 20000443 Result: Up-regulated in Transcription
  misc_feature: MA Experiment 20000443 PARAMETER Experiment Name: At_1uM_BR-BRZ__P Parameter: Tissue Value: Shoot Apices
  misc_feature: MA Experiment 20000443 PARAMETER Experiment Name: At_1uM_BR-BRZ__P Parameter: Treatment Value: 1uM BRZ vs. No Treatment
  misc_feature: MA Experiment ID: 20001450 Result: Up-regulated in Transcription
  misc_feature: MA Experiment 20001450 PARAMETER Experiment Name: At_Far-red-induction_P Parameter: Age (day) Value: 7
  misc_feature: MA Experiment 20001450 PARAMETER Experiment Name: At_Far-red-induction_P Parameter: Light Value: Far-red vs. White
  misc_feature: MA Experiment 20001450 PARAMETER Experiment Name: At_Far-red-induction_P Parameter: Organism Value: A. thaliana
  misc_feature: MA Experiment 20001450 PARAMETER Experiment Name: At_Far-red-induction_P Parameter: Plant Line Value: Columbia
  misc_feature: MA Experiment 20001450 PARAMETER Experiment Name: At_Far-red-induction_P Parameter: Timepoint (hr) Value: 8
  misc_feature: MA Experiment 20001450 PARAMETER Experiment Name: At_Far-red-induction_P Parameter: Tissue Value: Whole Plant
  misc_feature: MA Experiment ID: 20001451 Result: Up-regulated in Transcription
  misc_feature: MA Experiment 20001451 PARAMETER Experiment Name: At_Far-red-induction_P Parameter: Age (day) Value: 7
  misc_feature: MA Experiment 20001451 PARAMETER Experiment Name: At_Far-red-induction_P Parameter: Light Value: Far-red vs. White
  misc_feature: MA Experiment 20001451 PARAMETER Experiment Name: At_Far-red-induction_P Parameter: Organism Value: A. thaliana
  misc_feature: MA Experiment 20001451 PARAMETER Experiment Name: At_Far-red-induction_P Parameter: Plant Line Value: Columbia
  misc_feature: MA Experiment 20001451 PARAMETER Experiment Name: At_Far-red-induction_P Parameter: Timepoint (hr) Value: 24
  misc_feature: MA Experiment 20001451 PARAMETER Experiment Name: At_Far-red-induction_P Parameter: Tissue Value: Whole Plant
  misc_feature: MA Experiment ID: 20001558 Result: Down-regulated in Transcription
  misc_feature: MA Experiment 20001558 PARAMETER Experiment Name: At_Drought_Soil_Dry_P Parameter: Age (day) Value: 27
  misc_feature: MA Experiment 20001558 PARAMETER Experiment Name: At_Drought_Soil_Dry_P Parameter: Organism Value: A. thaliana
  misc_feature: MA Experiment 20001558 PARAMETER Experiment Name: At_Drought_Soil_Dry_P Parameter: Plant Line Value: WS
  misc_feature: MA Experiment 20001558 PARAMETER Experiment Name: At_Drought_Soil_Dry_P Parameter: Post Timepoint (hr) Value: 6
  misc_feature: MA Experiment 20001558 PARAMETER Experiment Name: At_Drought_Soil_Dry_P Parameter: Post-Treatment Value: Re-Water vs. No Drought
  misc_feature: MA Experiment 20001558 PARAMETER Experiment Name: At_Drought_Soil_Dry_P Parameter: Timepoint (day) Value: 13
  misc_feature: MA Experiment 20001558 PARAMETER Experiment Name: At_Drought_Soil_Dry_P Parameter: Treatment Value: Drought vs. No Drought
  misc_feature: MA Experiment ID: 20001757 Result: Up-regulated in Transcription
  misc_feature: MA Experiment 20001757 PARAMETER Experiment Name: At_50mM_NH4NO3_L-to-H_P Parameter: Timepoint (hr) Value: 6
  misc_feature: MA Experiment 20001757 PARAMETER Experiment Name: At_50mM_NH4NO3_L-to-H_P Parameter: Tissue Value: Leaf
  misc_feature: MA Experiment 20001757 PARAMETER Experiment Name: At_50mM_NH4NO3_L-to-H_P Parameter: Treatment Value: 50mM NH4NO3 vs 100mM Mannitol
  misc_feature: MA Experiment ID: 20001905 Result: Down-regulated in Transcription
  misc_feature: MA Experiment 20001905 PARAMETER Experiment Name: At_Drought_Reproduction_P Parameter: Age (day) Value: 40
  misc_feature: MA Experiment 20001905 PARAMETER Experiment Name: At_Drought_Reproduction_P Parameter: Organism Value: A. thaliana
  misc_feature: MA Experiment 20001905 PARAMETER Experiment Name: At_Drought_Reproduction_P Parameter: Plant Line Value: WS
  misc_feature: MA Experiment 20001905 PARAMETER Experiment Name: At_Drought_Reproduction_P Parameter: Timepoint (day) Value: 10
  misc_feature: MA Experiment 20001905 PARAMETER Experiment Name: At_Drought_Reproduction_P Parameter: Tissue Value: Rosettes
  misc_feature: MA Experiment 20001905 PARAMETER Experiment Name: At_Drought_Reproduction_P Parameter: Treatment Value: Drought vs. No Drought

SEQ ID NO: 33176 - protein, 283 aa, Arabidopsis thaliana; identical to SEQ ID NO: 29586
  peptide (1)..(283): Ceres Seq. ID no. 12441501
  misc_feature (81)..(250): Pfam Name: Chlorophyll A-B binding protein Pfam Description: Chlorophyll A-B binding protein
  misc_feature (36)..(283): Homolog of NCBI NO: 12324161 NR Description: chlorophyll A-B-binding protein 2 precursor, 5'
  misc_feature (19)..(283): Homolog of NCBI NO: 30686051 NR Description: photosystem II type I chlorophyll a /b binding
  misc_feature (19)..(283): Homolog of NCBI NO: 18266039 NR Description: chlorophyll a/b binding protein [Brassica
  misc_feature (19)..(283): Homolog of NCBI NO: 21592428 NR Description: putative photosystem II type I chlorophyll a b
  misc_feature (19)..(283): Homolog of NCBI NO: 18403549 NR Description: photosystem II type I chlorophyll a /b binding
  misc_feature (19)..(283): Homolog of NCBI NO: 115778 NR Description: Chlorophyll A-B binding protein 1, chloroplast
  misc_feature (19)..(283): Homolog of NCBI NO: 17473828 NR Description: chlorophyll a/b-binding protein [Arabidopsis
  misc_feature (19)..(283): Homolog of NCBI NO: 18397286 NR Description: photosystem II type I chlorophyll a /b binding
  misc_feature (19)..(283): Homolog of NCBI NO: 15220615 NR Description: light-harvesting chlorophyll a/b binding protein
  misc_feature (19)..(283): Homolog of NCBI NO: 18403546 NR Description: photosystem II type I chlorophyll a /b binding

SEQ ID NO: 33177 - protein, 265 aa, Arabidopsis thaliana; identical to SEQ ID NO: 29587
  peptide (1)..(265): Ceres Seq. ID no. 12441502
  misc_feature (63)..(232): Pfam Name: Chlorophyll A-B binding protein Pfam Description: Chlorophyll A-B binding protein
  misc_feature (18)..(265): Homolog of NCBI NO: 12324161 NR Description: chlorophyll A-B-binding protein 2 precursor, 5'
  misc_feature (1)..(265): Homolog of NCBI NO: 30686051 NR Description: photosystem II type I chlorophyll a /b binding
  misc_feature (1)..(265): Homolog of NCBI NO: 18266039 NR Description: chlorophyll a/b binding protein [Brassica
  misc_feature (1)..(265): Homolog of NCBI NO: 21592428 NR Description: putative photosystem II type I chlorophyll a b
  misc_feature (1)..(265): Homolog of NCBI NO: 18403549 NR Description: photosystem II type I chlorophyll a /b binding
  misc_feature (1)..(265): Homolog of NCBI NO: 115778 NR Description: Chlorophyll A-B binding protein 1, chloroplast
  misc_feature (1)..(265): Homolog of NCBI NO: 17473828 NR Description: chlorophyll a/b-binding protein [Arabidopsis
  misc_feature (1)..(265): Homolog of NCBI NO: 18397286 NR Description: photosystem II type I chlorophyll a /b binding
  misc_feature (1)..(265): Homolog of NCBI NO: 15220615 NR Description: light-harvesting chlorophyll a/b binding protein
  misc_feature (1)..(265): Homolog of NCBI NO: 18403546 NR Description: photosystem II type I chlorophyll a /b binding

SEQ ID NO: 33178 - protein, 260 aa, Arabidopsis thaliana; identical to SEQ ID NO: 29588
  peptide (1)..(260): Ceres Seq. ID no. 12441503
  misc_feature (58)..(227): Pfam Name: Chlorophyll A-B binding protein Pfam Description: Chlorophyll A-B binding protein
  misc_feature (13)..(260): Homolog of NCBI NO: 12324161 NR Description: chlorophyll A-B-binding protein 2 precursor, 5'
  misc_feature (1)..(260): Homolog of NCBI NO: 30686051 NR Description: photosystem II type I chlorophyll a /b binding
  misc_feature (1)..(260): Homolog of NCBI NO: 18266039 NR Description: chlorophyll a/b binding protein [Brassica
  misc_feature (1)..(260): Homolog of NCBI NO: 21592428 NR Description: putative photosystem II type I chlorophyll a b
  misc_feature (1)..(260): Homolog of NCBI NO: 18403549 NR Description: photosystem II type I chlorophyll a /b binding
  misc_feature (1)..(260): Homolog of NCBI NO: 115778 NR Description: Chlorophyll A-B binding protein 1, chloroplast
  misc_feature (1)..(260): Homolog of NCBI NO: 17473828 NR Description: chlorophyll a/b-binding protein [Arabidopsis
  misc_feature (1)..(260): Homolog of NCBI NO: 18397286 NR Description: photosystem II type I chlorophyll a /b binding
  misc_feature (1)..(260): Homolog of NCBI NO: 15220615 NR Description: light-harvesting chlorophyll a/b binding protein
  misc_feature (1)..(260): Homolog of NCBI NO: 18403546 NR Description: photosystem II type I chlorophyll a /b binding

SEQ ID NO: 33179 - DNA, 1462 bp, Arabidopsis thaliana; identical to SEQ ID NO: 29589
  misc_feature (1)..(1462): Ceres Seq. ID no. 12421962
  misc_feature: MA Experiment ID: 108435 Result: Up-regulated in Transcription
  misc_feature: MA Experiment 108435 PARAMETER Experiment Name: At_stm_Mutants_cDNA_P Parameter: Plant Line Value: wt Landsburg vs stm
  misc_feature: MA Experiment 108435 PARAMETER Experiment Name: At_stm_Mutants_cDNA_P Parameter: Tissue Value: Shoot Apical Meristem Region
  misc_feature: MA Experiment ID: 20000180 Result: Up-regulated in Transcription
  misc_feature: MA Experiment 20000180 PARAMETER Experiment Name: At_Germinating_Seeds_P Parameter: Age (hr) Value: 24 vs. 0
  misc_feature: MA Experiment 20000180 PARAMETER Experiment Name: At_Germinating_Seeds_P Parameter: Tissue Value: Germinating Seeds
  misc_feature: MA Experiment ID: 20000234 Result: Down-regulated in Transcription
  misc_feature: MA Experiment 20000234 PARAMETER Experiment Name: At_Siliques_P Parameter: Age (day) Value: 21
  misc_feature: MA Experiment 20000234 PARAMETER Experiment Name: At_Siliques_P Parameter: Organism Value: A. thaliana
  misc_feature: MA Experiment 20000234 PARAMETER Experiment Name: At_Siliques_P Parameter: Plant Line Value: WS
  misc_feature: MA Experiment 20000234 PARAMETER Experiment Name: At_Siliques_P Parameter: Tissue Value: Less Than 5mm Siliques vs. Whole Plant
  misc_feature: MA Experiment ID: 20000235 Result: Down-regulated in Transcription
  misc_feature: MA Experiment 20000235 PARAMETER Experiment Name: At_Siliques_P Parameter: Age (day) Value: 21
  misc_feature: MA Experiment 20000235 PARAMETER Experiment Name: At_Siliques_P Parameter: Organism Value: A. thaliana
  misc_feature: MA Experiment 20000235 PARAMETER Experiment Name: At_Siliques_P Parameter: Plant Line Value: WS
  misc_feature: MA Experiment 20000235 PARAMETER Experiment Name: At_Siliques_P Parameter: Tissue Value: 5-10mm Siliques vs. Whole Plant
  misc_feature: MA Experiment ID: 20000437 Result: Down-regulated in Transcription
  misc_feature: MA Experiment 20000437 PARAMETER Experiment Name: At_Drought_P Parameter: Age (day) Value: 8
  misc_feature: MA Experiment 20000437 PARAMETER Experiment Name: At_Drought_P Parameter: Organism Value: A. thaliana
  misc_feature: MA Experiment 20000437 PARAMETER Experiment Name: At_Drought_P Parameter: Plant Line Value: WS
  misc_feature: MA Experiment 20000437 PARAMETER Experiment Name: At_Drought_P Parameter: Timepoint (hr) Value: 24
  misc_feature: MA Experiment 20000437 PARAMETER Experiment Name: At_Drought_P Parameter: Tissue Value: Whole Plant
  misc_feature: MA Experiment 20000437 PARAMETER Experiment Name: At_Drought_P Parameter: Treatment Value: Drought vs. No Drought
  misc_feature: MA Experiment ID: 20000573 Result: Down-regulated in Transcription
  misc_feature: MA Experiment 20000573 PARAMETER Experiment Name: At_100uM_ABA_Mutants__P Parameter: Organism Value: A. thaliana
  misc_feature: MA Experiment 20000573 PARAMETER Experiment Name: At_100uM_ABA_Mutants__P Parameter: Plant Line Value: CS22 vs. Ler wt
  misc_feature: MA Experiment 20000573 PARAMETER Experiment Name: At_100uM_ABA_Mutants__P Parameter: Timepoint (hr) Value: N/A
  misc_feature: MA Experiment 20000573 PARAMETER Experiment Name: At_100uM_ABA_Mutants__P Parameter: Tissue Value: Whole Plant
  misc_feature: MA Experiment 20000573 PARAMETER Experiment Name: At_100uM_ABA_Mutants__P Parameter: Treatment Value: None
  misc_feature: MA Experiment ID: 20000574 Result: Down-regulated in Transcription
  misc_feature: MA Experiment 20000574 PARAMETER Experiment Name: At_100uM_ABA_Mutants__P Parameter: Organism Value: A. thaliana
  misc_feature: MA Experiment 20000574 PARAMETER Experiment Name: At_100uM_ABA_Mutants__P Parameter: Plant Line Value: CS23 vs. Ler wt
  misc_feature: MA Experiment 20000574 PARAMETER Experiment Name: At_100uM_ABA_Mutants__P Parameter: Timepoint (hr) Value: N/A
  misc_feature: MA Experiment 20000574 PARAMETER Experiment Name: At_100uM_ABA_Mutants__P Parameter: Tissue Value: Whole Plant
  misc_feature: MA Experiment 20000574 PARAMETER Experiment Name: At_100uM_ABA_Mutants__P Parameter: Treatment Value: None
  misc_feature: MA Experiment ID: 20001450 Result: Up-regulated in Transcription
  misc_feature: MA Experiment 20001450 PARAMETER Experiment Name: At_Far-red-induction_P Parameter: Age (day) Value: 7
  misc_feature: MA Experiment 20001450 PARAMETER Experiment Name: At_Far-red-induction_P Parameter: Light Value: Far-red vs. White
  misc_feature: MA Experiment 20001450 PARAMETER Experiment Name: At_Far-red-induction_P Parameter: Organism Value: A. thaliana
  misc_feature: MA Experiment 20001450 PARAMETER Experiment Name: At_Far-red-induction_P Parameter: Plant Line Value: Columbia
  misc_feature: MA Experiment 20001450 PARAMETER Experiment Name: At_Far-red-induction_P Parameter: Timepoint (hr) Value: 8
  misc_feature: MA Experiment 20001450 PARAMETER Experiment Name: At_Far-red-induction_P Parameter: Tissue Value: Whole Plant
  misc_feature: MA Experiment ID: 20001451 Result: Up-regulated in Transcription
  misc_feature: MA Experiment 20001451 PARAMETER Experiment Name: At_Far-red-induction_P Parameter: Age (day) Value: 7
  misc_feature: MA Experiment 20001451 PARAMETER Experiment Name: At_Far-red-induction_P Parameter: Light Value: Far-red vs. White
  misc_feature: MA Experiment 20001451 PARAMETER Experiment Name: At_Far-red-induction_P Parameter: Organism Value: A. thaliana
  misc_feature: MA Experiment 20001451 PARAMETER Experiment Name: At_Far-red-induction_P Parameter: Plant Line Value: Columbia
  misc_feature: MA Experiment 20001451 PARAMETER Experiment Name: At_Far-red-induction_P Parameter: Timepoint (hr) Value: 24
  misc_feature: MA Experiment 20001451 PARAMETER Experiment Name: At_Far-red-induction_P Parameter: Tissue Value: Whole Plant
  misc_feature: MA Experiment ID: 20001910 Result: Down-regulated in Transcription
  misc_feature: MA Experiment 20001910 PARAMETER Experiment Name: At_Drought_Reproduction_P Parameter: Age (day) Value: 37
  misc_feature: MA Experiment 20001910 PARAMETER Experiment Name: At_Drought_Reproduction_P Parameter: Organism Value: A. thaliana
  misc_feature: MA Experiment 20001910 PARAMETER Experiment Name: At_Drought_Reproduction_P Parameter: Plant Line Value: WS
  misc_feature: MA Experiment 20001910 PARAMETER Experiment Name: At_Drought_Reproduction_P Parameter: Timepoint (day) Value: 7
  misc_feature: MA Experiment 20001910 PARAMETER Experiment Name: At_Drought_Reproduction_P Parameter: Tissue Value: Flowers
  misc_feature: MA Experiment 20001910 PARAMETER Experiment Name: At_Drought_Reproduction_P Parameter: Treatment Value: Drought vs. No Drought

SEQ ID NO: 33180 - protein, 287 aa, Arabidopsis thaliana; identical to SEQ ID NO: 29590
  peptide (1)..(287): Ceres Seq. ID no. 12421963
  misc_feature (29)..(179): Homolog of NCBI NO: 30685749 NR Description: expressed protein [Arabidopsis thaliana]
  misc_feature (29)..(179): Homolog of NCBI NO: 25408286 NR Description: hypothetical protein At2g33550 [imported] -
  misc_feature (45)..(182): Homolog of NCBI NO: 34907058 NR Description: hypothetical protein [Oryza sativa (japonica
  misc_feature (36)..(263): Homolog of NCBI NO: 38347161 NR Description: OSJNBa0039C07.7 [Oryza sativa (japonica
  misc_feature (31)..(219): Homolog of NCBI NO: 40538915 NR Description: hypothetical protein [Oryza sativa (japonica
  misc_feature (154)..(285): Homolog of NCBI NO: 15227458 NR Description: unknown protein; protein id: At2g35640.1
  misc_feature (32)..(263): Homolog of NCBI NO: 15227458 NR Description: unknown protein; protein id: At2g35640.1
  misc_feature (31)..(284): Homolog of NCBI NO: 15221676 NR Description: hypothetical protein; protein id: At1g31310.1
  misc_feature (31)..(285): Homolog of NCBI NO: 6692131 NR Description: T19E23.10 [Arabidopsis thaliana]

SEQ ID NO: 33181 - protein, 257 aa, Arabidopsis thaliana; identical to SEQ ID NO: 29591
  peptide (1)..(257): Ceres Seq. ID no. 12421964
  misc_feature (1)..(149): Homolog of NCBI NO: 30685749 NR Description: expressed protein [Arabidopsis thaliana]
  misc_feature (1)..(149): Homolog of NCBI NO: 25408286 NR Description: hypothetical protein At2g33550 [imported] -
  misc_feature (15)..(152): Homolog of NCBI NO: 34907058 NR Description: hypothetical protein [Oryza sativa (japonica
  misc_feature (6)..(233): Homolog of NCBI NO: 38347161 NR Description: OSJNBa0039C07.7 [Oryza sativa (japonica
  misc_feature (1)..(189): Homolog of NCBI NO: 40538915 NR Description: hypothetical protein [Oryza sativa (japonica
  misc_feature (124)..(255): Homolog of NCBI NO: 15227458 NR Description: unknown protein; protein id: At2g35640.1
  misc_feature (2)..(233): Homolog of NCBI NO: 15227458 NR Description: unknown protein; protein id: At2g35640.1
  misc_feature (1)..(254): Homolog of NCBI NO: 15221676 NR Description: hypothetical protein; protein id: At1g31310.1
  misc_feature (1)..(255): Homolog of NCBI NO: 6692131 NR Description: T19E23.10 [Arabidopsis thaliana]

SEQ ID NO: 33182 - protein, 248 aa, Arabidopsis thaliana; identical to SEQ ID NO: 29592
  peptide (1)..(248): Ceres Seq. ID no. 12421965
  misc_feature (1)..(140): Homolog of NCBI NO: 30685749 NR Description: expressed protein [Arabidopsis thaliana]
  misc_feature (1)..(140): Homolog of NCBI NO: 25408286 NR Description: hypothetical protein At2g33550 [imported] -
  misc_feature (6)..(143): Homolog of NCBI NO: 34907058 NR Description: hypothetical protein [Oryza sativa (japonica
  misc_feature (1)..(224): Homolog of NCBI NO: 38347161 NR Description: OSJNBa0039C07.7 [Oryza sativa (japonica
  misc_feature (1)..(180): Homolog of NCBI NO: 40538915 NR Description: hypothetical protein [Oryza sativa (japonica
  misc_feature (115)..(246): Homolog of NCBI NO: 15227458 NR Description: unknown protein; protein id: At2g35640.1
  misc_feature (1)..(224): Homolog of NCBI NO: 15227458 NR Description: unknown protein; protein id: At2g35640.1
  misc_feature (1)..(245): Homolog of NCBI NO: 15221676 NR Description: hypothetical protein; protein id: At1g31310.1
  misc_feature (1)..(246): Homolog of NCBI NO: 6692131 NR Description: T19E23.10 [Arabidopsis thaliana]

SEQ ID NO: 33183 - DNA, 1150 bp, Arabidopsis thaliana; identical to SEQ ID NO: 29593
  misc_feature (1)..(1150): Ceres Seq. ID no. 12439663
  misc_feature: MA Experiment ID: 108434 Result: Down-regulated in Transcription
  misc_feature: MA Experiment 108434 PARAMETER Experiment Name: At_Root_Tips_cDNA_P Parameter: Tissue Value: Root Tips
  misc_feature: MA Experiment ID: 108435 Result: Down-regulated in Transcription
  misc_feature: MA Experiment 108435 PARAMETER Experiment Name: At_stm_Mutants_cDNA_P Parameter: Plant Line Value: wt Landsburg vs stm
  misc_feature: MA Experiment 108435 PARAMETER Experiment Name: At_stm_Mutants_cDNA_P Parameter: Tissue Value: Shoot Apical Meristem Region
  misc_feature: MA Experiment ID: 108462 Result: Up-regulated in Transcription
  misc_feature: MA Experiment 108462 PARAMETER Experiment Name: At_Germinating_Seeds_cDNA_P Parameter: Age (day) Value: 2 vs. 0
  misc_feature: MA Experiment 108462 PARAMETER Experiment Name: At_Germinating_Seeds_cDNA_P Parameter: Tissue Value: Germinating Seeds
  misc_feature: MA Experiment ID: 108463 Result: Up-regulated in Transcription
  misc_feature: MA Experiment 108463 PARAMETER Experiment Name: At_Germinating_Seeds_cDNA_P Parameter: Age (day) Value: 3 vs. 0
  misc_feature: MA Experiment 108463 PARAMETER Experiment Name: At_Germinating_Seeds_cDNA_P Parameter: Tissue Value: Germinating Seeds
  misc_feature: MA Experiment ID: 108464 Result: Up-regulated in Transcription
  misc_feature: MA Experiment 108464 PARAMETER Experiment Name: At_Germinating_Seeds_cDNA_P Parameter: Age (day) Value: 4 vs. 0
  misc_feature: MA Experiment 108464 PARAMETER Experiment Name: At_Germinating_Seeds_cDNA_P Parameter: Tissue Value: Germinating Seeds
  misc_feature: MA Experiment ID: 108488 Result: Down-regulated in Transcription
  misc_feature: MA Experiment ID: 108561 Result: Up-regulated in Transcription
  misc_feature: MA Experiment 108561 PARAMETER Experiment Name: At_100uM_ABA_cDNA_P Parameter: Timepoint (hr) Value: 6
  misc_feature: MA Experiment 108561 PARAMETER Experiment Name: At_100uM_ABA_cDNA_P Parameter: Tissue Value: Aerial
  misc_feature: MA Experiment 108561 PARAMETER Experiment Name: At_100uM_ABA_cDNA_P Parameter: Treatment Value: 100uM ABA vs. No Treatment
  misc_feature: MA Experiment ID: 108573 Result: Up-regulated in Transcription
  misc_feature: MA Experiment 108573 PARAMETER Experiment Name: At_Drought_cDNA_P Parameter: Timepoint (hr) Value: 6
  misc_feature: MA Experiment 108573 PARAMETER Experiment Name: At_Drought_cDNA_P Parameter: Tissue Value: Aerial
  misc_feature: MA Experiment 108573 PARAMETER Experiment Name: At_Drought_cDNA_P Parameter: Treatment Value: Drought vs. No Drought
  misc_feature: MA Experiment ID: 108585 Result: Up-regulated in Transcription
  misc_feature: MA Experiment 108585 PARAMETER Experiment Name: At_5mM_NaNP_cDNA_P Parameter: Timepoint (hr) Value: 6
  misc_feature: MA Experiment 108585 PARAMETER Experiment Name: At_5mM_NaNP_cDNA_P Parameter: Tissue Value: Aerial
  misc_feature: MA Experiment 108585 PARAMETER Experiment Name: At_5mM_NaNP_cDNA_P Parameter: Treatment Value: null
  misc_feature: MA Experiment ID: 108605 Result: Up-regulated in Transcription
  misc_feature: MA Experiment 108605 PARAMETER Experiment Name: At_100uM_ABA_cDNA_P Parameter: Timepoint (hr) Value: 6
  misc_feature: MA Experiment 108605 PARAMETER Experiment Name: At_100uM_ABA_cDNA_P Parameter: Tissue Value: Aerial
  misc_feature: MA Experiment 108605 PARAMETER Experiment Name: At_100uM_ABA_cDNA_P Parameter: Treatment Value: 100uM ABA vs. No Treatment
  misc_feature: MA Experiment ID: 108607 Result: Up-regulated in Transcription
  misc_feature: MA Experiment 108607 PARAMETER Experiment Name: At_100uM_ABA_cDNA_P Parameter: Timepoint (hr) Value: 4
  misc_feature: MA Experiment 108607 PARAMETER Experiment Name: At_100uM_ABA_cDNA_P Parameter: Tissue Value: Aerial
  misc_feature: MA Experiment 108607 PARAMETER Experiment Name: At_100uM_ABA_cDNA_P Parameter: Treatment Value: 100uM ABA vs. No Treatment
  misc_feature: MA Experiment ID: 108609 Result: Up-regulated in Transcription
  misc_feature: MA Experiment 108609 PARAMETER Experiment Name: At_100uM_ABA_cDNA_P Parameter: Timepoint (hr) Value: 24
  misc_feature: MA Experiment 108609 PARAMETER Experiment Name: At_100uM_ABA_cDNA_P Parameter: Tissue Value: Aerial
  misc_feature: MA Experiment 108609 PARAMETER Experiment Name: At_100uM_ABA_cDNA_P Parameter: Treatment Value: 100uM ABA vs. No Treatment
  misc_feature: MA Experiment ID: 20000069 Result: Up-regulated in Transcription
  misc_feature: MA Experiment 20000069 PARAMETER Experiment Name: At_100uM_ABA_Mutants_cDNA_P Parameter: Plant Line Value: CS23
  misc_feature: MA Experiment 20000069 PARAMETER Experiment Name: At_100uM_ABA_Mutants_cDNA_P Parameter: Timepoint (hr) Value: 6
  misc_feature: MA Experiment 20000069 PARAMETER Experiment Name: At_100uM_ABA_Mutants_cDNA_P Parameter: Tissue Value: Aerial
  misc_feature: MA Experiment 20000069 PARAMETER Experiment Name: At_100uM_ABA_Mutants_cDNA_P Parameter: Treatment Value: 100uM ABA vs. No Treatment
  misc_feature: MA Experiment ID: 20000070 Result: Up-regulated in Transcription
  misc_feature: MA Experiment 20000070 PARAMETER Experiment Name: At_100uM_ABA_Mutants_cDNA_P Parameter: Plant Line Value: CS24
  misc_feature: MA Experiment 20000070 PARAMETER Experiment Name: At_100uM_ABA_Mutants_cDNA_P Parameter: Timepoint (hr) Value: 6
  misc_feature: MA Experiment 20000070 PARAMETER Experiment Name: At_100uM_ABA_Mutants_cDNA_P Parameter: Tissue Value: Aerial
  misc_feature: MA Experiment 20000070 PARAMETER Experiment Name: At_100uM_ABA_Mutants_cDNA_P Parameter: Treatment Value: 100uM ABA vs. No Treatment
  misc_feature: MA Experiment ID: 20000071 Result: Up-regulated in Transcription
  misc_feature: MA Experiment 20000071 PARAMETER Experiment Name: At_100uM_ABA_Mutants_cDNA_P Parameter: Plant Line Value: CS8104
  misc_feature: MA Experiment 20000071 PARAMETER Experiment Name: At_100uM_ABA_Mutants_cDNA_P Parameter: Timepoint (hr) Value: 6
  misc_feature: MA Experiment 20000071 PARAMETER Experiment Name: At_100uM_ABA_Mutants_cDNA_P Parameter: Tissue Value: Aerial
  misc_feature: MA Experiment 20000071 PARAMETER Experiment Name: At_100uM_ABA_Mutants_cDNA_P Parameter: Treatment Value: 100uM ABA vs. No Treatment
  misc_feature: MA Experiment ID: 20000088 Result: Up-regulated in Transcription
  misc_feature: MA Experiment 20000088 PARAMETER Experiment Name: At_100uM_ABA_Mutants_cDNA_P Parameter: Plant Line Value: Landsberg
  misc_feature: MA Experiment 20000088 PARAMETER Experiment Name: At_100uM_ABA_Mutants_cDNA_P Parameter: Timepoint (hr) Value: 6
  misc_feature: MA Experiment 20000088 PARAMETER Experiment Name: At_100uM_ABA_Mutants_cDNA_P Parameter: Tissue Value: Aerial
  misc_feature: MA Experiment 20000088 PARAMETER Experiment Name: At_100uM_ABA_Mutants_cDNA_P Parameter: Treatment Value: 100uM ABA vs. No Treatment
  misc_feature: MA Experiment ID: 20000111 Result: Down-regulated in Transcription
  misc_feature: MA Experiment 20000111 PARAMETER Experiment Name: At_42deg_Heat_cDNA_P Parameter: Temperature (deg C) Value: 42 vs. 22
  misc_feature: MA Experiment 20000111 PARAMETER Experiment Name: At_42deg_Heat_cDNA_P Parameter: Timepoint (hr) Value: 6
  misc_feature: MA Experiment 20000111 PARAMETER Experiment Name: At_42deg_Heat_cDNA_P Parameter: Tissue Value: Aerial
  misc_feature: MA Experiment ID: 20000166 Result: Up-regulated in Transcription
  misc_feature: MA Experiment 20000166 PARAMETER Experiment Name: At_100uM_ABA_P Parameter: Age (day) Value: 14
  misc_feature: MA Experiment 20000166 PARAMETER Experiment Name: At_100uM_ABA_P Parameter: Organism Value: A. thaliana
  misc_feature: MA Experiment 20000166 PARAMETER Experiment Name: At_100uM_ABA_P Parameter: Plant Line Value: WS
  misc_feature: MA Experiment 20000166 PARAMETER Experiment Name: At_100uM_ABA_P Parameter: Timepoint (hr) Value: 1
  misc_feature: MA Experiment 20000166 PARAMETER Experiment Name: At_100uM_ABA_P Parameter: Tissue Value: Aerial
  misc_feature: MA Experiment 20000166 PARAMETER Experiment Name: At_100uM_ABA_P Parameter: Treatment Value: 100uM ABA vs. No Treatment
  misc_feature: MA Experiment ID: 20000169 Result: Up-regulated in Transcription
  misc_feature: MA Experiment 20000169 PARAMETER Experiment Name: At_100uM_ABA_P Parameter: Age (day) Value: 14
  misc_feature: MA Experiment 20000169 PARAMETER Experiment Name: At_100uM_ABA_P Parameter: Organism Value: A. thaliana
  misc_feature: MA Experiment 20000169 PARAMETER Experiment Name: At_100uM_ABA_P Parameter: Plant Line Value: WS
  misc_feature: MA Experiment 20000169 PARAMETER Experiment Name: At_100uM_ABA_P Parameter: Timepoint (hr) Value: 6
  misc_feature: MA Experiment 20000169 PARAMETER Experiment Name: At_100uM_ABA_P Parameter: Tissue Value: Aerial
  misc_feature: MA Experiment 20000169 PARAMETER Experiment Name: At_100uM_ABA_P Parameter: Treatment Value: 100uM ABA vs. No Treatment
  misc_feature: MA Experiment ID: 20000173 Result: Down-regulated in Transcription
  misc_feature: MA Experiment 20000173 PARAMETER Experiment Name: At_42deg_Heat_P Parameter: Age (day) Value: 14
  misc_feature: MA Experiment 20000173 PARAMETER Experiment Name: At_42deg_Heat_P Parameter: Organism Value: A. thaliana
  misc_feature: MA Experiment 20000173 PARAMETER Experiment Name: At_42deg_Heat_P Parameter: Plant Line Value: WS
  misc_feature: MA Experiment 20000173 PARAMETER Experiment Name: At_42deg_Heat_P Parameter: Temperature (deg C) Value: 42 vs. 22
  misc_feature: MA Experiment 20000173 PARAMETER Experiment Name: At_42deg_Heat_P Parameter: Timepoint (hr) Value: 6
  misc_feature: MA Experiment 20000173 PARAMETER Experiment Name: At_42deg_Heat_P Parameter: Tissue Value: Aerial
  misc_feature: MA Experiment ID: 20000182 Result: Up-regulated in Transcription
  misc_feature: MA Experiment 20000182 PARAMETER Experiment Name: At_2mM_SA_P Parameter: Age (day) Value: 14
  misc_feature: MA Experiment 20000182 PARAMETER Experiment Name: At_2mM_SA_P Parameter: Organism Value: A. thaliana
  misc_feature: MA Experiment 20000182 PARAMETER Experiment Name: At_2mM_SA_P Parameter: Plant Line Value: WS
  misc_feature: MA Experiment 20000182 PARAMETER Experiment Name: At_2mM_SA_P Parameter: Timepoint (hr) Value: 6
  misc_feature: MA Experiment 20000182 PARAMETER Experiment Name: At_2mM_SA_P Parameter: Tissue Value: Aerial
  misc_feature: MA Experiment 20000182 PARAMETER Experiment Name: At_2mM_SA_P Parameter: Treatment Value: 2mM SA vs. No Treatment
  misc_feature: MA Experiment ID: 20000184 Result: Down-regulated in Transcription
  misc_feature: MA Experiment 20000184 PARAMETER Experiment Name: At_Shoots__P Parameter: Age (day) Value: 7
  misc_feature: MA Experiment 20000184 PARAMETER Experiment Name: At_Shoots__P Parameter: Tissue Value: Shoots vs. Whole Plant
  misc_feature: MA Experiment ID: 20000224 Result: Up-regulated in Transcription
  misc_feature: MA Experiment ID: 20000234 Result: Down-regulated in Transcription
  misc_feature: MA Experiment 20000234 PARAMETER Experiment Name: At_Siliques_P Parameter: Age (day) Value: 21
  misc_feature: MA Experiment 20000234 PARAMETER Experiment Name: At_Siliques_P Parameter: Organism Value: A. thaliana
  misc_feature: MA Experiment 20000234 PARAMETER Experiment Name: At_Siliques_P Parameter: Plant Line Value: WS
  misc_feature: MA Experiment 20000234 PARAMETER Experiment Name: At_Siliques_P Parameter: Tissue Value: Less Than 5mm Siliques vs. Whole Plant
  misc_feature: MA Experiment ID: 20000235 Result: Down-regulated in Transcription
  misc_feature: MA Experiment 20000235 PARAMETER Experiment Name: At_Siliques_P Parameter: Age (day) Value: 21
  misc_feature: MA Experiment 20000235 PARAMETER Experiment Name: At_Siliques_P Parameter: Organism Value: A. thaliana
  misc_feature: MA Experiment 20000235 PARAMETER Experiment Name: At_Siliques_P Parameter: Plant Line Value: WS
  misc_feature: MA Experiment 20000235 PARAMETER Experiment Name: At_Siliques_P Parameter: Tissue Value: 5-10mm Siliques vs. Whole Plant
  misc_feature: MA Experiment ID: 20000265 Result: Down-regulated in Transcription
  misc_feature: MA Experiment 20000265 PARAMETER Experiment Name: At_Open_Flower_P Parameter: Age (day) Value: 21
  misc_feature: MA Experiment 20000265 PARAMETER Experiment Name: At_Open_Flower_P Parameter: Plant Line Value: WS
  misc_feature: MA Experiment 20000265 PARAMETER Experiment Name: At_Open_Flower_P Parameter: Tissue Value: Closed Flower vs. Whole Plant
  misc_feature: MA Experiment ID: 20000267 Result: Up-regulated in Transcription
  misc_feature: MA Experiment 20000267 PARAMETER Experiment Name: At_Drought_P Parameter: Age (day) Value: 7
  misc_feature: MA Experiment 20000267 PARAMETER Experiment Name: At_Drought_P Parameter: Organism Value: A. thaliana
  misc_feature: MA Experiment 20000267 PARAMETER Experiment Name: At_Drought_P Parameter: Plant Line Value: WS
  misc_feature: MA Experiment 20000267 PARAMETER Experiment Name: At_Drought_P Parameter: Timepoint (hr) Value: 6
  misc_feature: MA Experiment 20000267 PARAMETER Experiment Name: At_Drought_P Parameter: Tissue Value: Whole Plant
  misc_feature: MA Experiment 20000267 PARAMETER Experiment Name: At_Drought_P Parameter: Treatment Value: Drought vs. No Drought
  misc_feature: MA Experiment ID: 20000286 Result: Down-regulated in Transcription
  misc_feature: MA Experiment 20000286 PARAMETER Experiment Name: At_Open_Flower_P Parameter: Age (day) Value: 21
  misc_feature: MA Experiment 20000286 PARAMETER Experiment Name: At_Open_Flower_P Parameter: Plant Line Value: WS
  misc_feature: MA Experiment 20000286 PARAMETER Experiment Name: At_Open_Flower_P Parameter: Tissue Value: Half Open vs. Whole Plant
  misc_feature: MA Experiment ID: 20000288 Result: Down-regulated in Transcription
  misc_feature: MA Experiment 20000288 PARAMETER Experiment Name: At_Drought_P Parameter: Age (day) Value: 7
  misc_feature: MA Experiment 20000288 PARAMETER Experiment Name: At_Drought_P Parameter: Organism Value: A. thaliana
  misc_feature: MA Experiment 20000288 PARAMETER Experiment Name: At_Drought_P Parameter: Plant Line Value: WS
  misc_feature: MA Experiment 20000288 PARAMETER Experiment Name: At_Drought_P Parameter: Timepoint (hr) Value: 1
  misc_feature: MA Experiment 20000288 PARAMETER Experiment Name: At_Drought_P Parameter: Tissue Value: Whole Plant
  misc_feature: MA Experiment 20000288 PARAMETER Experiment Name: At_Drought_P Parameter: Treatment Value: Drought vs. No Drought
  misc_feature: MA Experiment ID: 20000308 Result: Up-regulated in Transcription
  misc_feature: MA Experiment 20000308 PARAMETER Experiment Name: At_100mM_NaCl__P Parameter: Age (day) Value: 17
  misc_feature: MA Experiment 20000308 PARAMETER Experiment Name: At_100mM_NaCl__P Parameter: Organism Value: A. thaliana
  misc_feature: MA Experiment 20000308 PARAMETER Experiment Name: At_100mM_NaCl__P Parameter: Plant Line Value: WS
  misc_feature: MA Experiment 20000308 PARAMETER Experiment Name: At_100mM_NaCl__P Parameter: Timepoint (hr) Value: 72
  misc_feature: MA Experiment 20000308 PARAMETER Experiment Name: At_100mM_NaCl__P Parameter: Tissue Value: Whole Plant
  misc_feature: MA Experiment 20000308 PARAMETER Experiment Name: At_100mM_NaCl__P Parameter: Treatment Value: 100mM NaCl vs. No Treatment
  misc_feature: MA Experiment ID: 20000436 Result: Up-regulated in Transcription
  misc_feature: MA Experiment 20000436 PARAMETER Experiment Name: At_Drought_P Parameter: Age (day) Value: 7
  misc_feature: MA Experiment 20000436 PARAMETER Experiment Name: At_Drought_P Parameter: Organism Value: A. thaliana
  misc_feature: MA Experiment 20000436 PARAMETER Experiment Name: At_Drought_P Parameter: Plant Line Value: WS
  misc_feature: MA Experiment 20000436 PARAMETER Experiment Name: At_Drought_P Parameter: Timepoint (hr) Value: 12
  misc_feature: MA Experiment 20000436 PARAMETER Experiment Name: At_Drought_P Parameter: Tissue Value: Whole Plant
  misc_feature: MA Experiment 20000436 PARAMETER Experiment Name: At_Drought_P Parameter: Treatment Value: Drought vs. No Drought
  misc_feature: MA Experiment ID: 20000437 Result: Up-regulated in Transcription
  misc_feature: MA Experiment 20000437 PARAMETER Experiment Name: At_Drought_P Parameter: Age (day) Value: 8
  misc_feature: MA Experiment 20000437 PARAMETER Experiment Name: At_Drought_P Parameter: Organism Value: A. thaliana
  misc_feature: MA Experiment 20000437 PARAMETER Experiment Name: At_Drought_P Parameter: Plant Line Value: WS
  misc_feature: MA Experiment 20000437 PARAMETER Experiment Name: At_Drought_P Parameter: Timepoint (hr) Value: 24
  misc_feature: MA Experiment 20000437 PARAMETER Experiment Name: At_Drought_P Parameter: Tissue Value: Whole Plant
  misc_feature: MA Experiment 20000437 PARAMETER Experiment Name: At_Drought_P Parameter: Treatment Value: Drought vs. No Drought
  misc_feature: MA Experiment ID: 20000438 Result: Down-regulated in Transcription
  misc_feature: MA Experiment 20000438 PARAMETER Experiment Name: At_Shoots__P Parameter: Age (day) Value: 14
  misc_feature: MA Experiment 20000438 PARAMETER Experiment Name: At_Shoots__P Parameter: Tissue Value: Shoots vs. Whole Plant
  misc_feature: MA Experiment ID: 20000453 Result: Up-regulated in Transcription
  misc_feature: MA Experiment 20000453 PARAMETER Experiment Name: At_100uM_ABA_P Parameter: Age (day) Value: 15
  misc_feature: MA Experiment 20000453 PARAMETER Experiment Name: At_100uM_ABA_P Parameter: Organism Value: A. thaliana
  misc_feature: MA Experiment 20000453 PARAMETER Experiment Name: At_100uM_ABA_P Parameter: Plant Line Value: WS
  misc_feature: MA Experiment 20000453 PARAMETER Experiment Name: At_100uM_ABA_P Parameter: Timepoint (hr) Value: 24
  misc_feature: MA Experiment 20000453 PARAMETER Experiment Name: At_100uM_ABA_P Parameter: Tissue Value: Aerial
  misc_feature: MA Experiment 20000453 PARAMETER Experiment Name: At_100uM_ABA_P Parameter: Treatment Value: 100uM ABA vs. No Treatment
  misc_feature: MA Experiment ID: 20000455 Result: Up-regulated in Transcription
  misc_feature: MA Experiment 20000455 PARAMETER Experiment Name: At_100uM_ABA_P Parameter: Age (day) Value: 16
  misc_feature: MA Experiment 20000455 PARAMETER Experiment Name: At_100uM_ABA_P Parameter: Organism Value: A. thaliana
  misc_feature: MA Experiment 20000455 PARAMETER Experiment Name: At_100uM_ABA_P Parameter: Plant Line Value: WS
  misc_feature: MA Experiment 20000455 PARAMETER Experiment Name: At_100uM_ABA_P Parameter: Timepoint (hr) Value: 48
  misc_feature: MA Experiment 20000455 PARAMETER Experiment Name: At_100uM_ABA_P Parameter: Tissue Value: Aerial
  misc_feature: MA Experiment 20000455 PARAMETER Experiment Name: At_100uM_ABA_P Parameter: Treatment Value: 100uM ABA vs. No Treatment
  misc_feature: MA Experiment ID: 20000527 Result: Down-regulated in Transcription
  misc_feature: MA Experiment 20000527 PARAMETER Experiment Name: At_10percent_PEG_P Parameter: Age (day) Value: 20
  misc_feature: MA Experiment 20000527 PARAMETER Experiment Name: At_10percent_PEG_P Parameter: Organism Value: A. thaliana
  misc_feature: MA Experiment 20000527 PARAMETER Experiment Name: At_10percent_PEG_P Parameter: Plant Line Value: WS
  misc_feature: MA Experiment 20000527 PARAMETER Experiment Name: At_10percent_PEG_P Parameter: Timepoint (day) Value: 20
  misc_feature: MA Experiment 20000527 PARAMETER Experiment Name: At_10percent_PEG_P Parameter: Tissue Value: Whole Plant
  misc_feature: MA Experiment 20000527 PARAMETER Experiment Name: At_10percent_PEG_P Parameter: Treatment Value: 10percent PEG vs. No Treatment
  misc_feature: MA Experiment ID: 20000573 Result: Up-regulated in Transcription
  misc_feature: MA Experiment 20000573 PARAMETER Experiment Name: At_100uM_ABA_Mutants__P Parameter: Organism Value: A. thaliana
  misc_feature: MA Experiment 20000573 PARAMETER Experiment Name: At_100uM_ABA_Mutants__P Parameter: Plant Line Value: CS22 vs. Ler wt
  misc_feature: MA Experiment 20000573 PARAMETER Experiment Name: At_100uM_ABA_Mutants__P Parameter: Timepoint (hr) Value: N/A
  misc_feature: MA Experiment 20000573 PARAMETER Experiment Name: At_100uM_ABA_Mutants__P Parameter: Tissue Value: Whole Plant
  misc_feature: MA Experiment 20000573 PARAMETER Experiment Name: At_100uM_ABA_Mutants__P Parameter: Treatment Value: None
  misc_feature: MA Experiment ID: 20000574 Result: Up-regulated in Transcription
  misc_feature: MA Experiment 20000574 PARAMETER Experiment Name: At_100uM_ABA_Mutants__P Parameter: Organism Value: A. thaliana
  misc_feature: MA Experiment 20000574 PARAMETER Experiment Name: At_100uM_ABA_Mutants__P Parameter: Plant Line Value: CS23 vs. Ler wt
  misc_feature: MA Experiment 20000574 PARAMETER Experiment Name: At_100uM_ABA_Mutants__P Parameter: Timepoint (hr) Value: N/A
  misc_feature: MA Experiment 20000574 PARAMETER Experiment Name: At_100uM_ABA_Mutants__P Parameter: Tissue Value: Whole Plant
  misc_feature: MA Experiment 20000574 PARAMETER Experiment Name: At_100uM_ABA_Mutants__P Parameter: Treatment Value: None
  misc_feature: MA Experiment ID: 20000576 Result: Down-regulated in Transcription
  misc_feature: MA Experiment 20000576 PARAMETER Experiment Name: At_100uM_ABA_Mutants__P Parameter: Organism Value: A. thaliana
  misc_feature: MA Experiment 20000576 PARAMETER Experiment Name: At_100uM_ABA_Mutants__P Parameter: Plant Line Value: CS23
  misc_feature: MA Experiment 20000576 PARAMETER Experiment Name: At_100uM_ABA_Mutants__P Parameter: Timepoint (hr) Value: 6
  misc_feature: MA Experiment 20000576 PARAMETER Experiment Name: At_100uM_ABA_Mutants__P Parameter: Tissue Value: Whole Plant
  misc_feature: MA Experiment 20000576 PARAMETER Experiment Name: At_100uM_ABA_Mutants__P Parameter: Treatment Value: 1uM ABA vs. No Treatment
  misc_feature: MA Experiment ID: 20000709 Result: Up-regulated in Transcription
  misc_feature: MA Experiment 20000709 PARAMETER Experiment Name: At_15mM_NH4NO3_L-to-H_P Parameter: Age (hr) Value: 14
  misc_feature: MA Experiment 20000709 PARAMETER Experiment Name: At_15mM_NH4NO3_L-to-H_P Parameter: Organism Value: A. thaliana
  misc_feature: MA Experiment 20000709 PARAMETER Experiment Name: At_15mM_NH4NO3_L-to-H_P Parameter: Plant Line Value: WS
  misc_feature: MA Experiment 20000709 PARAMETER Experiment Name: At_15mM_NH4NO3_L-to-H_P Parameter: Timepoint (hr) Value: 4
  misc_feature: MA Experiment 20000709 PARAMETER Experiment Name: At_15mM_NH4NO3_L-to-H_P Parameter: Tissue Value: Aerial
  misc_feature: MA Experiment 20000709 PARAMETER Experiment Name: At_15mM_NH4NO3_L-to-H_P Parameter: Treatment Value: 15mM NH4NO3 vs. 30mM Mannitol
  misc_feature: MA Experiment ID: 20000794 Result: Up-regulated in Transcription
  misc_feature: MA Experiment 20000794 PARAMETER Experiment Name: At_Petals_P Parameter: Age (day) Value: 23-25 days
  misc_feature: MA Experiment 20000794 PARAMETER Experiment Name: At_Petals_P Parameter: Plant Line Value: WS
  misc_feature: MA Experiment 20000794 PARAMETER Experiment Name: At_Petals_P Parameter: Tissue Value: Petals vs. Whole plant
  misc_feature: MA Experiment ID: 20001768 Result: Up-regulated in Transcription
  misc_feature: MA Experiment 20001768 PARAMETER Experiment Name: At_Far-red-enriched-adult_P Parameter: Age (day) Value: 28
  misc_feature: MA Experiment 20001768 PARAMETER Experiment Name: At_Far-red-enriched-adult_P Parameter: Light Value: Far-red enriched vs. White
  misc_feature: MA Experiment 20001768 PARAMETER Experiment Name: At_Far-red-enriched-adult_P Parameter: Organism Value: A. thaliana
  misc_feature: MA Experiment 20001768 PARAMETER Experiment Name: At_Far-red-enriched-adult_P Parameter: Plant Line Value: Columbia
  misc_feature: MA Experiment 20001768 PARAMETER Experiment Name: At_Far-red-enriched-adult_P Parameter: Timepoint (hr) Value: 1
  misc_feature: MA Experiment 20001768 PARAMETER Experiment Name: At_Far-red-enriched-adult_P Parameter: Tissue Value: Aerial
  misc_feature: MA Experiment ID: 20001773 Result: Down-regulated in Transcription
  misc_feature: MA Experiment 20001773 PARAMETER Experiment Name: At_Far-red-enriched-adult_P Parameter: Age (day) Value: 30
  misc_feature: MA Experiment 20001773 PARAMETER Experiment Name: At_Far-red-enriched-adult_P Parameter: Light Value: Far-red enriched vs. White
  misc_feature: MA Experiment 20001773 PARAMETER Experiment Name: At_Far-red-enriched-adult_P Parameter: Organism Value: A. thaliana
  misc_feature: MA Experiment 20001773 PARAMETER Experiment Name: At_Far-red-enriched-adult_P Parameter: Plant Line Value: Columbia
  misc_feature: MA Experiment 20001773 PARAMETER Experiment Name: At_Far-red-enriched-adult_P Parameter: Timepoint (hr) Value: 48
  misc_feature: MA Experiment 20001773 PARAMETER Experiment Name: At_Far-red-enriched-adult_P Parameter: Tissue Value: Aerial
  misc_feature: MA Experiment ID: 20001774 Result: Up-regulated in Transcription
  misc_feature: MA Experiment 20001774 PARAMETER Experiment Name: At_Far-red-enriched-adult_P Parameter: Age (day) Value: 31
  misc_feature: MA Experiment 20001774 PARAMETER Experiment Name: At_Far-red-enriched-adult_P Parameter: Light Value: Far-red enriched vs. White
  misc_feature: MA Experiment 20001774 PARAMETER Experiment Name: At_Far-red-enriched-adult_P Parameter: Organism Value: A. thaliana
  misc_feature: MA Experiment 20001774 PARAMETER Experiment Name: At_Far-red-enriched-adult_P Parameter: Plant Line Value: Columbia
  misc_feature: MA Experiment 20001774 PARAMETER Experiment Name: At_Far-red-enriched-adult_P Parameter: Timepoint (hr) Value: 72
  misc_feature: MA Experiment 20001774 PARAMETER Experiment Name: At_Far-red-enriched-adult_P Parameter: Tissue Value: Aerial
  misc_feature: MA Experiment ID: 20001904 Result: Up-regulated in Transcription
  misc_feature: MA Experiment 20001904 PARAMETER Experiment Name: At_Drought_Reproduction_P Parameter: Age (day) Value: 37
  misc_feature: MA Experiment 20001904 PARAMETER Experiment Name: At_Drought_Reproduction_P Parameter: Organism Value: A. thaliana
  misc_feature: MA Experiment 20001904 PARAMETER Experiment Name: At_Drought_Reproduction_P Parameter: Plant Line Value: WS
  misc_feature: MA Experiment 20001904 PARAMETER Experiment Name: At_Drought_Reproduction_P Parameter: Timepoint (day) Value: 7
  misc_feature: MA Experiment 20001904 PARAMETER Experiment Name: At_Drought_Reproduction_P Parameter: Tissue Value: Rosettes
  misc_feature: MA Experiment 20001904 PARAMETER Experiment Name: At_Drought_Reproduction_P Parameter: Treatment Value: Drought vs. No Drought
  misc_feature: MA Experiment ID: 20001905 Result: Up-regulated in Transcription
  misc_feature: MA Experiment 20001905 PARAMETER Experiment Name: At_Drought_Reproduction_P Parameter: Age (day) Value: 40
  misc_feature: MA Experiment 20001905 PARAMETER Experiment Name: At_Drought_Reproduction_P Parameter: Organism Value: A. thaliana
  misc_feature: MA Experiment 20001905 PARAMETER Experiment Name: At_Drought_Reproduction_P Parameter: Plant Line Value: WS
  misc_feature: MA Experiment 20001905 PARAMETER Experiment Name: At_Drought_Reproduction_P Parameter: Timepoint (day) Value: 10
  misc_feature: MA Experiment 20001905 PARAMETER Experiment Name: At_Drought_Reproduction_P Parameter: Tissue Value: Rosettes
  misc_feature: MA Experiment 20001905 PARAMETER Experiment Name: At_Drought_Reproduction_P Parameter: Treatment Value: Drought vs. No Drought
  misc_feature: MA Experiment ID: 20001906 Result: Up-regulated in Transcription
  misc_feature: MA Experiment 20001906 PARAMETER Experiment Name: At_Drought_Reproduction_P Parameter: Age (day) Value: 35
  misc_feature: MA Experiment 20001906 PARAMETER Experiment Name: At_Drought_Reproduction_P Parameter: Organism Value: A. thaliana
  misc_feature: MA Experiment 20001906 PARAMETER Experiment Name: At_Drought_Reproduction_P Parameter: Plant Line Value: WS
  misc_feature: MA Experiment 20001906 PARAMETER Experiment Name: At_Drought_Reproduction_P Parameter: Timepoint (day) Value: 5
  misc_feature: MA Experiment 20001906 PARAMETER Experiment Name: At_Drought_Reproduction_P Parameter: Tissue Value: Siliques
  misc_feature: MA Experiment 20001906 PARAMETER Experiment Name: At_Drought_Reproduction_P Parameter: Treatment Value: Drought vs. No Drought
  misc_feature: MA Experiment ID: 20001908 Result: Up-regulated in Transcription
  misc_feature: MA Experiment 20001908 PARAMETER Experiment Name: At_Drought_Reproduction_P Parameter: Age (day) Value: 40
  misc_feature: MA Experiment 20001908 PARAMETER Experiment Name: At_Drought_Reproduction_P Parameter: Organism Value: A. thaliana
  misc_feature: MA Experiment 20001908 PARAMETER Experiment Name: At_Drought_Reproduction_P Parameter: Plant Line Value: WS
  misc_feature: MA Experiment 20001908 PARAMETER Experiment Name: At_Drought_Reproduction_P Parameter: Timepoint (day) Value: 10
  misc_feature: MA Experiment 20001908 PARAMETER Experiment Name: At_Drought_Reproduction_P Parameter: Tissue Value: Siliques
  misc_feature: MA Experiment 20001908 PARAMETER Experiment Name: At_Drought_Reproduction_P Parameter: Treatment Value: Drought vs. No Drought
  misc_feature: Phenotype: ROSETTE LEAVES Disorganized Rosette-Disorganized Rosette
  misc_feature: Phenotype: ROSETTE LEAVES Shape-Lanceolate
  misc_feature: Phenotype: ROSETTE LEAVES Curled-Curled 3
  misc_feature: Phenotype: WHOLE PLANT Size-Small
  misc_feature: Phenotype: CAULINE LEAVES Curled-Curled 3
  misc_feature: Phenotype: FLOWERS Other
  misc_feature: Phenotype: INFLORESCENCE Branching-No Branching
  misc_feature: Phenotype: INFLORESCENCE Internode Length-Short Internode
  misc_feature: Phenotype: ROSETTE LEAVES Disorganized Rosette-Disorganized Rosette
  misc_feature: Phenotype: ROSETTE LEAVES Shape-Lanceolate

SEQ ID NO: 33184 - protein, 269 aa, Arabidopsis thaliana; identical to SEQ ID NO: 29594
  peptide (1)..(269): Ceres Seq. ID no. 12439664
  misc_feature (6)..(266): Homolog of NCBI NO: 15222399 NR Description: tropinone reductase-I, putative
  misc_feature (1)..(264): Homolog of NCBI NO: 25283134 NR Description: probable tropinone reductase [imported] -
  misc_feature (1)..(266): Homolog of NCBI NO: 15227040 NR Description: putative tropinone reductase; protein id:
  misc_feature (1)..(269): Homolog of NCBI NO: 21554716 NR Description: putative tropinone reductase [Arabidopsis
  misc_feature (1)..(269): Homolog of NCBI NO: 15227076 NR Description: putative tropinone reductase
  misc_feature (1)..(266): Homolog of NCBI NO: 15227043 NR Description: putative tropinone reductase; protein id:
  misc_feature (10)..(266): Homolog of NCBI NO: 15227069 NR Description: putative tropinone reductase; protein id:
  misc_feature (1)..(100): Homolog of NCBI NO: 6457349 NR Description: short chain alcohol dehydrogenase [Arabidopsis
  misc_feature (104)..(269): Homolog of NCBI NO: 6457349 NR Description: short chain alcohol dehydrogenase [Arabidopsis
  misc_feature (1)..(269): Homolog of NCBI NO: 15227075 NR Description: putative tropinone reductase

SEQ ID NO: 33185 - protein, 252 aa, Arabidopsis thaliana; identical to SEQ ID NO: 29595
  peptide (1)..(252): Ceres Seq. ID no. 12439665
  misc_feature (1)..(249): Homolog of NCBI NO: 15222399 NR Description: tropinone reductase-I, putative
  misc_feature (1)..(247): Homolog of NCBI NO: 25283134 NR Description: probable tropinone reductase [imported] -
  misc_feature (1)..(249): Homolog of NCBI NO: 15227040 NR Description: putative tropinone reductase; protein id:
  misc_feature (1)..(252): Homolog of NCBI NO: 21554716 NR Description: putative tropinone reductase [Arabidopsis
  misc_feature (1)..(252): Homolog of NCBI NO: 15227076 NR Description: putative tropinone reductase
  misc_feature (1)..(249): Homolog of NCBI NO: 15227043 NR Description: putative tropinone reductase; protein id:
  misc_feature (1)..(249): Homolog of NCBI NO: 15227069 NR Description: putative tropinone reductase; protein id:
  misc_feature (1)..(83): Homolog of NCBI NO: 6457349 NR Description: short chain alcohol dehydrogenase [Arabidopsis
  misc_feature (87)..(252): Homolog of NCBI NO: 6457349 NR Description: short chain alcohol dehydrogenase [Arabidopsis
  misc_feature (1)..(252): Homolog of NCBI NO: 15227075 NR Description: putative tropinone reductase

SEQ ID NO: 33186 - protein, 231 aa, Arabidopsis thaliana; identical to SEQ ID NO: 29596
  peptide (1)..(231): Ceres Seq. ID no. 12439666
  misc_feature (1)..(228): Homolog of NCBI NO: 15222399 NR Description: tropinone reductase-I, putative
  misc_feature (1)..(226): Homolog of NCBI NO: 25283134 NR Description: probable tropinone reductase [imported] -
  misc_feature (1)..(228): Homolog of NCBI NO: 15227040 NR Description: putative tropinone reductase; protein id:
  misc_feature (1)..(231): Homolog of NCBI NO: 21554716 NR Description: putative tropinone reductase [Arabidopsis
  misc_feature (1)..(231): Homolog of NCBI NO: 15227076 NR Description: putative tropinone reductase
  misc_feature (1)..(228): Homolog of NCBI NO: 15227043 NR Description: putative tropinone reductase; protein id:
  misc_feature (1)..(228): Homolog of NCBI NO: 15227069 NR Description: putative tropinone reductase; protein id:
  misc_feature (1)..(62): Homolog of NCBI NO: 6457349 NR Description: short chain alcohol dehydrogenase [Arabidopsis
  misc_feature (66)..(231): Homolog of NCBI NO: 6457349 NR Description: short chain alcohol dehydrogenase [Arabidopsis
  misc_feature (1)..(231): Homolog of NCBI NO: 15227075 NR Description: putative tropinone reductase

SEQ ID NO: 33187 - DNA, 1528 bp, Arabidopsis thaliana; identical to SEQ ID NO: 29597
  misc_feature (1)..(1528): Ceres Seq. ID no. 13490257
  misc_feature: MA Experiment ID: 108577 Result: Up-regulated in Transcription
  misc_feature: MA Experiment 108577 PARAMETER Experiment Name: At_42deg_Heat_cDNA_P Parameter: Temperature (deg C) Value: 42 vs. 22
  misc_feature: MA Experiment 108577 PARAMETER Experiment Name: At_42deg_Heat_cDNA_P Parameter: Timepoint (hr) Value: 6
  misc_feature: MA Experiment 108577 PARAMETER Experiment Name: At_42deg_Heat_cDNA_P Parameter: Tissue Value: Aerial
  misc_feature: MA Experiment ID: 108595 Result: Down-regulated in Transcription
  misc_feature: MA Experiment 108595 PARAMETER Experiment Name: At_Ler-pi_Ovule_cDNA_P Parameter: Plant Line Value: null
  misc_feature: MA Experiment ID: 20000087 Result: Down-regulated in Transcription
  misc_feature: MA Experiment 20000087 PARAMETER Experiment Name: At_100uM_ABA_Mutants_cDNA_P Parameter: Plant Line Value: WS
  misc_feature: MA Experiment 20000087 PARAMETER Experiment Name: At_100uM_ABA_Mutants_cDNA_P Parameter: Timepoint (hr) Value: 6
  misc_feature: MA Experiment 20000087 PARAMETER Experiment Name: At_100uM_ABA_Mutants_cDNA_P Parameter: Tissue Value: Aerial
  misc_feature: MA Experiment 20000087 PARAMETER Experiment Name: At_100uM_ABA_Mutants_cDNA_P Parameter: Treatment Value: 100uM ABA vs. No Treatment
  misc_feature: MA Experiment ID: 20000111 Result: Up-regulated in Transcription
  misc_feature: MA Experiment 20000111 PARAMETER Experiment Name: At_42deg_Heat_cDNA_P Parameter: Temperature (deg C) Value: 42 vs. 22
  misc_feature: MA Experiment 20000111 PARAMETER Experiment Name: At_42deg_Heat_cDNA_P Parameter: Timepoint (hr) Value: 6
  misc_feature: MA Experiment 20000111 PARAMETER Experiment Name: At_42deg_Heat_cDNA_P Parameter: Tissue Value: Aerial
  misc_feature: MA Experiment ID: 20000112 Result: Up-regulated in Transcription
  misc_feature: MA Experiment 20000112 PARAMETER Experiment Name: At_42deg_Heat_cDNA_P Parameter: Temperature (deg C) Value: 42 vs. 22
  misc_feature: MA Experiment 20000112 PARAMETER Experiment Name: At_42deg_Heat_cDNA_P Parameter: Timepoint (hr) Value: 2
  misc_feature: MA Experiment 20000112 PARAMETER Experiment Name: At_42deg_Heat_cDNA_P Parameter: Tissue Value: Aerial
  misc_feature: MA Experiment ID: 20000113 Result: Up-regulated in Transcription
  misc_feature: MA Experiment 20000113 PARAMETER Experiment Name: At_42deg_Heat_cDNA_P Parameter: Temperature (deg C) Value: 42 vs. 22
  misc_feature: MA Experiment 20000113 PARAMETER Experiment Name: At_42deg_Heat_cDNA_P Parameter: Timepoint (hr) Value: 8
  misc_feature: MA Experiment 20000113 PARAMETER Experiment Name: At_42deg_Heat_cDNA_P Parameter: Tissue Value: Aerial
  misc_feature: MA Experiment ID: 20000173 Result: Up-regulated in Transcription
  misc_feature: MA Experiment 20000173 PARAMETER Experiment Name: At_42deg_Heat_P Parameter: Age (day) Value: 14
  misc_feature: MA Experiment 20000173 PARAMETER Experiment Name: At_42deg_Heat_P Parameter: Organism Value: A. thaliana
  misc_feature: MA Experiment 20000173 PARAMETER Experiment Name: At_42deg_Heat_P Parameter: Plant Line Value: WS
  misc_feature: MA Experiment 20000173 PARAMETER Experiment Name: At_42deg_Heat_P Parameter: Temperature (deg C) Value: 42 vs. 22
  misc_feature: MA Experiment 20000173 PARAMETER Experiment Name: At_42deg_Heat_P Parameter: Timepoint (hr) Value: 6
  misc_feature: MA Experiment 20000173 PARAMETER Experiment Name: At_42deg_Heat_P Parameter: Tissue Value: Aerial
  misc_feature: MA Experiment ID: 20000179 Result: Down-regulated in Transcription
  misc_feature: MA Experiment 20000179 PARAMETER Experiment Name: At_Germinating_Seeds_P Parameter: Age (hr) Value: 6 vs. 0
  misc_feature: MA Experiment 20000179 PARAMETER Experiment Name: At_Germinating_Seeds_P Parameter: Tissue Value: Germinating Seeds
  misc_feature: MA Experiment ID: 20000185 Result: Down-regulated in Transcription
  misc_feature: MA Experiment 20000185 PARAMETER Experiment Name: At_Roots__P Parameter: Age (day) Value: 7 vs. 21
  misc_feature: MA Experiment 20000185 PARAMETER Experiment Name: At_Roots__P Parameter: Organism Value: A. thaliana
  misc_feature: MA Experiment 20000185 PARAMETER Experiment Name: At_Roots__P Parameter: Tissue Value: Roots vs. Whole Plant
  misc_feature: MA Experiment ID: 20000439 Result: Down-regulated in Transcription
  misc_feature: MA Experiment 20000439 PARAMETER Experiment Name: At_Roots__P Parameter: Age (day) Value: 14 vs. 21
  misc_feature: MA Experiment 20000439 PARAMETER Experiment Name: At_Roots__P Parameter: Organism Value: A. thaliana
  misc_feature: MA Experiment 20000439 PARAMETER Experiment Name: At_Roots__P Parameter: Tissue Value: Roots vs. Whole Plant

SEQ ID NO: 33188 - protein, 423 aa, Arabidopsis thaliana; identical to SEQ ID NO: 29598
  peptide (1)..(423): Ceres Seq. ID no. 13490258
  misc_feature (11)..(423): Pfam Name: Protein of unknown function (DUF760) Pfam Description: Protein of unknown function (DUF760)
  misc_feature (314)..(423): Homolog of NCBI NO: 18397912 NR Description: expressed protein [Arabidopsis thaliana]
  misc_feature (63)..(271): Homolog of NCBI NO: 18397912 NR Description: expressed protein [Arabidopsis thaliana]
  misc_feature (3)..(270): Homolog of NCBI NO: 32489097 NR Description: OSJNBa0093F12.3 [Oryza sativa (japonica
  misc_feature (116)..(421): Homolog of NCBI NO: 32489097 NR Description: OSJNBa0093F12.3 [Oryza sativa (japonica
  misc_feature (32)..(421): Homolog of NCBI NO: 18398302 NR Description: expressed protein [Arabidopsis thaliana]
  misc_feature (157)..(423): Homolog of NCBI NO: 13561930 NR Description: unknown [Brassica napus]
  misc_feature (3)..(423): Homolog of NCBI NO: 28301943 NR Description: unknown protein [Oryza sativa (japonica
  misc_feature (1)..(423): Homolog of NCBI NO: 17064820 NR Description: Unknown protein [Arabidopsis thaliana]
  misc_feature (1)..(423): Homolog of NCBI NO: 18401645 NR Description: expressed protein [Arabidopsis thaliana]
  misc_feature (1)..(423): Homolog of NCBI NO: 15221185 NR Description: expressed protein [Arabidopsis thaliana]

SEQ ID NO: 33189 - protein, 391 aa, Arabidopsis thaliana; identical to SEQ ID NO: 29599
  peptide (1)..(391): Ceres Seq. ID no. 13490259
  misc_feature (1)..(391): Pfam Name: Protein of unknown function (DUF760) Pfam Description: Protein of unknown function (DUF760)
  misc_feature (282)..(391): Homolog of NCBI NO: 18397912 NR Description: expressed protein [Arabidopsis thaliana]
  misc_feature (31)..(239): Homolog of NCBI NO: 18397912 NR Description: expressed protein [Arabidopsis thaliana]
  misc_feature (1)..(238): Homolog of NCBI NO: 32489097 NR Description: OSJNBa0093F12.3 [Oryza sativa (japonica
  misc_feature (84)..(389): Homolog of NCBI NO: 32489097 NR Description: OSJNBa0093F12.3 [Oryza sativa (japonica
  misc_feature (1)..(389): Homolog of NCBI NO: 18398302 NR Description: expressed protein [Arabidopsis thaliana]
  misc_feature (125)..(391): Homolog of NCBI NO: 13561930 NR Description: unknown [Brassica napus]
  misc_feature (1)..(391): Homolog of NCBI NO: 28301943 NR Description: unknown protein [Oryza sativa (japonica
  misc_feature (1)..(391): Homolog of NCBI NO: 17064820 NR Description: Unknown protein [Arabidopsis thaliana]
  misc_feature (1)..(391): Homolog of NCBI NO: 18401645 NR Description: expressed protein [Arabidopsis thaliana]
  misc_feature (1)..(391): Homolog of NCBI NO: 15221185 NR Description: expressed protein [Arabidopsis thaliana]

SEQ ID NO: 33190 - protein, 254 aa, Arabidopsis thaliana; identical to SEQ ID NO: 29600
  peptide (1)..(254): Ceres Seq. ID no. 13490260
  misc_feature (1)..(254): Pfam Name: Protein of unknown function (DUF760) Pfam Description: Protein of unknown function (DUF760)
  misc_feature (145)..(254): Homolog of NCBI NO: 18397912 NR Description: expressed protein [Arabidopsis thaliana]
  misc_feature (1)..(102): Homolog of NCBI NO: 18397912 NR Description: expressed protein [Arabidopsis thaliana]
  misc_feature (1)..(101): Homolog of NCBI NO: 32489097 NR Description: OSJNBa0093F12.3 [Oryza sativa (japonica
  misc_feature (1)..(252): Homolog of NCBI NO: 32489097 NR Description: OSJNBa0093F12.3 [Oryza sativa (japonica
  misc_feature (1)..(252): Homolog of NCBI NO: 18398302 NR Description: expressed protein [Arabidopsis thaliana]
  misc_feature (1)..(254): Homolog of NCBI NO: 13561930 NR Description: unknown [Brassica napus]
  misc_feature (1)..(254): Homolog of NCBI NO: 28301943 NR Description: unknown protein [Oryza sativa (japonica
  misc_feature (1)..(254): Homolog of NCBI NO: 17064820 NR Description: Unknown protein [Arabidopsis thaliana]
  misc_feature (1)..(254): Homolog of NCBI NO: 18401645 NR Description: expressed protein [Arabidopsis thaliana]
  misc_feature (1)..(254): Homolog of NCBI NO: 15221185 NR Description: expressed protein [Arabidopsis thaliana]

SEQ ID NO: 33191 - DNA, 1355 bp, Arabidopsis thaliana; identical to SEQ ID NO: 29601
  misc_feature (1)..(1355): Ceres Seq. ID no. 13489420
  misc_feature: MA Experiment ID: 108434 Result: Down-regulated in Transcription
  misc_feature: MA Experiment 108434 PARAMETER Experiment Name: At_Root_Tips_cDNA_P Parameter: Tissue Value: Root Tips
  misc_feature: MA Experiment ID: 108469 Result: Up-regulated in Transcription
  misc_feature: MA Experiment ID: 108585 Result: Up-regulated in Transcription
  misc_feature: MA Experiment 108585 PARAMETER Experiment Name: At_5mM_NaNP_cDNA_P Parameter: Timepoint (hr) Value: 6
  misc_feature: MA Experiment 108585 PARAMETER Experiment Name: At_5mM_NaNP_cDNA_P Parameter: Tissue Value: Aerial
  misc_feature: MA Experiment 108585 PARAMETER Experiment Name: At_5mM_NaNP_cDNA_P Parameter: Treatment Value: null
  misc_feature: MA Experiment ID: 108668 Result: Up-regulated in Transcription
  misc_feature: MA Experiment 108668 PARAMETER Experiment Name: At_2mM_SA_cDNA_P Parameter: Plant Line Value: WS
  misc_feature: MA Experiment 108668 PARAMETER Experiment Name: At_2mM_SA_cDNA_P Parameter: Timepoint (hr) Value: 6
  misc_feature: MA Experiment 108668 PARAMETER Experiment Name: At_2mM_SA_cDNA_P Parameter: Treatment Value: 2mM SA vs. No Treatment
  misc_feature: MA Experiment ID: 20000182 Result: Up-regulated in Transcription
  misc_feature: MA Experiment 20000182 PARAMETER Experiment Name: At_2mM_SA_P Parameter: Age (day) Value: 14
  misc_feature: MA Experiment 20000182 PARAMETER Experiment Name: At_2mM_SA_P Parameter: Organism Value: A. thaliana
  misc_feature: MA Experiment 20000182 PARAMETER Experiment Name: At_2mM_SA_P Parameter: Plant Line Value: WS
  misc_feature: MA Experiment 20000182 PARAMETER Experiment Name: At_2mM_SA_P Parameter: Timepoint (hr) Value: 6
  misc_feature: MA Experiment 20000182 PARAMETER Experiment Name: At_2mM_SA_P Parameter: Tissue Value: Aerial
  misc_feature: MA Experiment 20000182 PARAMETER Experiment Name: At_2mM_SA_P Parameter: Treatment Value: 2mM SA vs. No Treatment
  misc_feature: MA Experiment ID: 20000184 Result: Down-regulated in Transcription
  misc_feature: MA Experiment 20000184 PARAMETER Experiment Name: At_Shoots__P Parameter: Age (day) Value: 7
  misc_feature: MA Experiment 20000184 PARAMETER Experiment Name: At_Shoots__P Parameter: Tissue Value: Shoots vs. Whole Plant
  misc_feature: MA Experiment ID: 20000234 Result: Down-regulated in Transcription
  misc_feature: MA Experiment 20000234 PARAMETER Experiment Name: At_Siliques_P Parameter: Age (day) Value: 21
  misc_feature: MA Experiment 20000234 PARAMETER Experiment Name: At_Siliques_P Parameter: Organism Value: A. thaliana
  misc_feature: MA Experiment 20000234 PARAMETER Experiment Name: At_Siliques_P Parameter: Plant Line Value: WS
  misc_feature: MA Experiment 20000234 PARAMETER Experiment Name: At_Siliques_P Parameter: Tissue Value: Less Than 5mm Siliques vs. Whole Plant
  misc_feature: MA Experiment ID: 20000264 Result: Down-regulated in Transcription
  misc_feature: MA Experiment 20000264 PARAMETER Experiment Name: At_Open_Flower_P Parameter: Age (day) Value: 21
  misc_feature: MA Experiment 20000264 PARAMETER Experiment Name: At_Open_Flower_P Parameter: Plant Line Value: WS
  misc_feature: MA Experiment 20000264 PARAMETER Experiment Name: At_Open_Flower_P Parameter: Tissue Value: Open Flower vs. Whole Plant
  misc_feature: MA Experiment ID: 20000265 Result: Down-regulated in Transcription
  misc_feature: MA Experiment 20000265 PARAMETER Experiment Name: At_Open_Flower_P Parameter: Age (day) Value: 21
  misc_feature: MA Experiment 20000265 PARAMETER Experiment Name: At_Open_Flower_P Parameter: Plant Line Value: WS
  misc_feature: MA Experiment 20000265 PARAMETER Experiment Name: At_Open_Flower_P Parameter: Tissue Value: Closed Flower vs. Whole Plant
  misc_feature: MA Experiment ID: 20000286 Result: Down-regulated in Transcription
  misc_feature: MA Experiment 20000286 PARAMETER Experiment Name: At_Open_Flower_P Parameter: Age (day) Value: 21
  misc_feature: MA Experiment 20000286 PARAMETER Experiment Name: At_Open_Flower_P Parameter: Plant Line Value: WS
  misc_feature: MA Experiment 20000286 PARAMETER Experiment Name: At_Open_Flower_P Parameter: Tissue Value: Half Open vs. Whole Plant
  misc_feature: MA Experiment ID: 20000438 Result: Down-regulated in Transcription
  misc_feature: MA Experiment 20000438 PARAMETER Experiment Name: At_Shoots__P Parameter: Age (day) Value: 14
  misc_feature: MA Experiment 20000438 PARAMETER Experiment Name: At_Shoots__P Parameter: Tissue Value: Shoots vs. Whole Plant
  misc_feature: MA Experiment ID: 20001247 Result: Up-regulated in Transcription
  misc_feature: MA Experiment 20001247 PARAMETER Experiment Name: At_Far-red-induction_P Parameter: Age (day) Value: 7
  misc_feature: MA Experiment 20001247 PARAMETER Experiment Name: At_Far-red-induction_P Parameter: Light Value: Far-red vs. White
  misc_feature: MA Experiment 20001247 PARAMETER Experiment Name: At_Far-red-induction_P Parameter: Organism Value: A. thaliana
  misc_feature: MA Experiment 20001247 PARAMETER Experiment Name: At_Far-red-induction_P Parameter: Plant Line Value: Columbia
  misc_feature: MA Experiment 20001247 PARAMETER Experiment Name: At_Far-red-induction_P Parameter: Timepoint (hr) Value: 1
  misc_feature: MA Experiment 20001247 PARAMETER Experiment Name: At_Far-red-induction_P Parameter: Tissue Value: Whole Plant
  misc_feature: MA Experiment ID: 20001555 Result: Down-regulated in Transcription
  misc_feature: MA Experiment 20001555 PARAMETER Experiment Name: At_Drought_Soil_Dry_P Parameter: Age (day) Value: 24
  misc_feature: MA Experiment 20001555 PARAMETER Experiment Name: At_Drought_Soil_Dry_P Parameter: Organism Value: A. thaliana
  misc_feature: MA Experiment 20001555 PARAMETER Experiment Name: At_Drought_Soil_Dry_P Parameter: Plant Line Value: WS
  misc_feature: MA Experiment 20001555 PARAMETER Experiment Name: At_Drought_Soil_Dry_P Parameter: Post Timepoint (hr) Value: None
  misc_feature: MA Experiment 20001555 PARAMETER Experiment Name: At_Drought_Soil_Dry_P Parameter: Post-Treatment Value: None
  misc_feature: MA Experiment 20001555 PARAMETER Experiment Name: At_Drought_Soil_Dry_P Parameter: Timepoint (day) Value: 10
  misc_feature: MA Experiment 20001555 PARAMETER Experiment Name: At_Drought_Soil_Dry_P Parameter: Treatment Value: Drought vs. No Drought
  misc_feature: MA Experiment ID: 20001556 Result: Down-regulated in Transcription
  misc_feature: MA Experiment 20001556 PARAMETER Experiment Name: At_Drought_Soil_Dry_P Parameter: Age (day) Value: 26
  misc_feature: MA Experiment 20001556 PARAMETER Experiment Name: At_Drought_Soil_Dry_P Parameter: Organism Value: A. thaliana
  misc_feature: MA Experiment 20001556 PARAMETER Experiment Name: At_Drought_Soil_Dry_P Parameter: Plant Line Value: WS
  misc_feature: MA Experiment 20001556 PARAMETER Experiment Name: At_Drought_Soil_Dry_P Parameter: Post Timepoint (hr) Value: None
  misc_feature: MA Experiment 20001556 PARAMETER Experiment Name: At_Drought_Soil_Dry_P Parameter: Post-Treatment Value: None
  misc_feature: MA Experiment 20001556 PARAMETER Experiment Name: At_Drought_Soil_Dry_P Parameter: Timepoint (day) Value: 12
  misc_feature: MA Experiment 20001556 PARAMETER Experiment Name: At_Drought_Soil_Dry_P Parameter: Treatment Value: Drought vs. No Drought
  misc_feature: MA Experiment ID: 20001560 Result: Down-regulated in Transcription
  misc_feature: MA Experiment 20001560 PARAMETER Experiment Name: At_Drought_Soil_Dry_P Parameter: Age (day) Value: 28
  misc_feature: MA Experiment 20001560 PARAMETER Experiment Name: At_Drought_Soil_Dry_P Parameter: Organism Value: A. thaliana
  misc_feature: MA Experiment 20001560 PARAMETER Experiment Name: At_Drought_Soil_Dry_P Parameter: Plant Line Value: WS
  misc_feature: MA Experiment 20001560 PARAMETER Experiment Name: At_Drought_Soil_Dry_P Parameter: Post Timepoint (hr) Value: None
  misc_feature: MA Experiment 20001560 PARAMETER Experiment Name: At_Drought_Soil_Dry_P Parameter: Post-Treatment Value: None
  misc_feature: MA Experiment 20001560 PARAMETER Experiment Name: At_Drought_Soil_Dry_P Parameter: Timepoint (day) Value: 14
  misc_feature: MA Experiment 20001560 PARAMETER Experiment Name: At_Drought_Soil_Dry_P Parameter: Treatment Value: Drought vs. No Drought

SEQ ID NO: 33192 - protein, 300 aa, Arabidopsis thaliana; identical to SEQ ID NO: 29602
  peptide (1)..(300): Ceres Seq. ID no. 13489421
  misc_feature (240)..(300): Pfam Name: SNARE domain Pfam Description: SNARE domain
  misc_feature (89)..(299): Homolog of NCBI NO: 548945 NR Description: Synaptosomal-associated protein 25B (SNAP-25B)
  misc_feature (89)..(299): Homolog of NCBI NO: 37589801 NR Description: Unknown (protein for MGC:73101) [Danio rerio]
  misc_feature (91)..(298): Homolog of NCBI NO: 27263173 NR Description: synaptosome-associated protein of 25 kDa
  misc_feature (89)..(299): Homolog of NCBI NO: 6755588 NR Description: synaptosomal-associated protein 25
  misc_feature (89)..(299): Homolog of NCBI NO: 18765733 NR Description: synaptosomal-associated protein 25 isoform SNAP25A
  misc_feature (82)..(300): Homolog of NCBI NO: 15241436 NR Description: SNAP25 - like protein [Arabidopsis thaliana]
  misc_feature (8)..(300): Homolog of NCBI NO: 32308074 NR Description: SNAP-34 [Hordeum vulgare subsp. vulgare]
  misc_feature (53)..(300): Homolog of NCBI NO: 15222976 NR Description: synaptosomal associated protein (SNAP25A)
  misc_feature (1)..(300): Homolog of NCBI NO: 21553460 NR Description: snap25a [Arabidopsis thaliana]
  misc_feature (1)..(300): Homolog of NCBI NO: 15240163 NR Description: syntaxin SNAP33 [Arabidopsis thaliana]

SEQ ID NO: 33193 - protein, 247 aa, Arabidopsis thaliana; identical to SEQ ID NO: 29603
  peptide (1)..(247): Ceres Seq. ID no. 13489422
  misc_feature (187)..(247): Pfam Name: SNARE domain Pfam Description: SNARE domain
  misc_feature (36)..(246): Homolog of NCBI NO: 548945 NR Description: Synaptosomal-associated protein 25B (SNAP-25B)
  misc_feature (36)..(246): Homolog of NCBI NO: 37589801 NR Description: Unknown (protein for MGC:73101) [Danio rerio]
  misc_feature (38)..(245): Homolog of NCBI NO: 27263173 NR Description: synaptosome-associated protein of 25 kDa
  misc_feature (36)..(246): Homolog of NCBI NO: 6755588 NR Description: synaptosomal-associated protein 25
  misc_feature (36)..(246): Homolog of NCBI NO: 18765733 NR Description: synaptosomal-associated protein 25 isoform SNAP25A
  misc_feature (29)..(247): Homolog of NCBI NO: 15241436 NR Description: SNAP25 - like protein [Arabidopsis thaliana]
  misc_feature (1)..(247): Homolog of NCBI NO: 32308074 NR Description: SNAP-34 [Hordeum vulgare subsp. vulgare]
  misc_feature (1)..(247): Homolog of NCBI NO: 15222976 NR Description: synaptosomal associated protein (SNAP25A)
  misc_feature (1)..(247): Homolog of NCBI NO: 21553460 NR Description: snap25a [Arabidopsis thaliana]
  misc_feature (1)..(247): Homolog of NCBI NO: 15240163 NR Description: syntaxin SNAP33 [Arabidopsis thaliana]

SEQ ID NO: 33194 - protein, 165 aa, Arabidopsis thaliana; identical to SEQ ID NO: 29604
  peptide (1)..(165): Ceres Seq. ID no. 13489423
  misc_feature (105)..(165): Pfam Name: SNARE domain Pfam Description: SNARE domain
  misc_feature (1)..(164): Homolog of NCBI NO: 548945 NR Description: Synaptosomal-associated protein 25B (SNAP-25B)
  misc_feature (1)..(164): Homolog of NCBI NO: 37589801 NR Description: Unknown (protein for MGC:73101) [Danio rerio]
  misc_feature (1)..(163): Homolog of NCBI NO: 27263173 NR Description: synaptosome-associated protein of 25 kDa
  misc_feature (1)..(164): Homolog of NCBI NO: 6755588 NR Description: synaptosomal-associated protein 25
  misc_feature (1)..(164): Homolog of NCBI NO: 18765733 NR Description: synaptosomal-associated protein 25 isoform SNAP25A
  misc_feature (1)..(165): Homolog of NCBI NO: 15241436 NR Description: SNAP25 - like protein [Arabidopsis thaliana]
  misc_feature (1)..(165): Homolog of NCBI NO: 32308074 NR Description: SNAP-34 [Hordeum vulgare subsp. vulgare]
  misc_feature (1)..(165): Homolog of NCBI NO: 15222976 NR Description: synaptosomal associated protein (SNAP25A)
  misc_feature (1)..(165): Homolog of NCBI NO: 21553460 NR Description: snap25a [Arabidopsis thaliana]
  misc_feature (1)..(165): Homolog of NCBI NO: 15240163 NR Description: syntaxin SNAP33 [Arabidopsis thaliana]

SEQ ID NO: 33195 - DNA, 675 bp, Arabidopsis thaliana; identical to SEQ ID NO: 29605
  misc_feature (1)..(675): Ceres Seq. ID no. 12738445
  misc_feature: MA Experiment ID: 108434 Result: Up-regulated in Transcription
  misc_feature: MA Experiment 108434 PARAMETER Experiment Name: At_Root_Tips_cDNA_P Parameter: Tissue Value: Root Tips
  misc_feature: MA Experiment ID: 108462 Result: Down-regulated in Transcription
  misc_feature: MA Experiment 108462 PARAMETER Experiment Name: At_Germinating_Seeds_cDNA_P Parameter: Age (day) Value: 2 vs. 0
  misc_feature: MA Experiment 108462 PARAMETER Experiment Name: At_Germinating_Seeds_cDNA_P Parameter: Tissue Value: Germinating Seeds
  misc_feature: MA Experiment ID: 108463 Result: Down-regulated in Transcription
  misc_feature: MA Experiment 108463 PARAMETER Experiment Name: At_Germinating_Seeds_cDNA_P Parameter: Age (day) Value: 3 vs. 0
  misc_feature: MA Experiment 108463 PARAMETER Experiment Name: At_Germinating_Seeds_cDNA_P Parameter: Tissue Value: Germinating Seeds
  misc_feature: MA Experiment ID: 108464 Result: Down-regulated in Transcription
  misc_feature: MA Experiment 108464 PARAMETER Experiment Name: At_Germinating_Seeds_cDNA_P Parameter: Age (day) Value: 4 vs. 0
  misc_feature: MA Experiment 108464 PARAMETER Experiment Name: At_Germinating_Seeds_cDNA_P Parameter: Tissue Value: Germinating Seeds
  misc_feature: MA Experiment ID: 108573 Result: Down-regulated in Transcription
  misc_feature: MA Experiment 108573 PARAMETER Experiment Name: At_Drought_cDNA_P Parameter: Timepoint (hr) Value: 6
  misc_feature: MA Experiment 108573 PARAMETER Experiment Name: At_Drought_cDNA_P Parameter: Tissue Value: Aerial
  misc_feature: MA Experiment 108573 PARAMETER Experiment Name: At_Drought_cDNA_P Parameter: Treatment Value: Drought vs. No Drought
  misc_feature: MA Experiment ID: 108605 Result: Down-regulated in Transcription
  misc_feature: MA Experiment 108605 PARAMETER Experiment Name: At_100uM_ABA_cDNA_P Parameter: Timepoint (hr) Value: 6
  misc_feature: MA Experiment 108605 PARAMETER Experiment Name: At_100uM_ABA_cDNA_P Parameter: Tissue Value: Aerial
  misc_feature: MA Experiment 108605 PARAMETER Experiment Name: At_100uM_ABA_cDNA_P Parameter: Treatment Value: 100uM ABA vs. No Treatment
  misc_feature: MA Experiment ID: 20000070 Result: Down-regulated in Transcription
  misc_feature: MA Experiment 20000070 PARAMETER Experiment Name: At_100uM_ABA_Mutants_cDNA_P Parameter: Plant Line Value: CS24
  misc_feature: MA Experiment 20000070 PARAMETER Experiment Name: At_100uM_ABA_Mutants_cDNA_P Parameter: Timepoint (hr) Value: 6
  misc_feature: MA Experiment 20000070 PARAMETER Experiment Name: At_100uM_ABA_Mutants_cDNA_P Parameter: Tissue Value: Aerial
  misc_feature: MA Experiment 20000070 PARAMETER Experiment Name: At_100uM_ABA_Mutants_cDNA_P Parameter: Treatment Value: 100uM ABA vs. No Treatment
  misc_feature: MA Experiment ID: 20000329 Result: Up-regulated in Transcription
  misc_feature: MA Experiment 20000329 PARAMETER Experiment Name: At_4deg_Cold_Sub_P Parameter: Age (day) Value: 14
  misc_feature: MA Experiment 20000329 PARAMETER Experiment Name: At_4deg_Cold_Sub_P Parameter: Organism Value: A. thaliana
  misc_feature: MA Experiment 20000329 PARAMETER Experiment Name: At_4deg_Cold_Sub_P Parameter: Plant Line Value: WS
  misc_feature: MA Experiment 20000329 PARAMETER Experiment Name: At_4deg_Cold_Sub_P Parameter: Temperature (deg C) Value: 4 vs. 22
  misc_feature: MA Experiment 20000329 PARAMETER Experiment Name: At_4deg_Cold_Sub_P Parameter: Timepoint (hr) Value: 6
  misc_feature: MA Experiment 20000329 PARAMETER Experiment Name: At_4deg_Cold_Sub_P Parameter: Tissue Value: Aerial
  misc_feature: MA Experiment ID: 20000355 Result: Up-regulated in Transcription
  misc_feature: MA Experiment 20000355 PARAMETER Experiment Name: At_Siliques_Sub_P Parameter: Age (day) Value: 21
  misc_feature: MA Experiment 20000355 PARAMETER Experiment Name: At_Siliques_Sub_P Parameter: Organism Value: A. thaliana
  misc_feature: MA Experiment 20000355 PARAMETER Experiment Name: At_Siliques_Sub_P Parameter: Plant Line Value: WS
  misc_feature: MA Experiment 20000355 PARAMETER Experiment Name: At_Siliques_Sub_P Parameter: Tissue Value: Less Than 5mm Siliques vs. Whole Plant
  misc_feature: MA Experiment ID: 20000440 Result: Up-regulated in Transcription
  misc_feature: MA Experiment 20000440 PARAMETER Experiment Name: At_Closed-Flower__Sub_P Parameter: Tissue Value: Closed Flower vs. Whole Plant
  misc_feature: MA Experiment ID: 20001807 Result: Up-regulated in Transcription
  misc_feature: MA Experiment 20001807 PARAMETER Experiment Name: At_50mM_NH4NO3_L-to-H_Sub_P Parameter: Timepoint (hr) Value: 6
  misc_feature: MA Experiment 20001807 PARAMETER Experiment Name: At_50mM_NH4NO3_L-to-H_Sub_P Parameter: Tissue Value: Leaf
  misc_feature: MA Experiment 20001807 PARAMETER Experiment Name: At_50mM_NH4NO3_L-to-H_Sub_P Parameter: Treatment Value: 50mM NH4NO3 vs 100mM Mannitol

SEQ ID NO: 33196 - protein, 164 aa, Arabidopsis thaliana; identical to SEQ ID NO: 29606
  peptide (1)..(164): Ceres Seq. ID no. 12738446
  misc_feature (3)..(73): Pfam Name: Ribosomal protein L24e Pfam Description: Ribosomal protein L24e
  misc_feature (3)..(159): Homolog of NCBI NO: 4506619 NR Description: ribosomal protein L24
  misc_feature (3)..(151): Homolog of NCBI NO: 19115030 NR Description: 60S ribosomal protein L24 [Schizosaccharomyces
  misc_feature (1)..(159): Homolog of NCBI NO: 28174943 NR Description: Similar to ribosomal protein L24 [Mus musculus]
  misc_feature (4)..(164): Homolog of NCBI NO: 34900364 NR Description: putative 60S ribosomal protein L24
  misc_feature (1)..(159): Homolog of NCBI NO: 10180025 NR Description: 60S ribosomal protein L24 [Prunus avium]
  misc_feature (1)..(164): Homolog of NCBI NO: 1710521 NR Description: 60S RIBOSOMAL PROTEIN L24
  misc_feature (1)..(163): Homolog of NCBI NO: 6094040 NR Description: 60S ribosomal protein L24
  misc_feature (1)..(164): Homolog of NCBI NO: 15231730 NR Description: 60S ribosomal protein - like
  misc_feature (5)..(164): Homolog of NCBI NO: 25295112 NR Description: 60S ribosomal protein L24 [imported] -
  misc_feature (1)..(164): Homolog of NCBI NO: 18404176 NR Description: 60S ribosomal protein L24

SEQ ID NO: 33197 - protein, 109 aa, Arabidopsis thaliana; identical to SEQ ID NO: 29607
  peptide (1)..(109): Ceres Seq. ID no. 12738447
  misc_feature (1)..(104): Homolog of NCBI NO: 4506619 NR Description: ribosomal protein L24
  misc_feature (1)..(96): Homolog of NCBI NO: 19115030 NR Description: 60S ribosomal protein L24 [Schizosaccharomyces
  misc_feature (1)..(104): Homolog of NCBI NO: 28174943 NR Description: Similar to ribosomal protein L24 [Mus musculus]
  misc_feature (1)..(109): Homolog of NCBI NO: 34900364 NR Description: putative 60S ribosomal protein L24
  misc_feature (1)..(104): Homolog of NCBI NO: 10180025 NR Description: 60S ribosomal protein L24 [Prunus avium]
  misc_feature (1)..(109): Homolog of NCBI NO: 1710521 NR Description: 60S RIBOSOMAL PROTEIN L24
  misc_feature (1)..(108): Homolog of NCBI NO: 6094040 NR Description: 60S ribosomal protein L24
  misc_feature (1)..(109): Homolog of NCBI NO: 15231730 NR Description: 60S ribosomal protein - like
  misc_feature (1)..(109): Homolog of NCBI NO: 25295112 NR Description: 60S ribosomal protein L24 [imported] -
  misc_feature (1)..(109): Homolog of NCBI NO: 18404176 NR Description: 60S ribosomal protein L24

SEQ ID NO: 33198 - DNA, 1217 bp, Arabidopsis thaliana; identical to SEQ ID NO: 29608
  misc_feature (1)..(1217): Ceres Seq. ID no. 13489591
  misc_feature: MA Experiment ID: 108434 Result: Up-regulated in Transcription
  misc_feature: MA Experiment 108434 PARAMETER Experiment Name: At_Root_Tips_cDNA_P Parameter: Tissue Value: Root Tips
  misc_feature: MA Experiment ID: 20000111 Result: Down-regulated in Transcription
  misc_feature: MA Experiment 20000111 PARAMETER Experiment Name: At_42deg_Heat_cDNA_P Parameter: Temperature (deg C) Value: 42 vs. 22
  misc_feature: MA Experiment 20000111 PARAMETER Experiment Name: At_42deg_Heat_cDNA_P Parameter: Timepoint (hr) Value: 6
  misc_feature: MA Experiment 20000111 PARAMETER Experiment Name: At_42deg_Heat_cDNA_P Parameter: Tissue Value: Aerial
  misc_feature: MA Experiment ID: 20000113 Result: Down-regulated in Transcription
  misc_feature: MA Experiment 20000113 PARAMETER Experiment Name: At_42deg_Heat_cDNA_P Parameter: Temperature (deg C) Value: 42 vs. 22
  misc_feature: MA Experiment 20000113 PARAMETER Experiment Name: At_42deg_Heat_cDNA_P Parameter: Timepoint (hr) Value: 8
  misc_feature: MA Experiment 20000113 PARAMETER Experiment Name: At_42deg_Heat_cDNA_P Parameter: Tissue Value: Aerial
  misc_feature: MA Experiment ID: 20000179 Result: Up-regulated in Transcription
  misc_feature: MA Experiment 20000179 PARAMETER Experiment Name: At_Germinating_Seeds_P Parameter: Age (hr) Value: 6 vs. 0
  misc_feature: MA Experiment 20000179 PARAMETER Experiment Name: At_Germinating_Seeds_P Parameter: Tissue Value: Germinating Seeds
  misc_feature: MA Experiment ID: 20000184 Result: Down-regulated in Transcription
  misc_feature: MA Experiment 20000184 PARAMETER Experiment Name: At_Shoots__P Parameter: Age (day) Value: 7
  misc_feature: MA Experiment 20000184 PARAMETER Experiment Name: At_Shoots__P Parameter: Tissue Value: Shoots vs. Whole Plant
  misc_feature: MA Experiment ID: 20000224 Result: Up-regulated in Transcription
  misc_feature: MA Experiment ID: 20000264 Result: Up-regulated in Transcription
  misc_feature: MA Experiment 20000264 PARAMETER Experiment Name: At_Open_Flower_P Parameter: Age (day) Value: 21
  misc_feature: MA Experiment 20000264 PARAMETER Experiment Name: At_Open_Flower_P Parameter: Plant Line Value: WS
  misc_feature: MA Experiment 20000264 PARAMETER Experiment Name: At_Open_Flower_P Parameter: Tissue Value: Open Flower vs. Whole Plant
  misc_feature: MA Experiment ID: 20000265 Result: Up-regulated in Transcription
  misc_feature: MA Experiment 20000265 PARAMETER Experiment Name: At_Open_Flower_P Parameter: Age (day) Value: 21
  misc_feature: MA Experiment 20000265 PARAMETER Experiment Name: At_Open_Flower_P Parameter: Plant Line Value: WS
  misc_feature: MA Experiment 20000265 PARAMETER Experiment Name: At_Open_Flower_P Parameter: Tissue Value: Closed Flower vs. Whole Plant
  misc_feature: MA Experiment ID: 20000286 Result: Up-regulated in Transcription
  misc_feature: MA Experiment 20000286 PARAMETER Experiment Name: At_Open_Flower_P Parameter: Age (day) Value: 21
  misc_feature: MA Experiment 20000286 PARAMETER Experiment Name: At_Open_Flower_P Parameter: Plant Line Value: WS
  misc_feature: MA Experiment 20000286 PARAMETER Experiment Name: At_Open_Flower_P Parameter: Tissue Value: Half Open vs. Whole Plant
  misc_feature: MA Experiment ID: 20000794 Result: Up-regulated in Transcription
  misc_feature: MA Experiment 20000794 PARAMETER Experiment Name: At_Petals_P Parameter: Age (day) Value: 23-25 days
  misc_feature: MA Experiment 20000794 PARAMETER Experiment Name: At_Petals_P Parameter: Plant Line Value: WS
  misc_feature: MA Experiment 20000794 PARAMETER Experiment Name: At_Petals_P Parameter: Tissue Value: Petals vs. Whole plant

SEQ ID NO: 33199 - protein, 316 aa, Arabidopsis thaliana; identical to SEQ ID NO: 29609
  peptide (1)..(316): Ceres Seq. ID no. 13489592
  misc_feature (50)..(277): Homolog of NCBI NO: 34866113 NR Description: similar to RIKEN cDNA 4921531G14 [Rattus
  misc_feature (50)..(297): Homolog of NCBI NO: 7661910 NR Description: KIAA0103 gene product [Homo sapiens]
  misc_feature (50)..(297): Homolog of NCBI NO: 14193698 NR Description: KIAA0103 protein [Mus musculus]
  misc_feature (50)..(297): Homolog of NCBI NO: 13385196 NR Description: RIKEN cDNA 4921531G14 [Mus musculus]
  misc_feature (50)..(297): Homolog of NCBI NO: 27370885 NR Description: Similar to KIAA0103 gene product [Xenopus laevis]
  misc_feature (101)..(315): Homolog of NCBI NO: 10799830 NR Description: O-linked GlcNAc transferase like [Nicotiana
  misc_feature (14)..(315): Homolog of NCBI NO: 22330847 NR Description: expressed protein [Arabidopsis thaliana]
  misc_feature (14)..(315): Homolog of NCBI NO: 30679284 NR Description: expressed protein [Arabidopsis thaliana]
  misc_feature (14)..(316): Homolog of NCBI NO: 5732436 NR Description: contains similarity to O-linked GlcNAc
  misc_feature (1)..(316): Homolog of NCBI NO: 30690960 NR Description: expressed protein [Arabidopsis thaliana]

SEQ ID NO: 33200 - protein, 303 aa, Arabidopsis thaliana; identical to SEQ ID NO: 29610
  peptide (1)..(303): Ceres Seq. ID no. 13489593
  misc_feature (37)..(264): Homolog of NCBI NO: 34866113 NR Description: similar to RIKEN cDNA 4921531G14 [Rattus
  misc_feature (37)..(284): Homolog of NCBI NO: 7661910 NR Description: KIAA0103 gene product [Homo sapiens]
  misc_feature (37)..(284): Homolog of NCBI NO: 14193698 NR Description: KIAA0103 protein [Mus musculus]
  misc_feature (37)..(284): Homolog of NCBI NO: 13385196 NR Description: RIKEN cDNA 4921531G14 [Mus musculus]
  misc_feature (37)..(284): Homolog of NCBI NO: 27370885 NR Description: Similar to KIAA0103 gene product [Xenopus laevis]
  misc_feature (88)..(302): Homolog of NCBI NO: 10799830 NR Description: O-linked GlcNAc transferase like [Nicotiana
  misc_feature (1)..(302): Homolog of NCBI NO: 22330847 NR Description: expressed protein [Arabidopsis thaliana]
  misc_feature (1)..(302): Homolog of NCBI NO: 30679284 NR Description: expressed protein [Arabidopsis thaliana]
  misc_feature (1)..(303): Homolog of NCBI NO: 5732436 NR Description: contains similarity to O-linked GlcNAc
  misc_feature (1)..(303): Homolog of NCBI NO: 30690960 NR Description: expressed protein [Arabidopsis thaliana]

SEQ ID NO: 33201 - protein, 229 aa, Arabidopsis thaliana; identical to SEQ ID NO: 29611
  peptide (1)..(229): Ceres Seq. ID no. 13489594
  misc_feature (1)..(190): Homolog of NCBI NO: 34866113 NR Description: similar to RIKEN cDNA 4921531G14 [Rattus
  misc_feature (1)..(210): Homolog of NCBI NO: 7661910 NR Description: KIAA0103 gene product [Homo sapiens]
  misc_feature (1)..(210): Homolog of NCBI NO: 14193698 NR Description: KIAA0103 protein [Mus musculus]
  misc_feature (1)..(210): Homolog of NCBI NO: 13385196 NR Description: RIKEN cDNA 4921531G14 [Mus musculus]
  misc_feature (1)..(210): Homolog of NCBI NO: 27370885 NR Description: Similar to KIAA0103 gene product [Xenopus laevis]
  misc_feature (14)..(228): Homolog of NCBI NO: 10799830 NR Description: O-linked GlcNAc transferase like [Nicotiana
  misc_feature (1)..(228): Homolog of NCBI NO: 22330847 NR Description: expressed protein [Arabidopsis thaliana]
  misc_feature (1)..(228): Homolog of NCBI NO: 30679284 NR Description: expressed protein [Arabidopsis thaliana]
  misc_feature (1)..(229): Homolog of NCBI NO: 5732436 NR Description: contains similarity to O-linked GlcNAc
  misc_feature (1)..(229): Homolog of NCBI NO: 30690960 NR Description: expressed protein [Arabidopsis thaliana]

SEQ ID NO: 33202 - DNA, 1535 bp, Arabidopsis thaliana; identical to SEQ ID NO: 29612
  misc_feature (1)..(1535): Ceres Seq. ID no. 13490268
  misc_feature: MA Experiment ID: 108434 Result: Down-regulated in Transcription
  misc_feature: MA Experiment 108434 PARAMETER Experiment Name: At_Root_Tips_cDNA_P Parameter: Tissue Value: Root Tips
  misc_feature: MA Experiment ID: 108469 Result: Up-regulated in Transcription
  misc_feature: MA Experiment ID: 108569 Result: Up-regulated in Transcription
  misc_feature: MA Experiment 108569 PARAMETER Experiment Name: At_0.001%_MeJA__cDNA_P Parameter: Timepoint (hr) Value: 6
  misc_feature: MA Experiment 108569 PARAMETER Experiment Name: At_0.001%_MeJA__cDNA_P Parameter: Tissue Value: Aerial
  misc_feature: MA Experiment 108569 PARAMETER Experiment Name: At_0.001%_MeJA__cDNA_P Parameter: Treatment Value: 0.001% MeJA vs. No Treatment
  misc_feature: MA Experiment ID: 108572 Result: Up-regulated in Transcription
  misc_feature: MA Experiment 108572 PARAMETER Experiment Name: At_Drought_cDNA_P Parameter: Timepoint (hr) Value: 1
  misc_feature: MA Experiment 108572 PARAMETER Experiment Name: At_Drought_cDNA_P Parameter: Tissue Value: Aerial
  misc_feature: MA Experiment 108572 PARAMETER Experiment Name: At_Drought_cDNA_P Parameter: Treatment Value: Drought vs. No Drought
  misc_feature: MA Experiment ID: 108573 Result: Up-regulated in Transcription
  misc_feature: MA Experiment 108573 PARAMETER Experiment Name: At_Drought_cDNA_P Parameter: Timepoint (hr) Value: 6
  misc_feature: MA Experiment 108573 PARAMETER Experiment Name: At_Drought_cDNA_P Parameter: Tissue Value: Aerial
  misc_feature: MA Experiment 108573 PARAMETER Experiment Name: At_Drought_cDNA_P Parameter: Treatment Value: Drought vs. No Drought
  misc_feature: MA Experiment ID: 108574 Result: Up-regulated in Transcription
  misc_feature: MA Experiment 108574 PARAMETER Experiment Name: At_Wounding__cDNA_P Parameter: Timepoint (hr) Value: 1
  misc_feature: MA Experiment 108574 PARAMETER Experiment Name: At_Wounding__cDNA_P Parameter: Tissue Value: Aerial
  misc_feature: MA Experiment 108574 PARAMETER Experiment Name: At_Wounding__cDNA_P Parameter: Treatment Value: Wounding vs. No Wounding
  misc_feature: MA Experiment ID: 108585 Result: Up-regulated in Transcription
  misc_feature: MA Experiment 108585 PARAMETER Experiment Name: At_5mM_NaNP_cDNA_P Parameter: Timepoint (hr) Value: 6
  misc_feature: MA Experiment 108585 PARAMETER Experiment Name: At_5mM_NaNP_cDNA_P Parameter: Tissue Value: Aerial
  misc_feature: MA Experiment 108585 PARAMETER Experiment Name: At_5mM_NaNP_cDNA_P Parameter: Treatment Value: null
  misc_feature: MA Experiment ID: 108607 Result: Up-regulated in Transcription
  misc_feature: MA Experiment 108607 PARAMETER Experiment Name: At_100uM_ABA_cDNA_P Parameter: Timepoint (hr) Value: 4
  misc_feature: MA Experiment 108607 PARAMETER Experiment Name: At_100uM_ABA_cDNA_P Parameter: Tissue Value: Aerial
  misc_feature: MA Experiment 108607 PARAMETER Experiment Name: At_100uM_ABA_cDNA_P Parameter: Treatment Value: 100uM ABA vs. No Treatment
  misc_feature: MA Experiment ID: 108667 Result: Up-regulated in Transcription
  misc_feature: MA Experiment 108667 PARAMETER Experiment Name: At_2mM_SA_cDNA_P Parameter: Plant Line Value: WS
  misc_feature: MA Experiment 108667 PARAMETER Experiment Name: At_2mM_SA_cDNA_P Parameter: Timepoint (hr) Value: 1
  misc_feature: MA Experiment 108667 PARAMETER Experiment Name: At_2mM_SA_cDNA_P Parameter: Treatment Value: 2mM SA vs. No Treatment
  misc_feature: MA Experiment ID: 108668 Result: Up-regulated in Transcription
  misc_feature: MA Experiment 108668 PARAMETER Experiment Name: At_2mM_SA_cDNA_P Parameter: Plant Line Value: WS
  misc_feature: MA Experiment 108668 PARAMETER Experiment Name: At_2mM_SA_cDNA_P Parameter: Timepoint (hr) Value: 6
  misc_feature: MA Experiment 108668 PARAMETER Experiment Name: At_2mM_SA_cDNA_P Parameter: Treatment Value: 2mM SA vs. No Treatment
  misc_feature: MA Experiment ID: 20000166 Result: Up-regulated in Transcription
  misc_feature: MA Experiment 20000166 PARAMETER Experiment Name: At_100uM_ABA_P Parameter: Age (day) Value: 14
  misc_feature: MA Experiment 20000166 PARAMETER Experiment Name: At_100uM_ABA_P Parameter: Organism Value: A. thaliana
  misc_feature: MA Experiment 20000166 PARAMETER Experiment Name: At_100uM_ABA_P Parameter: Plant Line Value: WS
  misc_feature: MA Experiment 20000166 PARAMETER Experiment Name: At_100uM_ABA_P Parameter: Timepoint (hr) Value: 1
  misc_feature: MA Experiment 20000166 PARAMETER Experiment Name: At_100uM_ABA_P Parameter: Tissue Value: Aerial
  misc_feature: MA Experiment 20000166 PARAMETER Experiment Name: At_100uM_ABA_P Parameter: Treatment Value: 100uM ABA vs. No Treatment
  misc_feature: MA Experiment ID: 20000173 Result: Down-regulated in Transcription
  misc_feature: MA Experiment 20000173 PARAMETER Experiment Name: At_42deg_Heat_P Parameter: Age (day) Value: 14
  misc_feature: MA Experiment 20000173 PARAMETER Experiment Name: At_42deg_Heat_P Parameter: Organism Value: A. thaliana
  misc_feature: MA Experiment 20000173 PARAMETER Experiment Name: At_42deg_Heat_P Parameter: Plant Line Value: WS
  misc_feature: MA Experiment 20000173 PARAMETER Experiment Name: At_42deg_Heat_P Parameter: Temperature (deg C) Value: 42 vs. 22
  misc_feature: MA Experiment 20000173 PARAMETER Experiment Name: At_42deg_Heat_P Parameter: Timepoint (hr) Value: 6
  misc_feature: MA Experiment 20000173 PARAMETER Experiment Name: At_42deg_Heat_P Parameter: Tissue Value: Aerial
  misc_feature: MA Experiment ID: 20000182 Result: Up-regulated in Transcription
  misc_feature: MA Experiment 20000182 PARAMETER Experiment Name: At_2mM_SA_P Parameter: Age (day) Value: 14
  misc_feature: MA Experiment 20000182 PARAMETER Experiment Name: At_2mM_SA_P Parameter: Organism Value: A. thaliana
  misc_feature: MA Experiment 20000182 PARAMETER Experiment Name: At_2mM_SA_P Parameter: Plant Line Value: WS
  misc_feature: MA Experiment 20000182 PARAMETER Experiment Name: At_2mM_SA_P Parameter: Timepoint (hr) Value: 6
  misc_feature: MA Experiment 20000182 PARAMETER Experiment Name: At_2mM_SA_P Parameter: Tissue Value: Aerial
  misc_feature: MA Experiment 20000182 PARAMETER Experiment Name: At_2mM_SA_P Parameter: Treatment Value: 2mM SA vs. No Treatment
  misc_feature: MA Experiment ID: 20000184 Result: Down-regulated in Transcription
  misc_feature: MA Experiment 20000184 PARAMETER Experiment Name: At_Shoots__P Parameter: Age (day) Value: 7
  misc_feature: MA Experiment 20000184 PARAMETER Experiment Name: At_Shoots__P Parameter: Tissue Value: Shoots vs. Whole Plant
  misc_feature: MA Experiment ID: 20000185 Result: Down-regulated in Transcription
  misc_feature: MA Experiment 20000185 PARAMETER Experiment Name: At_Roots__P Parameter: Age (day) Value: 7 vs. 21
  misc_feature: MA Experiment 20000185 PARAMETER Experiment Name: At_Roots__P Parameter: Organism Value: A. thaliana
  misc_feature: MA Experiment 20000185 PARAMETER Experiment Name: At_Roots__P Parameter: Tissue Value: Roots vs. Whole Plant
  misc_feature: MA Experiment ID: 20000234 Result: Down-regulated in Transcription
  misc_feature: MA Experiment 20000234 PARAMETER Experiment Name: At_Siliques_P Parameter: Age (day) Value: 21
  misc_feature: MA Experiment 20000234 PARAMETER Experiment Name: At_Siliques_P Parameter: Organism Value: A. thaliana
  misc_feature: MA Experiment 20000234 PARAMETER Experiment Name: At_Siliques_P Parameter: Plant Line Value: WS
  misc_feature: MA Experiment 20000234 PARAMETER Experiment Name: At_Siliques_P Parameter: Tissue Value: Less Than 5mm Siliques vs. Whole Plant
  misc_feature: MA Experiment ID: 20000235 Result: Down-regulated in Transcription
  misc_feature: MA Experiment 20000235 PARAMETER Experiment Name: At_Siliques_P Parameter: Age (day) Value: 21
  misc_feature: MA Experiment 20000235 PARAMETER Experiment Name: At_Siliques_P Parameter: Organism Value: A. thaliana
  misc_feature: MA Experiment 20000235 PARAMETER Experiment Name: At_Siliques_P Parameter: Plant Line Value: WS
  misc_feature: MA Experiment 20000235 PARAMETER Experiment Name: At_Siliques_P Parameter: Tissue Value: 5-10mm Siliques vs. Whole Plant
  misc_feature: MA Experiment ID: 20000264 Result: Down-regulated in Transcription
  misc_feature: MA Experiment 20000264 PARAMETER Experiment Name: At_Open_Flower_P Parameter: Age (day) Value: 21
  misc_feature: MA Experiment 20000264 PARAMETER Experiment Name: At_Open_Flower_P Parameter: Plant Line Value: WS
  misc_feature: MA Experiment 20000264 PARAMETER Experiment Name: At_Open_Flower_P Parameter: Tissue Value: Open Flower vs. Whole Plant
  misc_feature: MA Experiment ID: 20000265 Result: Down-regulated in Transcription
  misc_feature: MA Experiment 20000265 PARAMETER Experiment Name: At_Open_Flower_P Parameter: Age (day) Value: 21
  misc_feature: MA Experiment 20000265 PARAMETER Experiment Name: At_Open_Flower_P Parameter: Plant Line Value: WS
  misc_feature: MA Experiment 20000265 PARAMETER Experiment Name: At_Open_Flower_P Parameter: Tissue Value: Closed Flower vs. Whole Plant
  misc_feature: MA Experiment ID: 20000286 Result: Down-regulated in Transcription
  misc_feature: MA Experiment 20000286 PARAMETER Experiment Name: At_Open_Flower_P Parameter: Age (day) Value: 21
  misc_feature: MA Experiment 20000286 PARAMETER Experiment Name: At_Open_Flower_P Parameter: Plant Line Value: WS
  misc_feature: MA Experiment 20000286 PARAMETER Experiment Name: At_Open_Flower_P Parameter: Tissue Value: Half Open vs. Whole Plant
  misc_feature: MA Experiment ID: 20000308 Result: Up-regulated in Transcription
  misc_feature: MA Experiment 20000308 PARAMETER Experiment Name: At_100mM_NaCl__P Parameter: Age (day) Value: 17
  misc_feature: MA Experiment 20000308 PARAMETER Experiment Name: At_100mM_NaCl__P Parameter: Organism Value: A. thaliana
  misc_feature: MA Experiment 20000308 PARAMETER Experiment Name: At_100mM_NaCl__P Parameter: Plant Line Value: WS
  misc_feature: MA Experiment 20000308 PARAMETER Experiment Name: At_100mM_NaCl__P Parameter: Timepoint (hr) Value: 72
  misc_feature: MA Experiment 20000308 PARAMETER Experiment Name: At_100mM_NaCl__P Parameter: Tissue Value: Whole Plant
  misc_feature: MA Experiment 20000308 PARAMETER Experiment Name: At_100mM_NaCl__P Parameter: Treatment Value: 100mM NaCl vs. No Treatment
  misc_feature: MA Experiment ID: 20000437 Result: Down-regulated in Transcription
  misc_feature: MA Experiment 20000437 PARAMETER Experiment Name: At_Drought_P Parameter: Age (day) Value: 8
  misc_feature: MA Experiment 20000437 PARAMETER Experiment Name: At_Drought_P Parameter: Organism Value: A. thaliana
  misc_feature: MA Experiment 20000437 PARAMETER Experiment Name: At_Drought_P Parameter: Plant Line Value: WS
  misc_feature: MA Experiment 20000437 PARAMETER Experiment Name: At_Drought_P Parameter: Timepoint (hr) Value: 24
  misc_feature: MA Experiment 20000437 PARAMETER Experiment Name: At_Drought_P Parameter: Tissue Value: Whole Plant
  misc_feature: MA Experiment 20000437 PARAMETER Experiment Name: At_Drought_P Parameter: Treatment Value: Drought vs. No Drought
  misc_feature: MA Experiment ID: 20000438 Result: Down-regulated in Transcription
  misc_feature: MA Experiment 20000438 PARAMETER Experiment Name: At_Shoots__P Parameter: Age (day) Value: 14
  misc_feature: MA Experiment 20000438 PARAMETER Experiment Name: At_Shoots__P Parameter: Tissue Value: Shoots vs. Whole Plant
  misc_feature: MA Experiment ID: 20000439 Result: Down-regulated in Transcription
  misc_feature: MA Experiment 20000439 PARAMETER Experiment Name: At_Roots__P Parameter: Age (day) Value: 14 vs. 21
  misc_feature: MA Experiment 20000439 PARAMETER Experiment Name: At_Roots__P Parameter: Organism Value: A. thaliana
  misc_feature: MA Experiment 20000439 PARAMETER Experiment Name: At_Roots__P Parameter: Tissue Value: Roots vs. Whole Plant
  misc_feature: MA Experiment ID: 20000495 Result: Down-regulated in Transcription
  misc_feature: MA Experiment 20000495 PARAMETER Experiment Name: At_Guard_Cells_P Parameter: Harvest Date Value: 8/2/2002
  misc_feature: MA Experiment 20000495 PARAMETER Experiment Name: At_Guard_Cells_P Parameter: Organism Value: A. thaliana
  misc_feature: MA Experiment 20000495 PARAMETER Experiment Name: At_Guard_Cells_P Parameter: Tissue Value: Guard Cells vs. Leaves
  misc_feature: MA Experiment ID: 20000527 Result: Down-regulated in Transcription
  misc_feature: MA Experiment 20000527 PARAMETER Experiment Name: At_10percent_PEG_P Parameter: Age (day) Value: 20
  misc_feature: MA Experiment 20000527 PARAMETER Experiment Name: At_10percent_PEG_P Parameter: Organism Value: A. thaliana
  misc_feature: MA Experiment 20000527 PARAMETER Experiment Name: At_10percent_PEG_P Parameter: Plant Line Value: WS
  misc_feature: MA Experiment 20000527 PARAMETER Experiment Name: At_10percent_PEG_P Parameter: Timepoint (day) Value: 20
  misc_feature: MA Experiment 20000527 PARAMETER Experiment Name: At_10percent_PEG_P Parameter: Tissue Value: Whole Plant
  misc_feature: MA Experiment 20000527 PARAMETER Experiment Name: At_10percent_PEG_P Parameter: Treatment Value: 10percent PEG vs. No Treatment
  misc_feature: MA Experiment ID: 20000573 Result: Up-regulated in Transcription
  misc_feature: MA Experiment 20000573 PARAMETER Experiment Name: At_100uM_ABA_Mutants__P Parameter: Organism Value: A. thaliana
  misc_feature: MA Experiment 20000573 PARAMETER Experiment Name: At_100uM_ABA_Mutants__P Parameter: Plant Line Value: CS22 vs. Ler wt
  misc_feature: MA Experiment 20000573 PARAMETER Experiment Name: At_100uM_ABA_Mutants__P Parameter: Timepoint (hr) Value: N/A
  misc_feature: MA Experiment 20000573 PARAMETER Experiment Name: At_100uM_ABA_Mutants__P Parameter: Tissue Value: Whole Plant
  misc_feature: MA Experiment 20000573 PARAMETER Experiment Name: At_100uM_ABA_Mutants__P Parameter: Treatment Value: None
  misc_feature: MA Experiment ID: 20000575 Result: Down-regulated in Transcription
  misc_feature: MA Experiment 20000575 PARAMETER Experiment Name: At_100uM_ABA_Mutants__P Parameter: Organism Value: A. thaliana
  misc_feature: MA Experiment 20000575 PARAMETER Experiment Name: At_100uM_ABA_Mutants__P Parameter: Plant Line Value: CS22
  misc_feature: MA Experiment 20000575 PARAMETER Experiment Name: At_100uM_ABA_Mutants__P Parameter: Timepoint (hr) Value: 6
  misc_feature: MA Experiment 20000575 PARAMETER Experiment Name: At_100uM_ABA_Mutants__P Parameter: Tissue Value: Whole Plant
  misc_feature: MA Experiment 20000575 PARAMETER Experiment Name: At_100uM_ABA_Mutants__P Parameter: Treatment Value: 1uM ABA vs. No Treatment
  misc_feature: MA Experiment ID: 20000576 Result: Down-regulated in Transcription
  misc_feature: MA Experiment 20000576 PARAMETER Experiment Name: At_100uM_ABA_Mutants__P Parameter: Organism Value: A. thaliana
  misc_feature: MA Experiment 20000576 PARAMETER Experiment Name: At_100uM_ABA_Mutants__P Parameter: Plant Line Value: CS23
  misc_feature: MA Experiment 20000576 PARAMETER Experiment Name: At_100uM_ABA_Mutants__P Parameter: Timepoint (hr) Value: 6
  misc_feature: MA Experiment 20000576 PARAMETER Experiment Name: At_100uM_ABA_Mutants__P Parameter: Tissue Value: Whole Plant
  misc_feature: MA Experiment 20000576 PARAMETER Experiment Name: At_100uM_ABA_Mutants__P Parameter: Treatment Value: 1uM ABA vs. No Treatment
  misc_feature: MA Experiment ID: 20000709 Result: Down-regulated in Transcription
  misc_feature: MA Experiment 20000709 PARAMETER Experiment Name: At_15mM_NH4NO3_L-to-H_P Parameter: Age (hr) Value: 14
  misc_feature: MA Experiment 20000709 PARAMETER Experiment Name: At_15mM_NH4NO3_L-to-H_P Parameter: Organism Value: A. thaliana
  misc_feature: MA Experiment 20000709 PARAMETER Experiment Name: At_15mM_NH4NO3_L-to-H_P Parameter: Plant Line Value: WS
  misc_feature: MA Experiment 20000709 PARAMETER Experiment Name: At_15mM_NH4NO3_L-to-H_P Parameter: Timepoint (hr) Value: 4
  misc_feature: MA Experiment 20000709 PARAMETER Experiment Name: At_15mM_NH4NO3_L-to-H_P Parameter: Tissue Value: Aerial
  misc_feature: MA Experiment 20000709 PARAMETER Experiment Name: At_15mM_NH4NO3_L-to-H_P Parameter: Treatment Value: 15mM NH4NO3 vs. 30mM Mannitol
  misc_feature: MA Experiment ID: 20000794 Result: Down-regulated in Transcription
  misc_feature: MA Experiment 20000794 PARAMETER Experiment Name: At_Petals_P Parameter: Age (day) Value: 23-25 days
  misc_feature: MA Experiment 20000794 PARAMETER Experiment Name: At_Petals_P Parameter: Plant Line Value: WS
  misc_feature: MA Experiment 20000794 PARAMETER Experiment Name: At_Petals_P Parameter: Tissue Value: Petals vs. Whole plant
  misc_feature: MA Experiment ID: 20001248 Result: Down-regulated in Transcription
  misc_feature: MA Experiment 20001248 PARAMETER Experiment Name: At_Far-red-induction_P Parameter: Age (day) Value: 7
  misc_feature: MA Experiment 20001248 PARAMETER Experiment Name: At_Far-red-induction_P Parameter: Light Value: Far-red vs. White
  misc_feature: MA Experiment 20001248 PARAMETER Experiment Name: At_Far-red-induction_P Parameter: Organism Value: A. thaliana
  misc_feature: MA Experiment 20001248 PARAMETER Experiment Name: At_Far-red-induction_P Parameter: Plant Line Value: Columbia
  misc_feature: MA Experiment 20001248 PARAMETER Experiment Name: At_Far-red-induction_P Parameter: Timepoint (hr) Value: 4
  misc_feature: MA Experiment 20001248 PARAMETER Experiment Name: At_Far-red-induction_P Parameter: Tissue Value: Whole Plant
  misc_feature: MA Experiment ID: 20001450 Result: Down-regulated in Transcription
  misc_feature: MA Experiment 20001450 PARAMETER Experiment Name: At_Far-red-induction_P Parameter: Age (day) Value: 7
  misc_feature: MA Experiment 20001450 PARAMETER Experiment Name: At_Far-red-induction_P Parameter: Light Value: Far-red vs. White
  misc_feature: MA Experiment 20001450 PARAMETER Experiment Name: At_Far-red-induction_P Parameter: Organism Value: A. thaliana
  misc_feature: MA Experiment 20001450 PARAMETER Experiment Name: At_Far-red-induction_P Parameter: Plant Line Value: Columbia
  misc_feature: MA Experiment 20001450 PARAMETER Experiment Name: At_Far-red-induction_P Parameter: Timepoint (hr) Value: 8
  misc_feature: MA Experiment 20001450 PARAMETER Experiment Name: At_Far-red-induction_P Parameter: Tissue Value: Whole Plant
  misc_feature: MA Experiment ID: 20001451 Result: Down-regulated in Transcription
  misc_feature: MA Experiment 20001451 PARAMETER Experiment Name: At_Far-red-induction_P Parameter: Age (day) Value: 7
  misc_feature: MA Experiment 20001451 PARAMETER Experiment Name: At_Far-red-induction_P Parameter: Light Value: Far-red vs. White
  misc_feature: MA Experiment 20001451 PARAMETER Experiment Name: At_Far-red-induction_P Parameter: Organism Value: A. thaliana
  misc_feature: MA Experiment 20001451 PARAMETER Experiment Name: At_Far-red-induction_P Parameter: Plant Line Value: Columbia
  misc_feature: MA Experiment 20001451 PARAMETER Experiment Name: At_Far-red-induction_P Parameter: Timepoint (hr) Value: 24
  misc_feature: MA Experiment 20001451 PARAMETER Experiment Name: At_Far-red-induction_P Parameter: Tissue Value: Whole Plant
  misc_feature: MA Experiment ID: 20001554 Result: Down-regulated in Transcription
  misc_feature: MA Experiment 20001554 PARAMETER Experiment Name: At_Drought_Soil_Dry_P Parameter: Age (day) Value: 21
  misc_feature: MA Experiment 20001554 PARAMETER Experiment Name: At_Drought_Soil_Dry_P Parameter: Organism Value: A. thaliana
  misc_feature: MA Experiment 20001554 PARAMETER Experiment Name: At_Drought_Soil_Dry_P Parameter: Plant Line Value: WS
  misc_feature: MA Experiment 20001554 PARAMETER Experiment Name: At_Drought_Soil_Dry_P Parameter: Post Timepoint (hr) Value: None
  misc_feature: MA Experiment 20001554 PARAMETER Experiment Name: At_Drought_Soil_Dry_P Parameter: Post-Treatment Value: None
  misc_feature: MA Experiment 20001554 PARAMETER Experiment Name: At_Drought_Soil_Dry_P Parameter: Timepoint (day) Value: 7
  misc_feature: MA Experiment 20001554 PARAMETER Experiment Name: At_Drought_Soil_Dry_P Parameter: Treatment Value: Drought vs. No Drought
  misc_feature: MA Experiment ID: 20001555 Result: Down-regulated in Transcription
  misc_feature: MA Experiment 20001555 PARAMETER Experiment Name: At_Drought_Soil_Dry_P Parameter: Age (day) Value: 24
  misc_feature: MA Experiment 20001555 PARAMETER Experiment Name: At_Drought_Soil_Dry_P Parameter: Organism Value: A. thaliana
  misc_feature: MA Experiment 20001555 PARAMETER Experiment Name: At_Drought_Soil_Dry_P Parameter: Plant Line Value: WS
  misc_feature: MA Experiment 20001555 PARAMETER Experiment Name: At_Drought_Soil_Dry_P Parameter: Post Timepoint (hr) Value: None
  misc_feature: MA Experiment 20001555 PARAMETER Experiment Name: At_Drought_Soil_Dry_P Parameter: Post-Treatment Value: None
  misc_feature: MA Experiment 20001555 PARAMETER Experiment Name: At_Drought_Soil_Dry_P Parameter: Timepoint (day) Value: 10
  misc_feature: MA Experiment 20001555 PARAMETER Experiment Name: At_Drought_Soil_Dry_P Parameter: Treatment Value: Drought vs. No Drought
  misc_feature: MA Experiment ID: 20001556 Result: Down-regulated in Transcription
  misc_feature: MA Experiment 20001556 PARAMETER Experiment Name: At_Drought_Soil_Dry_P Parameter: Age (day) Value: 26
  misc_feature: MA Experiment 20001556 PARAMETER Experiment Name: At_Drought_Soil_Dry_P Parameter: Organism Value: A. thaliana
  misc_feature: MA Experiment 20001556 PARAMETER Experiment Name: At_Drought_Soil_Dry_P Parameter: Plant Line Value: WS
  misc_feature: MA Experiment 20001556 PARAMETER Experiment Name: At_Drought_Soil_Dry_P Parameter: Post Timepoint (hr) Value: None
  misc_feature: MA Experiment 20001556 PARAMETER Experiment Name: At_Drought_Soil_Dry_P Parameter: Post-Treatment Value: None
  misc_feature: MA Experiment 20001556 PARAMETER Experiment Name: At_Drought_Soil_Dry_P Parameter: Timepoint (day) Value: 12
  misc_feature: MA Experiment 20001556 PARAMETER Experiment Name: At_Drought_Soil_Dry_P Parameter: Treatment Value: Drought vs. No Drought
  misc_feature: MA Experiment ID: 20001558 Result: Down-regulated in Transcription
  misc_feature: MA Experiment 20001558 PARAMETER Experiment Name: At_Drought_Soil_Dry_P Parameter: Age (day) Value: 27
  misc_feature: MA Experiment 20001558 PARAMETER Experiment Name: At_Drought_Soil_Dry_P Parameter: Organism Value: A. thaliana
  misc_feature: MA Experiment 20001558 PARAMETER Experiment Name: At_Drought_Soil_Dry_P Parameter: Plant Line Value: WS
  misc_feature: MA Experiment 20001558 PARAMETER Experiment Name: At_Drought_Soil_Dry_P Parameter: Post Timepoint (hr) Value: 6
  misc_feature: MA Experiment 20001558 PARAMETER Experiment Name: At_Drought_Soil_Dry_P Parameter: Post-Treatment Value: Re-Water vs. No Drought
  misc_feature: MA Experiment 20001558 PARAMETER Experiment Name: At_Drought_Soil_Dry_P Parameter: Timepoint (day) Value: 13
  misc_feature: MA Experiment 20001558 PARAMETER Experiment Name: At_Drought_Soil_Dry_P Parameter: Treatment Value: Drought vs. No Drought
  misc_feature: MA Experiment ID: 20001560 Result: Down-regulated in Transcription
  misc_feature: MA Experiment 20001560 PARAMETER Experiment Name: At_Drought_Soil_Dry_P Parameter: Age (day) Value: 28
  misc_feature: MA Experiment 20001560 PARAMETER Experiment Name: At_Drought_Soil_Dry_P Parameter: Organism Value: A. thaliana
  misc_feature: MA Experiment 20001560 PARAMETER Experiment Name: At_Drought_Soil_Dry_P Parameter: Plant Line Value: WS
  misc_feature: MA Experiment 20001560 PARAMETER Experiment Name: At_Drought_Soil_Dry_P Parameter: Post Timepoint (hr) Value: None
  misc_feature: MA Experiment 20001560 PARAMETER Experiment Name: At_Drought_Soil_Dry_P Parameter: Post-Treatment Value: None
  misc_feature: MA Experiment 20001560 PARAMETER Experiment Name: At_Drought_Soil_Dry_P Parameter: Timepoint (day) Value: 14
  misc_feature: MA Experiment 20001560 PARAMETER Experiment Name: At_Drought_Soil_Dry_P Parameter: Treatment Value: Drought vs. No Drought
  misc_feature: MA Experiment ID: 20001755 Result: Down-regulated in Transcription
  misc_feature: MA Experiment 20001755 PARAMETER Experiment Name: At_50mM_NH4NO3_L-to-H_P Parameter: Timepoint (hr) Value: 2
  misc_feature: MA Experiment 20001755 PARAMETER Experiment Name: At_50mM_NH4NO3_L-to-H_P Parameter: Tissue Value: Leaf
  misc_feature: MA Experiment 20001755 PARAMETER Experiment Name: At_50mM_NH4NO3_L-to-H_P Parameter: Treatment Value: 50mM NH4NO3 vs 100mM Mannitol
  misc_feature: MA Experiment ID: 20001771 Result: Down-regulated in Transcription
  misc_feature: MA Experiment 20001771 PARAMETER Experiment Name: At_Far-red-enriched-adult_P Parameter: Age (day) Value: 28
  misc_feature: MA Experiment 20001771 PARAMETER Experiment Name: At_Far-red-enriched-adult_P Parameter: Light Value: Far-red enriched vs. White
  misc_feature: MA Experiment 20001771 PARAMETER Experiment Name: At_Far-red-enriched-adult_P Parameter: Organism Value: A. thaliana
  misc_feature: MA Experiment 20001771 PARAMETER Experiment Name: At_Far-red-enriched-adult_P Parameter: Plant Line Value: Columbia
  misc_feature: MA Experiment 20001771 PARAMETER Experiment Name: At_Far-red-enriched-adult_P Parameter: Timepoint (hr) Value: 16
  misc_feature: MA Experiment 20001771 PARAMETER Experiment Name: At_Far-red-enriched-adult_P Parameter: Tissue Value: Aerial
  misc_feature: MA Experiment ID: 20001773 Result: Up-regulated in Transcription
  misc_feature: MA Experiment 20001773 PARAMETER Experiment Name: At_Far-red-enriched-adult_P Parameter: Age (day) Value: 30
  misc_feature: MA Experiment 20001773 PARAMETER Experiment Name: At_Far-red-enriched-adult_P Parameter: Light Value: Far-red enriched vs. White
  misc_feature: MA Experiment 20001773 PARAMETER Experiment Name: At_Far-red-enriched-adult_P Parameter: Organism Value: A. thaliana
  misc_feature: MA Experiment 20001773 PARAMETER Experiment Name: At_Far-red-enriched-adult_P Parameter: Plant Line Value: Columbia
  misc_feature: MA Experiment 20001773 PARAMETER Experiment Name: At_Far-red-enriched-adult_P Parameter: Timepoint (hr) Value: 48
  misc_feature: MA Experiment 20001773 PARAMETER Experiment Name: At_Far-red-enriched-adult_P Parameter: Tissue Value: Aerial
  misc_feature: MA Experiment ID: 20001774 Result: Up-regulated in Transcription
  misc_feature: MA Experiment 20001774 PARAMETER Experiment Name: At_Far-red-enriched-adult_P Parameter: Age (day) Value: 31
  misc_feature: MA Experiment 20001774 PARAMETER Experiment Name: At_Far-red-enriched-adult_P Parameter: Light Value: Far-red enriched vs. White
  misc_feature: MA Experiment 20001774 PARAMETER Experiment Name: At_Far-red-enriched-adult_P Parameter: Organism Value: A. thaliana
  misc_feature: MA Experiment 20001774 PARAMETER Experiment Name: At_Far-red-enriched-adult_P Parameter: Plant Line Value: Columbia
  misc_feature: MA Experiment 20001774 PARAMETER Experiment Name: At_Far-red-enriched-adult_P Parameter: Timepoint (hr) Value: 72
  misc_feature: MA Experiment 20001774 PARAMETER Experiment Name: At_Far-red-enriched-adult_P Parameter: Tissue Value: Aerial
  misc_feature: MA Experiment ID: 20001904 Result: Down-regulated in Transcription
  misc_feature: MA Experiment 20001904 PARAMETER Experiment Name: At_Drought_Reproduction_P Parameter: Age (day) Value: 37
  misc_feature: MA Experiment 20001904 PARAMETER Experiment Name: At_Drought_Reproduction_P Parameter: Organism Value: A. thaliana
  misc_feature: MA Experiment 20001904 PARAMETER Experiment Name: At_Drought_Reproduction_P Parameter: Plant Line Value: WS
  misc_feature: MA Experiment 20001904 PARAMETER Experiment Name: At_Drought_Reproduction_P Parameter: Timepoint (day) Value: 7
  misc_feature: MA Experiment 20001904 PARAMETER Experiment Name: At_Drought_Reproduction_P Parameter: Tissue Value: Rosettes
  misc_feature: MA Experiment 20001904 PARAMETER Experiment Name: At_Drought_Reproduction_P Parameter: Treatment Value: Drought vs. No Drought
  misc_feature: MA Experiment ID: 20001905 Result: Down-regulated in Transcription
  misc_feature: MA Experiment 20001905 PARAMETER Experiment Name: At_Drought_Reproduction_P Parameter: Age (day) Value: 40
  misc_feature: MA Experiment 20001905 PARAMETER Experiment Name: At_Drought_Reproduction_P Parameter: Organism Value: A. thaliana
  misc_feature: MA Experiment 20001905 PARAMETER Experiment Name: At_Drought_Reproduction_P Parameter: Plant Line Value: WS
  misc_feature: MA Experiment 20001905 PARAMETER Experiment Name: At_Drought_Reproduction_P Parameter: Timepoint (day) Value: 10
  misc_feature: MA Experiment 20001905 PARAMETER Experiment Name: At_Drought_Reproduction_P Parameter: Tissue Value: Rosettes
  misc_feature: MA Experiment 20001905 PARAMETER Experiment Name: At_Drought_Reproduction_P Parameter: Treatment Value: Drought vs. No Drought

SEQ ID NO: 33203 - protein, 466 aa, Arabidopsis thaliana; identical to SEQ ID NO: 29613
  peptide (1)..(466): Ceres Seq. ID no. 13490269
  misc_feature (123)..(441): Pfam Name: Aminotransferase class I and II Pfam Description: Aminotransferase class I and II
  misc_feature (42)..(445): Homolog of NCBI NO: 15239521 NR Description: aminotransferase, putative [Arabidopsis thaliana]
  misc_feature (37)..(452): Homolog of NCBI NO: 15236533 NR Description: aminotransferase family [Arabidopsis thaliana]
  misc_feature (37)..(453): Homolog of NCBI NO: 22328891 NR Description: aminotransferase family [Arabidopsis thaliana]
  misc_feature (28)..(386): Homolog of NCBI NO: 15235287 NR Description: aminotransferase, putative [Arabidopsis thaliana]
  misc_feature (31)..(449): Homolog of NCBI NO: 15225387 NR Description: aminotransferase, putative [Arabidopsis thaliana]
  misc_feature (31)..(449): Homolog of NCBI NO: 11527943 NR Description: ROOTY/SUPERROOT1 [Arabidopsis thaliana]
  misc_feature (31)..(449): Homolog of NCBI NO: 15809874 NR Description: At2g20610/F23N11.7 [Arabidopsis thaliana]
  misc_feature (17)..(449): Homolog of NCBI NO: 11527941 NR Description: ROOTY/SUPERROOT1 [Arabidopsis thaliana]
  misc_feature (22)..(466): Homolog of NCBI NO: 21553462 NR Description: putative tyrosine aminotransferase [Arabidopsis
  misc_feature (22)..(466): Homolog of NCBI NO: 15224631 NR Description: putative tyrosine aminotransferase

SEQ ID NO: 33204 - protein, 445 aa, Arabidopsis thaliana; identical to SEQ ID NO: 29614
  peptide (1)..(445): Ceres Seq. ID no. 13490270
  misc_feature (102)..(420): Pfam Name: Aminotransferase class I and II Pfam Description: Aminotransferase class I and II
  misc_feature (21)..(424): Homolog of NCBI NO: 15239521 NR Description: aminotransferase, putative [Arabidopsis thaliana]
  misc_feature (16)..(431): Homolog of NCBI NO: 15236533 NR Description: aminotransferase family [Arabidopsis thaliana]
  misc_feature (16)..(432): Homolog of NCBI NO: 22328891 NR Description: aminotransferase family [Arabidopsis thaliana]
  misc_feature (7)..(365): Homolog of NCBI NO: 15235287 NR Description: aminotransferase, putative [Arabidopsis thaliana]
  misc_feature (10)..(428): Homolog of NCBI NO: 15225387 NR Description: aminotransferase, putative [Arabidopsis thaliana]
  misc_feature (10)..(428): Homolog of NCBI NO: 11527943 NR Description: ROOTY/SUPERROOT1 [Arabidopsis thaliana]
  misc_feature (10)..(428): Homolog of NCBI NO: 15809874 NR Description: At2g20610/F23N11.7 [Arabidopsis thaliana]
  misc_feature (1)..(428): Homolog of NCBI NO: 11527941 NR Description: ROOTY/SUPERROOT1 [Arabidopsis thaliana]
  misc_feature (1)..(445): Homolog of NCBI NO: 21553462 NR Description: putative tyrosine aminotransferase [Arabidopsis
  misc_feature (1)..(445): Homolog of NCBI NO: 15224631 NR Description: putative tyrosine aminotransferase

SEQ ID NO: 33205 - protein, 407 aa, Arabidopsis thaliana; identical to SEQ ID NO: 29615
  peptide (1)..(407): Ceres Seq. ID no. 13490271
  misc_feature (64)..(382): Pfam Name: Aminotransferase class I and II Pfam Description: Aminotransferase class I and II
  misc_feature (1)..(386): Homolog of NCBI NO: 15239521 NR Description: aminotransferase, putative [Arabidopsis thaliana]
  misc_feature (1)..(393): Homolog of NCBI NO: 15236533 NR Description: aminotransferase family [Arabidopsis thaliana]
  misc_feature (1)..(394): Homolog of NCBI NO: 22328891 NR Description: aminotransferase family [Arabidopsis thaliana]
  misc_feature (1)..(327): Homolog of NCBI NO: 15235287 NR Description: aminotransferase, putative [Arabidopsis thaliana]
  misc_feature (1)..(390): Homolog of NCBI NO: 15225387 NR Description: aminotransferase, putative [Arabidopsis thaliana]
  misc_feature (1)..(390): Homolog of NCBI NO: 11527943 NR Description: ROOTY/SUPERROOT1 [Arabidopsis thaliana]
  misc_feature (1)..(390): Homolog of NCBI NO: 15809874 NR Description: At2g20610/F23N11.7 [Arabidopsis thaliana]
  misc_feature (1)..(390): Homolog of NCBI NO: 11527941 NR Description: ROOTY/SUPERROOT1 [Arabidopsis thaliana]
  misc_feature (1)..(407): Homolog of NCBI NO: 21553462 NR Description: putative tyrosine aminotransferase [Arabidopsis
  misc_feature (1)..(407): Homolog of NCBI NO: 15224631 NR Description: putative tyrosine aminotransferase

SEQ ID NO: 33206 - DNA, 1032 bp, Arabidopsis thaliana; identical to SEQ ID NO: 29616
  misc_feature (1)..(1032): Ceres Seq. ID no. 13490453
  misc_feature: MA Experiment ID: 108488 Result: Down-regulated in Transcription
  misc_feature: MA Experiment ID: 108489 Result: Up-regulated in Transcription
  misc_feature: MA Experiment ID: 20000089 Result: Down-regulated in Transcription
  misc_feature: MA Experiment ID: 20000090 Result: Down-regulated in Transcription
  misc_feature: MA Experiment ID: 20000111 Result: Up-regulated in Transcription
  misc_feature: MA Experiment 20000111 PARAMETER Experiment Name: At_42deg_Heat_cDNA_P Parameter: Temperature (deg C) Value: 42 vs. 22
  misc_feature: MA Experiment 20000111 PARAMETER Experiment Name: At_42deg_Heat_cDNA_P Parameter: Timepoint (hr) Value: 6
  misc_feature: MA Experiment 20000111 PARAMETER Experiment Name: At_42deg_Heat_cDNA_P Parameter: Tissue Value: Aerial
  misc_feature: MA Experiment ID: 20001905 Result: Up-regulated in Transcription
  misc_feature: MA Experiment 20001905 PARAMETER Experiment Name: At_Drought_Reproduction_P Parameter: Age (day) Value: 40
  misc_feature: MA Experiment 20001905 PARAMETER Experiment Name: At_Drought_Reproduction_P Parameter: Organism Value: A. thaliana
  misc_feature: MA Experiment 20001905 PARAMETER Experiment Name: At_Drought_Reproduction_P Parameter: Plant Line Value: WS
  misc_feature: MA Experiment 20001905 PARAMETER Experiment Name: At_Drought_Reproduction_P Parameter: Timepoint (day) Value: 10
  misc_feature: MA Experiment 20001905 PARAMETER Experiment Name: At_Drought_Reproduction_P Parameter: Tissue Value: Rosettes
  misc_feature: MA Experiment 20001905 PARAMETER Experiment Name: At_Drought_Reproduction_P Parameter: Treatment Value: Drought vs. No Drought

SEQ ID NO: 33207 - protein, 198 aa, Arabidopsis thaliana; identical to SEQ ID NO: 29617
  peptide (1)..(198): Ceres Seq. ID no. 13490454
  misc_feature (59)..(171): Homolog of NCBI NO: 22773244 NR Description: Hypothetical protein [Oryza sativa (japonica
  misc_feature (32)..(197): Homolog of NCBI NO: 34394452 NR Description: hypothetical protein [Oryza sativa (japonica
  misc_feature (32)..(171): Homolog of NCBI NO: 15233585 NR Description: expressed protein [Arabidopsis thaliana]
  misc_feature (32)..(198): Homolog of NCBI NO: 11994285 NR Description: emb|CAB10262.1~gene_id:F16J14.9~similar to
  misc_feature (1)..(198): Homolog of NCBI NO: 21553463 NR Description: unknown [Arabidopsis thaliana]
  misc_feature (1)..(198): Homolog of NCBI NO: 18403425 NR Description: expressed protein [Arabidopsis thaliana]

SEQ ID NO: 33208 - protein, 167 aa, Arabidopsis thaliana; identical to SEQ ID NO: 29618
  peptide (1)..(167): Ceres Seq. ID no. 13490455
  misc_feature (28)..(140): Homolog of NCBI NO: 22773244 NR Description: Hypothetical protein [Oryza sativa (japonica
  misc_feature (1)..(166): Homolog of NCBI NO: 34394452 NR Description: hypothetical protein [Oryza sativa (japonica
  misc_feature (1)..(140): Homolog of NCBI NO: 15233585 NR Description: expressed protein [Arabidopsis thaliana]
  misc_feature (1)..(167): Homolog of NCBI NO: 11994285 NR Description: emb|CAB10262.1~gene_id:F16J14.9~similar to
  misc_feature (1)..(167): Homolog of NCBI NO: 21553463 NR Description: unknown [Arabidopsis thaliana]
  misc_feature (1)..(167): Homolog of NCBI NO: 18403425 NR Description: expressed protein [Arabidopsis thaliana]

SEQ ID NO: 33209 - DNA, 1281 bp, Arabidopsis thaliana; identical to SEQ ID NO: 29619
  misc_feature (1)..(1281): Ceres Seq. ID no. 13487403
  misc_feature: MA Experiment ID: 108434 Result: Down-regulated in Transcription
  misc_feature: MA Experiment 108434 PARAMETER Experiment Name: At_Root_Tips_cDNA_P Parameter: Tissue Value: Root Tips
  misc_feature: MA Experiment ID: 108572 Result: Up-regulated in Transcription
  misc_feature: MA Experiment 108572 PARAMETER Experiment Name: At_Drought_cDNA_P Parameter: Timepoint (hr) Value: 1
  misc_feature: MA Experiment 108572 PARAMETER Experiment Name: At_Drought_cDNA_P Parameter: Tissue Value: Aerial
  misc_feature: MA Experiment 108572 PARAMETER Experiment Name: At_Drought_cDNA_P Parameter: Treatment Value: Drought vs. No Drought
  misc_feature: MA Experiment ID: 108573 Result: Up-regulated in Transcription
  misc_feature: MA Experiment 108573 PARAMETER Experiment Name: At_Drought_cDNA_P Parameter: Timepoint (hr) Value: 6
  misc_feature: MA Experiment 108573 PARAMETER Experiment Name: At_Drought_cDNA_P Parameter: Tissue Value: Aerial
  misc_feature: MA Experiment 108573 PARAMETER Experiment Name: At_Drought_cDNA_P Parameter: Treatment Value: Drought vs. No Drought
  misc_feature: MA Experiment ID: 108585 Result: Up-regulated in Transcription
  misc_feature: MA Experiment 108585 PARAMETER Experiment Name: At_5mM_NaNP_cDNA_P Parameter: Timepoint (hr) Value: 6
  misc_feature: MA Experiment 108585 PARAMETER Experiment Name: At_5mM_NaNP_cDNA_P Parameter: Tissue Value: Aerial
  misc_feature: MA Experiment 108585 PARAMETER Experiment Name: At_5mM_NaNP_cDNA_P Parameter: Treatment Value: null
  misc_feature: MA Experiment ID: 20000111 Result: Up-regulated in Transcription
  misc_feature: MA Experiment 20000111 PARAMETER Experiment Name: At_42deg_Heat_cDNA_P Parameter: Temperature (deg C) Value: 42 vs. 22
  misc_feature: MA Experiment 20000111 PARAMETER Experiment Name: At_42deg_Heat_cDNA_P Parameter: Timepoint (hr) Value: 6
  misc_feature: MA Experiment 20000111 PARAMETER Experiment Name: At_42deg_Heat_cDNA_P Parameter: Tissue Value: Aerial
  misc_feature: MA Experiment ID: 20000113 Result: Up-regulated in Transcription
  misc_feature: MA Experiment 20000113 PARAMETER Experiment Name: At_42deg_Heat_cDNA_P Parameter: Temperature (deg C) Value: 42 vs. 22
  misc_feature: MA Experiment 20000113 PARAMETER Experiment Name: At_42deg_Heat_cDNA_P Parameter: Timepoint (hr) Value: 8
  misc_feature: MA Experiment 20000113 PARAMETER Experiment Name: At_42deg_Heat_cDNA_P Parameter: Tissue Value: Aerial
  misc_feature: MA Experiment ID: 20000173 Result: Up-regulated in Transcription
  misc_feature: MA Experiment 20000173 PARAMETER Experiment Name: At_42deg_Heat_P Parameter: Age (day) Value: 14
  misc_feature: MA Experiment 20000173 PARAMETER Experiment Name: At_42deg_Heat_P Parameter: Organism Value: A. thaliana
  misc_feature: MA Experiment 20000173 PARAMETER Experiment Name: At_42deg_Heat_P Parameter: Plant Line Value: WS
  misc_feature: MA Experiment 20000173 PARAMETER Experiment Name: At_42deg_Heat_P Parameter: Temperature (deg C) Value: 42 vs. 22
  misc_feature: MA Experiment 20000173 PARAMETER Experiment Name: At_42deg_Heat_P Parameter: Timepoint (hr) Value: 6
  misc_feature: MA Experiment 20000173 PARAMETER Experiment Name: At_42deg_Heat_P Parameter: Tissue Value: Aerial
  misc_feature: MA Experiment ID: 20000179 Result: Up-regulated in Transcription
  misc_feature: MA Experiment 20000179 PARAMETER Experiment Name: At_Germinating_Seeds_P Parameter: Age (hr) Value: 6 vs. 0
  misc_feature: MA Experiment 20000179 PARAMETER Experiment Name: At_Germinating_Seeds_P Parameter: Tissue Value: Germinating Seeds
  misc_feature: MA Experiment ID: 20000227 Result: Down-regulated in Transcription
  misc_feature: MA Experiment 20000227 PARAMETER Experiment Name: At_Root-Tips-vs-Tops_P Parameter: Tissue Value: Root Tips vs. Root Tops
  misc_feature: MA Experiment ID: 20001451 Result: Up-regulated in Transcription
  misc_feature: MA Experiment 20001451 PARAMETER Experiment Name: At_Far-red-induction_P Parameter: Age (day) Value: 7
  misc_feature: MA Experiment 20001451 PARAMETER Experiment Name: At_Far-red-induction_P Parameter: Light Value: Far-red vs. White
  misc_feature: MA Experiment 20001451 PARAMETER Experiment Name: At_Far-red-induction_P Parameter: Organism Value: A. thaliana
  misc_feature: MA Experiment 20001451 PARAMETER Experiment Name: At_Far-red-induction_P Parameter: Plant Line Value: Columbia
  misc_feature: MA Experiment 20001451 PARAMETER Experiment Name: At_Far-red-induction_P Parameter: Timepoint (hr) Value: 24
  misc_feature: MA Experiment 20001451 PARAMETER Experiment Name: At_Far-red-induction_P Parameter: Tissue Value: Whole Plant
  misc_feature: MA Experiment ID: 20001905 Result: Up-regulated in Transcription
  misc_feature: MA Experiment 20001905 PARAMETER Experiment Name: At_Drought_Reproduction_P Parameter: Age (day) Value: 40
  misc_feature: MA Experiment 20001905 PARAMETER Experiment Name: At_Drought_Reproduction_P Parameter: Organism Value: A. thaliana
  misc_feature: MA Experiment 20001905 PARAMETER Experiment Name: At_Drought_Reproduction_P Parameter: Plant Line Value: WS
  misc_feature: MA Experiment 20001905 PARAMETER Experiment Name: At_Drought_Reproduction_P Parameter: Timepoint (day) Value: 10
  misc_feature: MA Experiment 20001905 PARAMETER Experiment Name: At_Drought_Reproduction_P Parameter: Tissue Value: Rosettes
  misc_feature: MA Experiment 20001905 PARAMETER Experiment Name: At_Drought_Reproduction_P Parameter: Treatment Value: Drought vs. No Drought
  misc_feature: MA Experiment ID: 20001911 Result: Up-regulated in Transcription
  misc_feature: MA Experiment 20001911 PARAMETER Experiment Name: At_Drought_Reproduction_P Parameter: Age (day) Value: 40
  misc_feature: MA Experiment 20001911 PARAMETER Experiment Name: At_Drought_Reproduction_P Parameter: Organism Value: A. thaliana
  misc_feature: MA Experiment 20001911 PARAMETER Experiment Name: At_Drought_Reproduction_P Parameter: Plant Line Value: WS
  misc_feature: MA Experiment 20001911 PARAMETER Experiment Name: At_Drought_Reproduction_P Parameter: Timepoint (day) Value: 10
  misc_feature: MA Experiment 20001911 PARAMETER Experiment Name: At_Drought_Reproduction_P Parameter: Tissue Value: Flowers
  misc_feature: MA Experiment 20001911 PARAMETER Experiment Name: At_Drought_Reproduction_P Parameter: Treatment Value: Drought vs. No Drought

SEQ ID NO: 33210 - protein, 225 aa, Arabidopsis thaliana; identical to SEQ ID NO: 29620
  peptide (1)..(225): Ceres Seq. ID no. 13487404
  misc_feature (25)..(89): Pfam Name: AP2 domain Pfam Description: AP2 domain
  misc_feature (22)..(205): Homolog of NCBI NO: 20340233 NR Description: ethylene responsive element binding factor 4-like
  misc_feature (23)..(92): Homolog of NCBI NO: 7489114 NR Description: DNA binding protein EREBP-3 - common tobacco
  misc_feature (7)..(93): Homolog of NCBI NO: 38345793 NR Description: OSJNBa0085I10.10 [Oryza sativa (japonica
  misc_feature (20)..(89): Homolog of NCBI NO: 8809573 NR Description: ethylene-responsive element binding factor
  misc_feature (20)..(106): Homolog of NCBI NO: 4099914 NR Description: ethylene-responsive element binding protein
  misc_feature (14)..(106): Homolog of NCBI NO: 4099921 NR Description: EREBP-3 homolog [Stylosanthes hamata]
  misc_feature (105)..(225): Homolog of NCBI NO: 15231110 NR Description: ethylene responsive element binding factor 7
  misc_feature (1)..(175): Homolog of NCBI NO: 15231110 NR Description: ethylene responsive element binding factor 7
  misc_feature (1)..(225): Homolog of NCBI NO: 4587373 NR Description: ethylene responsive element binding factor
  misc_feature (1)..(225): Homolog of NCBI NO: 15223609 NR Description: ethylene responsive element binding factor 3

SEQ ID NO: 33211 - protein, 114 aa, Arabidopsis thaliana; identical to SEQ ID NO: 29621
  peptide (1)..(114): Ceres Seq. ID no. 13487405
  misc_feature (1)..(78): Homolog of NCBI NO: 22655200 NR Description: putative Ap2 domain protein [Arabidopsis thaliana]
  misc_feature (1)..(78): Homolog of NCBI NO: 15236595 NR Description: AP2 domain transcription factor, putative
  misc_feature (1)..(55): Homolog of NCBI NO: 15240610 NR Description: putative protein; protein id: At5g50080.1
  misc_feature (1)..(48): Homolog of NCBI NO: 6560760 NR Description: F3M18.21 [Arabidopsis thaliana]
  misc_feature (1)..(111): Homolog of NCBI NO: 34904146 NR Description: unnamed protein product [Oryza sativa (japonica
  misc_feature (1)..(94): Homolog of NCBI NO: 20340233 NR Description: ethylene responsive element binding factor 4-like
  misc_feature (1)..(114): Homolog of NCBI NO: 15231110 NR Description: ethylene responsive element binding factor 7
  misc_feature (1)..(64): Homolog of NCBI NO: 15231110 NR Description: ethylene responsive element binding factor 7
  misc_feature (1)..(114): Homolog of NCBI NO: 4587373 NR Description: ethylene responsive element binding factor
  misc_feature (1)..(114): Homolog of NCBI NO: 15223609 NR Description: ethylene responsive element binding factor 3

SEQ ID NO: 33212 - DNA, 1635 bp, Arabidopsis thaliana; identical to SEQ ID NO: 29622
  misc_feature (1)..(1635): Ceres Seq. ID no. 13497565
  misc_feature: MA Experiment ID: 108576 Result: Up-regulated in Transcription
  misc_feature: MA Experiment 108576 PARAMETER Experiment Name: At_42deg_Heat_cDNA_P Parameter: Temperature (deg C) Value: 42 vs. 22
  misc_feature: MA Experiment 108576 PARAMETER Experiment Name: At_42deg_Heat_cDNA_P Parameter: Timepoint (hr) Value: 1
  misc_feature: MA Experiment 108576 PARAMETER Experiment Name: At_42deg_Heat_cDNA_P Parameter: Tissue Value: Aerial
  misc_feature: MA Experiment ID: 108577 Result: Up-regulated in Transcription
  misc_feature: MA Experiment 108577 PARAMETER Experiment Name: At_42deg_Heat_cDNA_P Parameter: Temperature (deg C) Value: 42 vs. 22
  misc_feature: MA Experiment 108577 PARAMETER Experiment Name: At_42deg_Heat_cDNA_P Parameter: Timepoint (hr) Value: 6
  misc_feature: MA Experiment 108577 PARAMETER Experiment Name: At_42deg_Heat_cDNA_P Parameter: Tissue Value: Aerial
  misc_feature: MA Experiment ID: 20000111 Result: Up-regulated in Transcription
  misc_feature: MA Experiment 20000111 PARAMETER Experiment Name: At_42deg_Heat_cDNA_P Parameter: Temperature (deg C) Value: 42 vs. 22
  misc_feature: MA Experiment 20000111 PARAMETER Experiment Name: At_42deg_Heat_cDNA_P Parameter: Timepoint (hr) Value: 6
  misc_feature: MA Experiment 20000111 PARAMETER Experiment Name: At_42deg_Heat_cDNA_P Parameter: Tissue Value: Aerial
  misc_feature: MA Experiment ID: 20000171 Result: Up-regulated in Transcription
  misc_feature: MA Experiment 20000171 PARAMETER Experiment Name: At_42deg_Heat_P Parameter: Age (day) Value: 14
  misc_feature: MA Experiment 20000171 PARAMETER Experiment Name: At_42deg_Heat_P Parameter: Organism Value: A. thaliana
  misc_feature: MA Experiment 20000171 PARAMETER Experiment Name: At_42deg_Heat_P Parameter: Plant Line Value: WS
  misc_feature: MA Experiment 20000171 PARAMETER Experiment Name: At_42deg_Heat_P Parameter: Temperature (deg C) Value: 42 vs. 22
  misc_feature: MA Experiment 20000171 PARAMETER Experiment Name: At_42deg_Heat_P Parameter: Timepoint (hr) Value: 1
  misc_feature: MA Experiment 20000171 PARAMETER Experiment Name: At_42deg_Heat_P Parameter: Tissue Value: Aerial
  misc_feature: MA Experiment ID: 20000173 Result: Up-regulated in Transcription
  misc_feature: MA Experiment 20000173 PARAMETER Experiment Name: At_42deg_Heat_P Parameter: Age (day) Value: 14
  misc_feature: MA Experiment 20000173 PARAMETER Experiment Name: At_42deg_Heat_P Parameter: Organism Value: A. thaliana
  misc_feature: MA Experiment 20000173 PARAMETER Experiment Name: At_42deg_Heat_P Parameter: Plant Line Value: WS
  misc_feature: MA Experiment 20000173 PARAMETER Experiment Name: At_42deg_Heat_P Parameter: Temperature (deg C) Value: 42 vs. 22
  misc_feature: MA Experiment 20000173 PARAMETER Experiment Name: At_42deg_Heat_P Parameter: Timepoint (hr) Value: 6
  misc_feature: MA Experiment 20000173 PARAMETER Experiment Name: At_42deg_Heat_P Parameter: Tissue Value: Aerial

SEQ ID NO: 33213 - protein, 369 aa, Arabidopsis thaliana; identical to SEQ ID NO: 29623
  peptide (1)..(369): Ceres Seq. ID no. 13497566
  misc_feature (2)..(270): Pfam Name: GTP1/OBG family Pfam Description: GTP1/OBG family
  misc_feature (1)..(368): Homolog of NCBI NO: 26348781 NR Description: unnamed protein product [Mus musculus]
  misc_feature (1)..(368): Homolog of NCBI NO: 346685 NR Description: GTP-binding protein DRG [validated] - mouse
  misc_feature (1)..(368): Homolog of NCBI NO: 1169421 NR Description: Developmentally regulated GTP-binding protein 1
  misc_feature (1)..(368): Homolog of NCBI NO: 18089152 NR Description: developmentally regulated GTP binding protein 1
  misc_feature (1)..(368): Homolog of NCBI NO: 6681225 NR Description: developmentally regulated GTP binding protein 1
  misc_feature (1)..(368): Homolog of NCBI NO: 24586704 NR Description: developmentally regulated GTP binding protein 1
  misc_feature (1)..(368): Homolog of NCBI NO: 4758796 NR Description: developmentally regulated GTP binding protein 1
  misc_feature (1)..(369): Homolog of NCBI NO: 30585289 NR Description: Homo sapiens developmentally regulated GTP
  misc_feature (1)..(369): Homolog of NCBI NO: 33146858 NR Description: putative GTP-binding protein DRG
  misc_feature (1)..(369): Homolog of NCBI NO: 15235111 NR Description: GTP-binding - like protein [Arabidopsis thaliana]

SEQ ID NO: 33214 - protein, 365 aa, Arabidopsis thaliana; identical to SEQ ID NO: 29624
  peptide (1)..(365): Ceres Seq. ID no. 13497567
  misc_feature (1)..(266): Pfam Name: GTP1/OBG family Pfam Description: GTP1/OBG family
  misc_feature (1)..(364): Homolog of NCBI NO: 26348781 NR Description: unnamed protein product [Mus musculus]
  misc_feature (1)..(364): Homolog of NCBI NO: 346685 NR Description: GTP-binding protein DRG [validated] - mouse
  misc_feature (1)..(364): Homolog of NCBI NO: 1169421 NR Description: Developmentally regulated GTP-binding protein 1
  misc_feature (1)..(364): Homolog of NCBI NO: 18089152 NR Description: developmentally regulated GTP binding protein 1
  misc_feature (1)..(364): Homolog of NCBI NO: 6681225 NR Description: developmentally regulated GTP binding protein 1
  misc_feature (1)..(364): Homolog of NCBI NO: 24586704 NR Description: developmentally regulated GTP binding protein 1
  misc_feature (1)..(364): Homolog of NCBI NO: 4758796 NR Description: developmentally regulated GTP binding protein 1
  misc_feature (1)..(365): Homolog of NCBI NO: 30585289 NR Description: Homo sapiens developmentally regulated GTP
  misc_feature (1)..(365): Homolog of NCBI NO: 33146858 NR Description: putative GTP-binding protein DRG
  misc_feature (1)..(365): Homolog of NCBI NO: 15235111 NR Description: GTP-binding - like protein [Arabidopsis thaliana]

SEQ ID NO: 33215 - protein, 355 aa, Arabidopsis thaliana; identical to SEQ ID NO: 29625
  peptide (1)..(355): Ceres Seq. ID no. 13497568
  misc_feature (1)..(256): Pfam Name: GTP1/OBG family Pfam Description: GTP1/OBG family
  misc_feature (1)..(354): Homolog of NCBI NO: 26348781 NR Description: unnamed protein product [Mus musculus]
  misc_feature (1)..(354): Homolog of NCBI NO: 346685 NR Description: GTP-binding protein DRG [validated] - mouse
  misc_feature (1)..(354): Homolog of NCBI NO: 1169421 NR Description: Developmentally regulated GTP-binding protein 1
  misc_feature (1)..(354): Homolog of NCBI NO: 18089152 NR Description: developmentally regulated GTP binding protein 1
  misc_feature (1)..(354): Homolog of NCBI NO: 6681225 NR Description: developmentally regulated GTP binding protein 1
  misc_feature (1)..(354): Homolog of NCBI NO: 24586704 NR Description: developmentally regulated GTP binding protein 1
  misc_feature (1)..(354): Homolog of NCBI NO: 4758796 NR Description: developmentally regulated GTP binding protein 1
  misc_feature (1)..(355): Homolog of NCBI NO: 30585289 NR Description: Homo sapiens developmentally regulated GTP
  misc_feature (1)..(355): Homolog of NCBI NO: 33146858 NR Description: putative GTP-binding protein DRG
  misc_feature (1)..(355): Homolog of NCBI NO: 15235111 NR Description: GTP-binding - like protein [Arabidopsis thaliana]

SEQ ID NO: 33216 - DNA, 1518 bp, Arabidopsis thaliana; identical to SEQ ID NO: 29022
  misc_feature (1)..(1518): Ceres Seq. ID no. 12371601
  misc_feature: MA Experiment ID: 20000030 Result: Down-regulated in Transcription
  misc_feature: MA Experiment 20000030 PARAMETER Experiment Name: At_CS6630_Roots_cDNA_P Parameter: Plant Line Value: CS6630 vs. WS
  misc_feature: MA Experiment 20000030 PARAMETER Experiment Name: At_CS6630_Roots_cDNA_P Parameter: Tissue Value: Roots
  misc_feature: MA Experiment ID: 20000111 Result: Down-regulated in Transcription
  misc_feature: MA Experiment 20000111 PARAMETER Experiment Name: At_42deg_Heat_cDNA_P Parameter: Temperature (deg C) Value: 42 vs. 22
  misc_feature: MA Experiment 20000111 PARAMETER Experiment Name: At_42deg_Heat_cDNA_P Parameter: Timepoint (hr) Value: 6
  misc_feature: MA Experiment 20000111 PARAMETER Experiment Name: At_42deg_Heat_cDNA_P Parameter: Tissue Value: Aerial
  misc_feature: MA Experiment ID: 20000113 Result: Down-regulated in Transcription
  misc_feature: MA Experiment 20000113 PARAMETER Experiment Name: At_42deg_Heat_cDNA_P Parameter: Temperature (deg C) Value: 42 vs. 22
  misc_feature: MA Experiment 20000113 PARAMETER Experiment Name: At_42deg_Heat_cDNA_P Parameter: Timepoint (hr) Value: 8
  misc_feature: MA Experiment 20000113 PARAMETER Experiment Name: At_42deg_Heat_cDNA_P Parameter: Tissue Value: Aerial
  misc_feature: MA Experiment ID: 20000171 Result: Down-regulated in Transcription
  misc_feature: MA Experiment 20000171 PARAMETER Experiment Name: At_42deg_Heat_P Parameter: Age (day) Value: 14
  misc_feature: MA Experiment 20000171 PARAMETER Experiment Name: At_42deg_Heat_P Parameter: Organism Value: A. thaliana
  misc_feature: MA Experiment 20000171 PARAMETER Experiment Name: At_42deg_Heat_P Parameter: Plant Line Value: WS
  misc_feature: MA Experiment 20000171 PARAMETER Experiment Name: At_42deg_Heat_P Parameter: Temperature (deg C) Value: 42 vs. 22
  misc_feature: MA Experiment 20000171 PARAMETER Experiment Name: At_42deg_Heat_P Parameter: Timepoint (hr) Value: 1
  misc_feature: MA Experiment 20000171 PARAMETER Experiment Name: At_42deg_Heat_P Parameter: Tissue Value: Aerial
  misc_feature: MA Experiment ID: 20000173 Result: Down-regulated in Transcription
  misc_feature: MA Experiment 20000173 PARAMETER Experiment Name: At_42deg_Heat_P Parameter: Age (day) Value: 14
  misc_feature: MA Experiment 20000173 PARAMETER Experiment Name: At_42deg_Heat_P Parameter: Organism Value: A. thaliana
  misc_feature: MA Experiment 20000173 PARAMETER Experiment Name: At_42deg_Heat_P Parameter: Plant Line Value: WS
  misc_feature: MA Experiment 20000173 PARAMETER Experiment Name: At_42deg_Heat_P Parameter: Temperature (deg C) Value: 42 vs. 22
  misc_feature: MA Experiment 20000173 PARAMETER Experiment Name: At_42deg_Heat_P Parameter: Timepoint (hr) Value: 6
  misc_feature: MA Experiment 20000173 PARAMETER Experiment Name: At_42deg_Heat_P Parameter: Tissue Value: Aerial
  misc_feature: MA Experiment ID: 20000224 Result: Down-regulated in Transcription

SEQ ID NO: 33217 - protein, 454 aa, Arabidopsis thaliana; identical to SEQ ID NO: 29023
  peptide (1)..(454): Ceres Seq. ID no. 12371602
  misc_feature (35)..(373): Homolog of NCBI NO: 12056117 NR Description: protein disulfide isomerase [Triticum turgidum
  misc_feature (18)..(318): Homolog of NCBI NO: 17647799 NR Description: Protein disulfide isomerase CG6988-PA
  misc_feature (7)..(368): Homolog of NCBI NO: 31239469 NR Description: ENSANGP00000011666 [Anopheles gambiae]
  misc_feature (25)..(382): Homolog of NCBI NO: 11133775 NR Description: Protein disulfide isomerase precursor (PDI)
  misc_feature (18)..(318): Homolog of NCBI NO: 27819775 NR Description: RH09122p [Drosophila melanogaster]
  misc_feature (26)..(382): Homolog of NCBI NO: 15219086 NR Description: putative protein disulfide isomerase precursor
  misc_feature (26)..(382): Homolog of NCBI NO: 30687521 NR Description: protein disulfide isomerase, putative
  misc_feature (18)..(419): Homolog of NCBI NO: 38344940 NR Description: OSJNBa0084A10.16 [Oryza sativa (japonica
  misc_feature (15)..(443): Homolog of NCBI NO: 8778373 NR Description: F15O4.20 [Arabidopsis thaliana]
  misc_feature (15)..(454): Homolog of NCBI NO: 18399786 NR Description: protein disulfide isomerase, putative
  misc_feature (35)..(373): Homolog of NCBI NO: 12056117 NR Description: protein disulfide isomerase [Triticum turgidum
  misc_feature (18)..(318): Homolog of NCBI NO: 17647799 NR Description: Protein disulfide isomerase CG6988-PA
  misc_feature (7)..(368): Homolog of NCBI NO: 31239469 NR Description: ENSANGP00000011666 [Anopheles gambiae]
  misc_feature (25)..(382): Homolog of NCBI NO: 11133775 NR Description: Protein disulfide isomerase precursor (PDI)
  misc_feature (18)..(318): Homolog of NCBI NO: 27819775 NR Description: RH09122p [Drosophila melanogaster]
  misc_feature (26)..(382): Homolog of NCBI NO: 15219086 NR Description: putative protein disulfide isomerase precursor
  misc_feature (26)..(382): Homolog of NCBI NO: 30687521 NR Description: protein disulfide isomerase, putative
  misc_feature (18)..(419): Homolog of NCBI NO: 38344940 NR Description: OSJNBa0084A10.16 [Oryza sativa (japonica
  misc_feature (15)..(443): Homolog of NCBI NO: 8778373 NR Description: F15O4.20 [Arabidopsis thaliana]
  misc_feature (15)..(454): Homolog of NCBI NO: 18399786 NR Description: protein disulfide isomerase, putative

SEQ ID NO: 33218 - protein, 440 aa, Arabidopsis thaliana; identical to SEQ ID NO: 29024
  peptide (1)..(440): Ceres Seq. ID no. 12371603
  misc_feature (21)..(359): Homolog of NCBI NO: 12056117 NR Description: protein disulfide isomerase [Triticum turgidum
  misc_feature (4)..(304): Homolog of NCBI NO: 17647799 NR Description: Protein disulfide isomerase CG6988-PA
  misc_feature (1)..(354): Homolog of NCBI NO: 31239469 NR Description: ENSANGP00000011666 [Anopheles gambiae]
  misc_feature (11)..(368): Homolog of NCBI NO: 11133775 NR Description: Protein disulfide isomerase precursor (PDI)
  misc_feature (4)..(304): Homolog of NCBI NO: 27819775 NR Description: RH09122p [Drosophila melanogaster]
  misc_feature (12)..(368): Homolog of NCBI NO: 15219086 NR Description: putative protein disulfide isomerase precursor
  misc_feature (12)..(368): Homolog of NCBI NO: 30687521 NR Description: protein disulfide isomerase, putative
  misc_feature (4)..(405): Homolog of NCBI NO: 38344940 NR Description: OSJNBa0084A10.16 [Oryza sativa (japonica
  misc_feature (1)..(429): Homolog of NCBI NO: 8778373 NR Description: F15O4.20 [Arabidopsis thaliana]
  misc_feature (1)..(440): Homolog of NCBI NO: 18399786 NR Description: protein disulfide isomerase, putative
  misc_feature (21)..(359): Homolog of NCBI NO: 12056117 NR Description: protein disulfide isomerase [Triticum turgidum
  misc_feature (4)..(304): Homolog of NCBI NO: 17647799 NR Description: Protein disulfide isomerase CG6988-PA
  misc_feature (1)..(354): Homolog of NCBI NO: 31239469 NR Description: ENSANGP00000011666 [Anopheles gambiae]
  misc_feature (11)..(368): Homolog of NCBI NO: 11133775 NR Description: Protein disulfide isomerase precursor (PDI)
  misc_feature (4)..(304): Homolog of NCBI NO: 27819775 NR Description: RH09122p [Drosophila melanogaster]
  misc_feature (12)..(368): Homolog of NCBI NO: 15219086 NR Description: putative protein disulfide isomerase precursor
  misc_feature (12)..(368): Homolog of NCBI NO: 30687521 NR Description: protein disulfide isomerase, putative
  misc_feature (4)..(405): Homolog of NCBI NO: 38344940 NR Description: OSJNBa0084A10.16 [Oryza sativa (japonica
  misc_feature (1)..(429): Homolog of NCBI NO: 8778373 NR Description: F15O4.20 [Arabidopsis thaliana]
  misc_feature (1)..(440): Homolog of NCBI NO: 18399786 NR Description: protein disulfide isomerase, putative

SEQ ID NO: 33219 - protein, 330 aa, Arabidopsis thaliana; identical to SEQ ID NO: 29025
  peptide (1)..(330): Ceres Seq. ID no. 12371604
  misc_feature (1)..(249): Homolog of NCBI NO: 12056117 NR Description: protein disulfide isomerase [Triticum turgidum
  misc_feature (1)..(194): Homolog of NCBI NO: 17647799 NR Description: Protein disulfide isomerase CG6988-PA
  misc_feature (1)..(244): Homolog of NCBI NO: 31239469 NR Description: ENSANGP00000011666 [Anopheles gambiae]
  misc_feature (1)..(258): Homolog of NCBI NO: 11133775 NR Description: Protein disulfide isomerase precursor (PDI)
  misc_feature (1)..(194): Homolog of NCBI NO: 27819775 NR Description: RH09122p [Drosophila melanogaster]
  misc_feature (1)..(258): Homolog of NCBI NO: 15219086 NR Description: putative protein disulfide isomerase precursor
  misc_feature (1)..(258): Homolog of NCBI NO: 30687521 NR Description: protein disulfide isomerase, putative
  misc_feature (1)..(295): Homolog of NCBI NO: 38344940 NR Description: OSJNBa0084A10.16 [Oryza sativa (japonica
  misc_feature (1)..(319): Homolog of NCBI NO: 8778373 NR Description: F15O4.20 [Arabidopsis thaliana]
  misc_feature (1)..(330): Homolog of NCBI NO: 18399786 NR Description: protein disulfide isomerase, putative
  misc_feature (1)..(249): Homolog of NCBI NO: 12056117 NR Description: protein disulfide isomerase [Triticum turgidum
  misc_feature (1)..(194): Homolog of NCBI NO: 17647799 NR Description: Protein disulfide isomerase CG6988-PA
  misc_feature (1)..(244): Homolog of NCBI NO: 31239469 NR Description: ENSANGP00000011666 [Anopheles gambiae]
  misc_feature (1)..(258): Homolog of NCBI NO: 11133775 NR Description: Protein disulfide isomerase precursor (PDI)
  misc_feature (1)..(194): Homolog of NCBI NO: 27819775 NR Description: RH09122p [Drosophila melanogaster]
  misc_feature (1)..(258): Homolog of NCBI NO: 15219086 NR Description: putative protein disulfide isomerase precursor
  misc_feature (1)..(258): Homolog of NCBI NO: 30687521 NR Description: protein disulfide isomerase, putative
  misc_feature (1)..(295): Homolog of NCBI NO: 38344940 NR Description: OSJNBa0084A10.16 [Oryza sativa (japonica
  misc_feature (1)..(319): Homolog of NCBI NO: 8778373 NR Description: F15O4.20 [Arabidopsis thaliana]
  misc_feature (1)..(330): Homolog of NCBI NO: 18399786 NR Description: protein disulfide isomerase, putative

SEQ ID NO: 33220 - DNA, 557 bp, Arabidopsis thaliana; identical to SEQ ID NO: 29630
  misc_feature (1)..(557): Ceres Seq. ID no. 12332139
  misc_feature: MA Experiment ID: 108434 Result: Up-regulated in Transcription
  misc_feature: MA Experiment 108434 PARAMETER Experiment Name: At_Root_Tips_cDNA_P Parameter: Tissue Value: Root Tips
  misc_feature: MA Experiment ID: 20001451 Result: Up-regulated in Transcription
  misc_feature: MA Experiment 20001451 PARAMETER Experiment Name: At_Far-red-induction_P Parameter: Age (day) Value: 7
  misc_feature: MA Experiment 20001451 PARAMETER Experiment Name: At_Far-red-induction_P Parameter: Light Value: Far-red vs. White
  misc_feature: MA Experiment 20001451 PARAMETER Experiment Name: At_Far-red-induction_P Parameter: Organism Value: A. thaliana
  misc_feature: MA Experiment 20001451 PARAMETER Experiment Name: At_Far-red-induction_P Parameter: Plant Line Value: Columbia
  misc_feature: MA Experiment 20001451 PARAMETER Experiment Name: At_Far-red-induction_P Parameter: Timepoint (hr) Value: 24
  misc_feature: MA Experiment 20001451 PARAMETER Experiment Name: At_Far-red-induction_P Parameter: Tissue Value: Whole Plant

SEQ ID NO: 33221 - protein, 103 aa, Arabidopsis thaliana; identical to SEQ ID NO: 29631
  peptide (1)..(103): Ceres Seq. ID no. 12332140
  misc_feature (2)..(78): Pfam Name: Signal recognition particle 9 kDa protein (SRP9) Pfam Description: Signal recognition particle 9 kDa protein (SRP9)
  misc_feature (1)..(67): Homolog of NCBI NO: 39585011 NR Description: Hypothetical protein CBG06800 [Caenorhabditis
  misc_feature (1)..(73): Homolog of NCBI NO: 6755662 NR Description: signal recognition particle; signal recognition
  misc_feature (1)..(73): Homolog of NCBI NO: 5107800 NR Description: Signal Recognition Particle Alu Rna Binding
  misc_feature (6)..(73): Homolog of NCBI NO: 11513832 NR Description: Chain A, Core Of The Alu Domain Of The Mammalian
  misc_feature (6)..(73): Homolog of NCBI NO: 4507217 NR Description: signal recognition particle 9kDa; signal
  misc_feature (1)..(73): Homolog of NCBI NO: 134890 NR Description: SIGNAL RECOGNITION PARTICLE 9 KD PROTEIN (SRP9)
  misc_feature (1)..(67): Homolog of NCBI NO: 17556953 NR Description: Signal recognition particle (8.8 kD)
  misc_feature (1)..(73): Homolog of NCBI NO: 29436534 NR Description: Similar to signal recognition particle 9kDa
  misc_feature (1)..(103): Homolog of NCBI NO: 12230624 NR Description: Signal recognition particle 9 kDa protein (SRP9)
  misc_feature (1)..(103): Homolog of NCBI NO: 15229083 NR Description: signal recognition particle subunit 9 - like

SEQ ID NO: 33222 - protein, 75 aa, Arabidopsis thaliana; identical to SEQ ID NO: 29632
  peptide (1)..(75): Ceres Seq. ID no. 12332141
  misc_feature (1)..(39): Homolog of NCBI NO: 39585011 NR Description: Hypothetical protein CBG06800 [Caenorhabditis
  misc_feature (1)..(45): Homolog of NCBI NO: 6755662 NR Description: signal recognition particle; signal recognition
  misc_feature (1)..(45): Homolog of NCBI NO: 5107800 NR Description: Signal Recognition Particle Alu Rna Binding
  misc_feature (1)..(45): Homolog of NCBI NO: 11513832 NR Description: Chain A, Core Of The Alu Domain Of The Mammalian
  misc_feature (1)..(45): Homolog of NCBI NO: 4507217 NR Description: signal recognition particle 9kDa; signal
  misc_feature (1)..(45): Homolog of NCBI NO: 134890 NR Description: SIGNAL RECOGNITION PARTICLE 9 KD PROTEIN (SRP9)
  misc_feature (1)..(39): Homolog of NCBI NO: 17556953 NR Description: Signal recognition particle (8.8 kD)
  misc_feature (1)..(45): Homolog of NCBI NO: 29436534 NR Description: Similar to signal recognition particle 9kDa
  misc_feature (1)..(75): Homolog of NCBI NO: 12230624 NR Description: Signal recognition particle 9 kDa protein (SRP9)
  misc_feature (1)..(75): Homolog of NCBI NO: 15229083 NR Description: signal recognition particle subunit 9 - like

SEQ ID NO: 33223 - DNA, 2689 bp, Arabidopsis thaliana; identical to SEQ ID NO: 29633
  misc_feature (1)..(2689): Ceres Seq. ID no. 13490032
  misc_feature: MA Experiment ID: 108434 Result: Down-regulated in Transcription
  misc_feature: MA Experiment 108434 PARAMETER Experiment Name: At_Root_Tips_cDNA_P Parameter: Tissue Value: Root Tips
  misc_feature: MA Experiment ID: 108579 Result: Down-regulated in Transcription
  misc_feature: MA Experiment 108579 PARAMETER Experiment Name: At_4deg_Cold_cDNA_P Parameter: Temperature (deg C) Value: 4 vs. 22
  misc_feature: MA Experiment 108579 PARAMETER Experiment Name: At_4deg_Cold_cDNA_P Parameter: Timepoint (hr) Value: 6
  misc_feature: MA Experiment 108579 PARAMETER Experiment Name: At_4deg_Cold_cDNA_P Parameter: Tissue Value: Aerial
  misc_feature: MA Experiment ID: 20000184 Result: Down-regulated in Transcription
  misc_feature: MA Experiment 20000184 PARAMETER Experiment Name: At_Shoots__P Parameter: Age (day) Value: 7
  misc_feature: MA Experiment 20000184 PARAMETER Experiment Name: At_Shoots__P Parameter: Tissue Value: Shoots vs. Whole Plant
  misc_feature: MA Experiment ID: 20000495 Result: Up-regulated in Transcription
  misc_feature: MA Experiment 20000495 PARAMETER Experiment Name: At_Guard_Cells_P Parameter: Harvest Date Value: 8/2/2002
  misc_feature: MA Experiment 20000495 PARAMETER Experiment Name: At_Guard_Cells_P Parameter: Organism Value: A. thaliana
  misc_feature: MA Experiment 20000495 PARAMETER Experiment Name: At_Guard_Cells_P Parameter: Tissue Value: Guard Cells vs. Leaves
  misc_feature: MA Experiment ID: 20000794 Result: Up-regulated in Transcription
  misc_feature: MA Experiment 20000794 PARAMETER Experiment Name: At_Petals_P Parameter: Age (day) Value: 23-25 days
  misc_feature: MA Experiment 20000794 PARAMETER Experiment Name: At_Petals_P Parameter: Plant Line Value: WS
  misc_feature: MA Experiment 20000794 PARAMETER Experiment Name: At_Petals_P Parameter: Tissue Value: Petals vs. Whole plant
  misc_feature: MA Experiment ID: 20001757 Result: Down-regulated in Transcription
  misc_feature: MA Experiment 20001757 PARAMETER Experiment Name: At_50mM_NH4NO3_L-to-H_P Parameter: Timepoint (hr) Value: 6
  misc_feature: MA Experiment 20001757 PARAMETER Experiment Name: At_50mM_NH4NO3_L-to-H_P Parameter: Tissue Value: Leaf
  misc_feature: MA Experiment 20001757 PARAMETER Experiment Name: At_50mM_NH4NO3_L-to-H_P Parameter: Treatment Value: 50mM NH4NO3 vs 100mM Mannitol
  misc_feature: MA Experiment ID: 20001911 Result: Up-regulated in Transcription
  misc_feature: MA Experiment 20001911 PARAMETER Experiment Name: At_Drought_Reproduction_P Parameter: Age (day) Value: 40
  misc_feature: MA Experiment 20001911 PARAMETER Experiment Name: At_Drought_Reproduction_P Parameter: Organism Value: A. thaliana
  misc_feature: MA Experiment 20001911 PARAMETER Experiment Name: At_Drought_Reproduction_P Parameter: Plant Line Value: WS
  misc_feature: MA Experiment 20001911 PARAMETER Experiment Name: At_Drought_Reproduction_P Parameter: Timepoint (day) Value: 10
  misc_feature: MA Experiment 20001911 PARAMETER Experiment Name: At_Drought_Reproduction_P Parameter: Tissue Value: Flowers
  misc_feature: MA Experiment 20001911 PARAMETER Experiment Name: At_Drought_Reproduction_P Parameter: Treatment Value: Drought vs. No Drought

SEQ ID NO: 33224 - protein, 133 aa, Arabidopsis thaliana; identical to SEQ ID NO: 29634
  peptide (1)..(133): Ceres Seq. ID no. 13490033
  misc_feature (1)..(123): Pfam Name: Caldesmon Pfam Description: Caldesmon
  misc_feature (1)..(132): Homolog of NCBI NO: 28278343 NR Description: Unknown (protein for MGC:55548) [Danio rerio]
  misc_feature (1)..(130): Homolog of NCBI NO: 31234644 NR Description: ENSANGP00000022336 [Anopheles gambiae]
  misc_feature (1)..(132): Homolog of NCBI NO: 39795605 NR Description: Unknown (protein for MGC:76303) [Silurana
  misc_feature (1)..(133): Homolog of NCBI NO: 34879649 NR Description: similar to hypothetical protein FLJ10154 [Rattus
  misc_feature (1)..(133): Homolog of NCBI NO: 8922259 NR Description: hypothetical protein FLJ10154 [Homo sapiens]
  misc_feature (1)..(132): Homolog of NCBI NO: 27881860 NR Description: Unknown (protein for MGC:55375) [Danio rerio]
  misc_feature (1)..(132): Homolog of NCBI NO: 38541231 NR Description: Unknown (protein for MGC:77695) [Danio rerio]
  misc_feature (1)..(120): Homolog of NCBI NO: 37532486 NR Description: hypothetical protein [Oryza sativa (japonica
  misc_feature (1)..(130): Homolog of NCBI NO: 15240607 NR Description: hypothetical protein [Arabidopsis thaliana]
  misc_feature (1)..(133): Homolog of NCBI NO: 15220234 NR Description: F-box protein family [Arabidopsis thaliana]

SEQ ID NO: 33225 - protein, 94 aa, Arabidopsis thaliana; identical to SEQ ID NO: 29635
  peptide (1)..(94): Ceres Seq. ID no. 13490034
  misc_feature (1)..(84): Pfam Name: Caldesmon Pfam Description: Caldesmon
  misc_feature (1)..(93): Homolog of NCBI NO: 28278343 NR Description: Unknown (protein for MGC:55548) [Danio rerio]
  misc_feature (1)..(91): Homolog of NCBI NO: 31234644 NR Description: ENSANGP00000022336 [Anopheles gambiae]
  misc_feature (1)..(93): Homolog of NCBI NO: 39795605 NR Description: Unknown (protein for MGC:76303) [Silurana
  misc_feature (1)..(94): Homolog of NCBI NO: 34879649 NR Description: similar to hypothetical protein FLJ10154 [Rattus
  misc_feature (1)..(94): Homolog of NCBI NO: 8922259 NR Description: hypothetical protein FLJ10154 [Homo sapiens]
  misc_feature (1)..(93): Homolog of NCBI NO: 27881860 NR Description: Unknown (protein for MGC:55375) [Danio rerio]
  misc_feature (1)..(93): Homolog of NCBI NO: 38541231 NR Description: Unknown (protein for MGC:77695) [Danio rerio]
  misc_feature (1)..(81): Homolog of NCBI NO: 37532486 NR Description: hypothetical protein [Oryza sativa (japonica
  misc_feature (1)..(91): Homolog of NCBI NO: 15240607 NR Description: hypothetical protein [Arabidopsis thaliana]
  misc_feature (1)..(94): Homolog of NCBI NO: 15220234 NR Description: F-box protein family [Arabidopsis thaliana]

SEQ ID NO: 33226 - protein, 76 aa, Arabidopsis thaliana; identical to SEQ ID NO: 29636
  peptide (1)..(76): Ceres Seq. ID no. 13490035

SEQ ID NO: 33227 - DNA, 344 bp, Arabidopsis thaliana; identical to SEQ ID NO: 29637
  misc_feature (1)..(344): Ceres Seq. ID no. 12422844
  misc_feature: MA Experiment ID: 108434 Result: Down-regulated in Transcription
  misc_feature: MA Experiment 108434 PARAMETER Experiment Name: At_Root_Tips_cDNA_P Parameter: Tissue Value: Root Tips
  misc_feature: MA Experiment ID: 108461 Result: Up-regulated in Transcription
  misc_feature: MA Experiment 108461 PARAMETER Experiment Name: At_Germinating_Seeds_cDNA_P Parameter: Age (day) Value: 1 vs. 0
  misc_feature: MA Experiment 108461 PARAMETER Experiment Name: At_Germinating_Seeds_cDNA_P Parameter: Tissue Value: Germinating Seeds
  misc_feature: MA Experiment ID: 108464 Result: Up-regulated in Transcription
  misc_feature: MA Experiment 108464 PARAMETER Experiment Name: At_Germinating_Seeds_cDNA_P Parameter: Age (day) Value: 4 vs. 0
  misc_feature: MA Experiment 108464 PARAMETER Experiment Name: At_Germinating_Seeds_cDNA_P Parameter: Tissue Value: Germinating Seeds
  misc_feature: MA Experiment ID: 108488 Result: Up-regulated in Transcription
  misc_feature: MA Experiment ID: 108595 Result: Down-regulated in Transcription
  misc_feature: MA Experiment 108595 PARAMETER Experiment Name: At_Ler-pi_Ovule_cDNA_P Parameter: Plant Line Value: null
  misc_feature: MA Experiment ID: 20000087 Result: Down-regulated in Transcription
  misc_feature: MA Experiment 20000087 PARAMETER Experiment Name: At_100uM_ABA_Mutants_cDNA_P Parameter: Plant Line Value: WS
  misc_feature: MA Experiment 20000087 PARAMETER Experiment Name: At_100uM_ABA_Mutants_cDNA_P Parameter: Timepoint (hr) Value: 6
  misc_feature: MA Experiment 20000087 PARAMETER Experiment Name: At_100uM_ABA_Mutants_cDNA_P Parameter: Tissue Value: Aerial
  misc_feature: MA Experiment 20000087 PARAMETER Experiment Name: At_100uM_ABA_Mutants_cDNA_P Parameter: Treatment Value: 100uM ABA vs. No Treatment
  misc_feature: MA Experiment ID: 20000179 Result: Up-regulated in Transcription
  misc_feature: MA Experiment 20000179 PARAMETER Experiment Name: At_Germinating_Seeds_P Parameter: Age (hr) Value: 6 vs. 0
  misc_feature: MA Experiment 20000179 PARAMETER Experiment Name: At_Germinating_Seeds_P Parameter: Tissue Value: Germinating Seeds
  misc_feature: MA Experiment ID: 20000180 Result: Up-regulated in Transcription
  misc_feature: MA Experiment 20000180 PARAMETER Experiment Name: At_Germinating_Seeds_P Parameter: Age (hr) Value: 24 vs. 0
  misc_feature: MA Experiment 20000180 PARAMETER Experiment Name: At_Germinating_Seeds_P Parameter: Tissue Value: Germinating Seeds
  misc_feature: MA Experiment ID: 20000185 Result: Down-regulated in Transcription
  misc_feature: MA Experiment 20000185 PARAMETER Experiment Name: At_Roots__P Parameter: Age (day) Value: 7 vs. 21
  misc_feature: MA Experiment 20000185 PARAMETER Experiment Name: At_Roots__P Parameter: Organism Value: A. thaliana
  misc_feature: MA Experiment 20000185 PARAMETER Experiment Name: At_Roots__P Parameter: Tissue Value: Roots vs. Whole Plant
  misc_feature: MA Experiment ID: 20000269 Result: Down-regulated in Transcription
  misc_feature: MA Experiment 20000269 PARAMETER Experiment Name: At_1mM_KNO3_L-vs-H_Roots_P Parameter: Age (day) Value: 7,10,12
  misc_feature: MA Experiment 20000269 PARAMETER Experiment Name: At_1mM_KNO3_L-vs-H_Roots_P Parameter: Organism Value: A. thaliana
  misc_feature: MA Experiment 20000269 PARAMETER Experiment Name: At_1mM_KNO3_L-vs-H_Roots_P Parameter: Plant Line Value: WS
  misc_feature: MA Experiment 20000269 PARAMETER Experiment Name: At_1mM_KNO3_L-vs-H_Roots_P Parameter: Timepoint (day) Value: 7,10,12
  misc_feature: MA Experiment 20000269 PARAMETER Experiment Name: At_1mM_KNO3_L-vs-H_Roots_P Parameter: Tissue Value: Roots
  misc_feature: MA Experiment 20000269 PARAMETER Experiment Name: At_1mM_KNO3_L-vs-H_Roots_P Parameter: Treatment Value: 1mM KNO3 vs. 50mM KNO3
  misc_feature: MA Experiment ID: 20000439 Result: Down-regulated in Transcription
  misc_feature: MA Experiment 20000439 PARAMETER Experiment Name: At_Roots__P Parameter: Age (day) Value: 14 vs. 21
  misc_feature: MA Experiment 20000439 PARAMETER Experiment Name: At_Roots__P Parameter: Organism Value: A. thaliana
  misc_feature: MA Experiment 20000439 PARAMETER Experiment Name: At_Roots__P Parameter: Tissue Value: Roots vs. Whole Plant
  misc_feature: MA Experiment ID: 20000794 Result: Down-regulated in Transcription
  misc_feature: MA Experiment 20000794 PARAMETER Experiment Name: At_Petals_P Parameter: Age (day) Value: 23-25 days
  misc_feature: MA Experiment 20000794 PARAMETER Experiment Name: At_Petals_P Parameter: Plant Line Value: WS
  misc_feature: MA Experiment 20000794 PARAMETER Experiment Name: At_Petals_P Parameter: Tissue Value: Petals vs. Whole plant
  misc_feature: MA Experiment ID: 20001557 Result: Down-regulated in Transcription
  misc_feature: MA Experiment 20001557 PARAMETER Experiment Name: At_Drought_Soil_Dry_P Parameter: Age (day) Value: 27
  misc_feature: MA Experiment 20001557 PARAMETER Experiment Name: At_Drought_Soil_Dry_P Parameter: Organism Value: A. thaliana
  misc_feature: MA Experiment 20001557 PARAMETER Experiment Name: At_Drought_Soil_Dry_P Parameter: Plant Line Value: WS
  misc_feature: MA Experiment 20001557 PARAMETER Experiment Name: At_Drought_Soil_Dry_P Parameter: Post Timepoint (hr) Value: 3
  misc_feature: MA Experiment 20001557 PARAMETER Experiment Name: At_Drought_Soil_Dry_P Parameter: Post-Treatment Value: Re-Water vs. No Drought
  misc_feature: MA Experiment 20001557 PARAMETER Experiment Name: At_Drought_Soil_Dry_P Parameter: Timepoint (day) Value: 13
  misc_feature: MA Experiment 20001557 PARAMETER Experiment Name: At_Drought_Soil_Dry_P Parameter: Treatment Value: Drought vs. No Drought
  misc_feature: MA Experiment ID: 20001757 Result: Up-regulated in Transcription
  misc_feature: MA Experiment 20001757 PARAMETER Experiment Name: At_50mM_NH4NO3_L-to-H_P Parameter: Timepoint (hr) Value: 6
  misc_feature: MA Experiment 20001757 PARAMETER Experiment Name: At_50mM_NH4NO3_L-to-H_P Parameter: Tissue Value: Leaf
  misc_feature: MA Experiment 20001757 PARAMETER Experiment Name: At_50mM_NH4NO3_L-to-H_P Parameter: Treatment Value: 50mM NH4NO3 vs 100mM Mannitol
  misc_feature: MA Experiment ID: 20001904 Result: Down-regulated in Transcription
  misc_feature: MA Experiment 20001904 PARAMETER Experiment Name: At_Drought_Reproduction_P Parameter: Age (day) Value: 37
  misc_feature: MA Experiment 20001904 PARAMETER Experiment Name: At_Drought_Reproduction_P Parameter: Organism Value: A. thaliana
  misc_feature: MA Experiment 20001904 PARAMETER Experiment Name: At_Drought_Reproduction_P Parameter: Plant Line Value: WS
  misc_feature: MA Experiment 20001904 PARAMETER Experiment Name: At_Drought_Reproduction_P Parameter: Timepoint (day) Value: 7
  misc_feature: MA Experiment 20001904 PARAMETER Experiment Name: At_Drought_Reproduction_P Parameter: Tissue Value: Rosettes
  misc_feature: MA Experiment 20001904 PARAMETER Experiment Name: At_Drought_Reproduction_P Parameter: Treatment Value: Drought vs. No Drought
  misc_feature: MA Experiment ID: 20001906 Result: Down-regulated in Transcription
  misc_feature: MA Experiment 20001906 PARAMETER Experiment Name: At_Drought_Reproduction_P Parameter: Age (day) Value: 35
  misc_feature: MA Experiment 20001906 PARAMETER Experiment Name: At_Drought_Reproduction_P Parameter: Organism Value: A. thaliana
  misc_feature: MA Experiment 20001906 PARAMETER Experiment Name: At_Drought_Reproduction_P Parameter: Plant Line Value: WS
  misc_feature: MA Experiment 20001906 PARAMETER Experiment Name: At_Drought_Reproduction_P Parameter: Timepoint (day) Value: 5
  misc_feature: MA Experiment 20001906 PARAMETER Experiment Name: At_Drought_Reproduction_P Parameter: Tissue Value: Siliques
  misc_feature: MA Experiment 20001906 PARAMETER Experiment Name: At_Drought_Reproduction_P Parameter: Treatment Value: Drought vs. No Drought

SEQ ID NO: 33228 - protein, 67 aa, Arabidopsis thaliana; identical to SEQ ID NO: 29638
  peptide (1)..(67): Ceres Seq. ID no. 12422845
  misc_feature (13)..(67): Pfam Name: PsbP Pfam Description: PsbP
  misc_feature (1)..(66): Homolog of NCBI NO: 19896 NR Description: photosystem II 23 kDa polypeptide [Nicotiana
  misc_feature (15)..(67): Homolog of NCBI NO: 15222166 NR Description: photosystem II oxygen-evolving complex 23 (OEC23)
  misc_feature (13)..(67): Homolog of NCBI NO: 7443216 NR Description: photosystem II oxygen-evolving complex protein 2
  misc_feature (13)..(67): Homolog of NCBI NO: 417604 NR Description: 23 kDa polypeptide of water-oxidizing complex of
  misc_feature (13)..(67): Homolog of NCBI NO: 1345550 NR Description: 23-kDa ploypeptide of photosystem II
  misc_feature (13)..(67): Homolog of NCBI NO: 19898 NR Description: photosystem II 23 kDa polypeptide [Nicotiana
  misc_feature (1)..(43): Homolog of NCBI NO: 131391 NR Description: Oxygen-evolving enhancer protein 2, chloroplast (OEE2) (23 kDa subunit of oxygen evolving system of photosystem
  misc_feature (1)..(43): Homolog of NCBI NO: 11133887 NR Description: OXYGEN-EVOLVING ENHANCER PROTEIN 2-2, CHLOROPLAST (OEE2) (23 KDA SUBUNIT OF OXYGEN EVOLVING SYSTEM OF PHOTOSYSTEM
  misc_feature (1)..(43): Homolog of NCBI NO: 15224572 NR Description: photosystem II oxygen-evolving complex 23 (OEC23)
  misc_feature (1)..(43): Homolog of NCBI NO: 15222166 NR Description: photosystem II oxygen-evolving complex 23 (OEC23)

SEQ ID NO: 33229 - protein, 58 aa, Arabidopsis thaliana; identical to SEQ ID NO: 29639
  peptide (1)..(58): Ceres Seq. ID no. 12422846

SEQ ID NO: 33230 - DNA, 539 bp, Arabidopsis thaliana; identical to SEQ ID NO: 29640
  misc_feature (1)..(539): Ceres Seq. ID no. 12561397
  misc_feature: MA Experiment ID: 108434 Result: Up-regulated in Transcription
  misc_feature: MA Experiment 108434 PARAMETER Experiment Name: At_Root_Tips_cDNA_P Parameter: Tissue Value: Root Tips
  misc_feature: MA Experiment ID: 108435 Result: Up-regulated in Transcription
  misc_feature: MA Experiment 108435 PARAMETER Experiment Name: At_stm_Mutants_cDNA_P Parameter: Plant Line Value: wt Landsburg vs stm
  misc_feature: MA Experiment 108435 PARAMETER Experiment Name: At_stm_Mutants_cDNA_P Parameter: Tissue Value: Shoot Apical Meristem Region
  misc_feature: MA Experiment ID: 108462 Result: Down-regulated in Transcription
  misc_feature: MA Experiment 108462 PARAMETER Experiment Name: At_Germinating_Seeds_cDNA_P Parameter: Age (day) Value: 2 vs. 0
  misc_feature: MA Experiment 108462 PARAMETER Experiment Name: At_Germinating_Seeds_cDNA_P Parameter: Tissue Value: Germinating Seeds
  misc_feature: MA Experiment ID: 108463 Result: Down-regulated in Transcription
  misc_feature: MA Experiment 108463 PARAMETER Experiment Name: At_Germinating_Seeds_cDNA_P Parameter: Age (day) Value: 3 vs. 0
  misc_feature: MA Experiment 108463 PARAMETER Experiment Name: At_Germinating_Seeds_cDNA_P Parameter: Tissue Value: Germinating Seeds
  misc_feature: MA Experiment ID: 108464 Result: Down-regulated in Transcription
  misc_feature: MA Experiment 108464 PARAMETER Experiment Name: At_Germinating_Seeds_cDNA_P Parameter: Age (day) Value: 4 vs. 0
  misc_feature: MA Experiment 108464 PARAMETER Experiment Name: At_Germinating_Seeds_cDNA_P Parameter: Tissue Value: Germinating Seeds
  misc_feature: MA Experiment ID: 108573 Result: Down-regulated in Transcription
  misc_feature: MA Experiment 108573 PARAMETER Experiment Name: At_Drought_cDNA_P Parameter: Timepoint (hr) Value: 6
  misc_feature: MA Experiment 108573 PARAMETER Experiment Name: At_Drought_cDNA_P Parameter: Tissue Value: Aerial
  misc_feature: MA Experiment 108573 PARAMETER Experiment Name: At_Drought_cDNA_P Parameter: Treatment Value: Drought vs. No Drought
  misc_feature: MA Experiment ID: 20000224 Result: Down-regulated in Transcription
  misc_feature: MA Experiment ID: 20000227 Result: Up-regulated in Transcription
  misc_feature: MA Experiment 20000227 PARAMETER Experiment Name: At_Root-Tips-vs-Tops_P Parameter: Tissue Value: Root Tips vs. Root Tops
  misc_feature: MA Experiment ID: 20000234 Result: Up-regulated in Transcription
  misc_feature: MA Experiment 20000234 PARAMETER Experiment Name: At_Siliques_P Parameter: Age (day) Value: 21
  misc_feature: MA Experiment 20000234 PARAMETER Experiment Name: At_Siliques_P Parameter: Organism Value: A. thaliana
  misc_feature: MA Experiment 20000234 PARAMETER Experiment Name: At_Siliques_P Parameter: Plant Line Value: WS
  misc_feature: MA Experiment 20000234 PARAMETER Experiment Name: At_Siliques_P Parameter: Tissue Value: Less Than 5mm Siliques vs. Whole Plant
  misc_feature: MA Experiment ID: 20000235 Result: Up-regulated in Transcription
  misc_feature: MA Experiment 20000235 PARAMETER Experiment Name: At_Siliques_P Parameter: Age (day) Value: 21
  misc_feature: MA Experiment 20000235 PARAMETER Experiment Name: At_Siliques_P Parameter: Organism Value: A. thaliana
  misc_feature: MA Experiment 20000235 PARAMETER Experiment Name: At_Siliques_P Parameter: Plant Line Value: WS
  misc_feature: MA Experiment 20000235 PARAMETER Experiment Name: At_Siliques_P Parameter: Tissue Value: 5-10mm Siliques vs. Whole Plant
  misc_feature: MA Experiment ID: 20000265 Result: Up-regulated in Transcription
  misc_feature: MA Experiment 20000265 PARAMETER Experiment Name: At_Open_Flower_P Parameter: Age (day) Value: 21
  misc_feature: MA Experiment 20000265 PARAMETER Experiment Name: At_Open_Flower_P Parameter: Plant Line Value: WS
  misc_feature: MA Experiment 20000265 PARAMETER Experiment Name: At_Open_Flower_P Parameter: Tissue Value: Closed Flower vs. Whole Plant
  misc_feature: MA Experiment ID: 20000436 Result: Down-regulated in Transcription
  misc_feature: MA Experiment 20000436 PARAMETER Experiment Name: At_Drought_P Parameter: Age (day) Value: 7
  misc_feature: MA Experiment 20000436 PARAMETER Experiment Name: At_Drought_P Parameter: Organism Value: A. thaliana
  misc_feature: MA Experiment 20000436 PARAMETER Experiment Name: At_Drought_P Parameter: Plant Line Value: WS
  misc_feature: MA Experiment 20000436 PARAMETER Experiment Name: At_Drought_P Parameter: Timepoint (hr) Value: 12
  misc_feature: MA Experiment 20000436 PARAMETER Experiment Name: At_Drought_P Parameter: Tissue Value: Whole Plant
  misc_feature: MA Experiment 20000436 PARAMETER Experiment Name: At_Drought_P Parameter: Treatment Value: Drought vs. No Drought
  misc_feature: MA Experiment ID: 20000437 Result: Down-regulated in Transcription
  misc_feature: MA Experiment 20000437 PARAMETER Experiment Name: At_Drought_P Parameter: Age (day) Value: 8
  misc_feature: MA Experiment 20000437 PARAMETER Experiment Name: At_Drought_P Parameter: Organism Value: A. thaliana
  misc_feature: MA Experiment 20000437 PARAMETER Experiment Name: At_Drought_P Parameter: Plant Line Value: WS
  misc_feature: MA Experiment 20000437 PARAMETER Experiment Name: At_Drought_P Parameter: Timepoint (hr) Value: 24
  misc_feature: MA Experiment 20000437 PARAMETER Experiment Name: At_Drought_P Parameter: Tissue Value: Whole Plant
  misc_feature: MA Experiment 20000437 PARAMETER Experiment Name: At_Drought_P Parameter: Treatment Value: Drought vs. No Drought
  misc_feature: MA Experiment ID: 20000794 Result: Down-regulated in Transcription
  misc_feature: MA Experiment 20000794 PARAMETER Experiment Name: At_Petals_P Parameter: Age (day) Value: 23-25 days
  misc_feature: MA Experiment 20000794 PARAMETER Experiment Name: At_Petals_P Parameter: Plant Line Value: WS
  misc_feature: MA Experiment 20000794 PARAMETER Experiment Name: At_Petals_P Parameter: Tissue Value: Petals vs. Whole plant
  misc_feature: MA Experiment ID: 20001557 Result: Up-regulated in Transcription
  misc_feature: MA Experiment 20001557 PARAMETER Experiment Name: At_Drought_Soil_Dry_P Parameter: Age (day) Value: 27
  misc_feature: MA Experiment 20001557 PARAMETER Experiment Name: At_Drought_Soil_Dry_P Parameter: Organism Value: A. thaliana
  misc_feature: MA Experiment 20001557 PARAMETER Experiment Name: At_Drought_Soil_Dry_P Parameter: Plant Line Value: WS
  misc_feature: MA Experiment 20001557 PARAMETER Experiment Name: At_Drought_Soil_Dry_P Parameter: Post Timepoint (hr) Value: 3
  misc_feature: MA Experiment 20001557 PARAMETER Experiment Name: At_Drought_Soil_Dry_P Parameter: Post-Treatment Value: Re-Water vs. No Drought
  misc_feature: MA Experiment 20001557 PARAMETER Experiment Name: At_Drought_Soil_Dry_P Parameter: Timepoint (day) Value: 13
  misc_feature: MA Experiment 20001557 PARAMETER Experiment Name: At_Drought_Soil_Dry_P Parameter: Treatment Value: Drought vs. No Drought
  misc_feature: MA Experiment ID: 20001558 Result: Up-regulated in Transcription
  misc_feature: MA Experiment 20001558 PARAMETER Experiment Name: At_Drought_Soil_Dry_P Parameter: Age (day) Value: 27
  misc_feature: MA Experiment 20001558 PARAMETER Experiment Name: At_Drought_Soil_Dry_P Parameter: Organism Value: A. thaliana
  misc_feature: MA Experiment 20001558 PARAMETER Experiment Name: At_Drought_Soil_Dry_P Parameter: Plant Line Value: WS
  misc_feature: MA Experiment 20001558 PARAMETER Experiment Name: At_Drought_Soil_Dry_P Parameter: Post Timepoint (hr) Value: 6
  misc_feature: MA Experiment 20001558 PARAMETER Experiment Name: At_Drought_Soil_Dry_P Parameter: Post-Treatment Value: Re-Water vs. No Drought
  misc_feature: MA Experiment 20001558 PARAMETER Experiment Name: At_Drought_Soil_Dry_P Parameter: Timepoint (day) Value: 13
  misc_feature: MA Experiment 20001558 PARAMETER Experiment Name: At_Drought_Soil_Dry_P Parameter: Treatment Value: Drought vs. No Drought
  misc_feature: MA Experiment ID: 20001560 Result: Up-regulated in Transcription
  misc_feature: MA Experiment 20001560 PARAMETER Experiment Name: At_Drought_Soil_Dry_P Parameter: Age (day) Value: 28
  misc_feature: MA Experiment 20001560 PARAMETER Experiment Name: At_Drought_Soil_Dry_P Parameter: Organism Value: A. thaliana
  misc_feature: MA Experiment 20001560 PARAMETER Experiment Name: At_Drought_Soil_Dry_P Parameter: Plant Line Value: WS
  misc_feature: MA Experiment 20001560 PARAMETER Experiment Name: At_Drought_Soil_Dry_P Parameter: Post Timepoint (hr) Value: None
  misc_feature: MA Experiment 20001560 PARAMETER Experiment Name: At_Drought_Soil_Dry_P Parameter: Post-Treatment Value: None
  misc_feature: MA Experiment 20001560 PARAMETER Experiment Name: At_Drought_Soil_Dry_P Parameter: Timepoint (day) Value: 14
  misc_feature: MA Experiment 20001560 PARAMETER Experiment Name: At_Drought_Soil_Dry_P Parameter: Treatment Value: Drought vs. No Drought
  misc_feature: MA Experiment ID: 20001757 Result: Up-regulated in Transcription
  misc_feature: MA Experiment 20001757 PARAMETER Experiment Name: At_50mM_NH4NO3_L-to-H_P Parameter: Timepoint (hr) Value: 6
  misc_feature: MA Experiment 20001757 PARAMETER Experiment Name: At_50mM_NH4NO3_L-to-H_P Parameter: Tissue Value: Leaf
  misc_feature: MA Experiment 20001757 PARAMETER Experiment Name: At_50mM_NH4NO3_L-to-H_P Parameter: Treatment Value: 50mM NH4NO3 vs 100mM Mannitol

SEQ ID NO: 33231 - protein, 95 aa, Arabidopsis thaliana; identical to SEQ ID NO: 29641
  peptide (1)..(95): Ceres Seq. ID no. 12561398
  misc_feature (2)..(55): Pfam Name: Ribosomal protein L37e Pfam Description: Ribosomal protein L37e
  misc_feature (1)..(95): Homolog of NCBI NO: 4506641 NR Description: ribosomal protein L37; 60S ribosomal protein L37;
  misc_feature (1)..(89): Homolog of NCBI NO: 39583062 NR Description: Hypothetical protein CBG04239 [Caenorhabditis
  misc_feature (1)..(95): Homolog of NCBI NO: 20139516 NR Description: 60S ribosomal protein L37
  misc_feature (1)..(95): Homolog of NCBI NO: 19852052 NR Description: 60S ribosomal protein L37 [Aplysia californica]
  misc_feature (1)..(87): Homolog of NCBI NO: 38047707 NR Description: similar to Drosophila melanogaster CG9091
  misc_feature (1)..(85): Homolog of NCBI NO: 27948818 NR Description: ribosomal protein L37A [Kluyveromyces delphensis]
  misc_feature (1)..(93): Homolog of NCBI NO: 24642107 NR Description: CG9091-PA [Drosophila melanogaster]
  misc_feature (1)..(95): Homolog of NCBI NO: 15218094 NR Description: putative 60s ribosomal protein L37
  misc_feature (1)..(95): Homolog of NCBI NO: 15218208 NR Description: 60S ribosomal protein L37, putative
  misc_feature (1)..(95): Homolog of NCBI NO: 18401007 NR Description: putative ribosomal protein

SEQ ID NO: 33232 - protein, 72 aa, Arabidopsis thaliana; identical to SEQ ID NO: 29642
  peptide (1)..(72): Ceres Seq. ID no. 12561399
  misc_feature (11)..(72): Homolog of NCBI NO: 9294455 NR Description: gene_id:MSL1.12~unknown protein [Arabidopsis

SEQ ID NO: 33233 - DNA, 1058 bp, Arabidopsis thaliana; identical to SEQ ID NO: 29643
  misc_feature (1)..(1058): Ceres Seq. ID no. 12333067
  misc_feature: MA Experiment ID: 108595 Result: Down-regulated in Transcription
  misc_feature: MA Experiment 108595 PARAMETER Experiment Name: At_Ler-pi_Ovule_cDNA_P Parameter: Plant Line Value: null
  misc_feature: MA Experiment ID: 20000173 Result: Down-regulated in Transcription
  misc_feature: MA Experiment 20000173 PARAMETER Experiment Name: At_42deg_Heat_P Parameter: Age (day) Value: 14
  misc_feature: MA Experiment 20000173 PARAMETER Experiment Name: At_42deg_Heat_P Parameter: Organism Value: A. thaliana
  misc_feature: MA Experiment 20000173 PARAMETER Experiment Name: At_42deg_Heat_P Parameter: Plant Line Value: WS
  misc_feature: MA Experiment 20000173 PARAMETER Experiment Name: At_42deg_Heat_P Parameter: Temperature (deg C) Value: 42 vs. 22
  misc_feature: MA Experiment 20000173 PARAMETER Experiment Name: At_42deg_Heat_P Parameter: Timepoint (hr) Value: 6
  misc_feature: MA Experiment 20000173 PARAMETER Experiment Name: At_42deg_Heat_P Parameter: Tissue Value: Aerial

SEQ ID NO: 33234 - protein, 230 aa, Arabidopsis thaliana; identical to SEQ ID NO: 29644
  peptide (1)..(230): Ceres Seq. ID no. 12333068
  misc_feature (171)..(199): Pfam Name: EF hand Pfam Description: EF hand
  misc_feature (18)..(229): Homolog of NCBI NO: 18414931 NR Description: calcineurin B-like protein 1
  misc_feature (1)..(230): Homolog of NCBI NO: 13448027 NR Description: SOS3-like calcium binding protein [Arabidopsis
  misc_feature (1)..(230): Homolog of NCBI NO: 18414640 NR Description: expressed protein
  misc_feature (32)..(224): Homolog of NCBI NO: 38493047 NR Description: Chain A, The Crystal Structure Of The Calcium
  misc_feature (1)..(230): Homolog of NCBI NO: 16924116 NR Description: putative calcineurin B-like protein [Oryza sativa]
  misc_feature (1)..(230): Homolog of NCBI NO: 22137326 NR Description: calcineurin B [Pisum sativum]
  misc_feature (1)..(230): Homolog of NCBI NO: 21593228 NR Description: calcineurin B-like protein 2 [Arabidopsis
  misc_feature (1)..(230): Homolog of NCBI NO: 15241101 NR Description: calcineurin B-like protein 2 (gb|AAC26009.1)
  misc_feature (1)..(230): Homolog of NCBI NO: 15236778 NR Description: calcineurin B-like protein 3
  misc_feature (1)..(230): Homolog of NCBI NO: 30687272 NR Description: calcineurin B-like protein 3 (CBL3) [Arabidopsis

SEQ ID NO: 33235 - DNA, 638 bp, Arabidopsis thaliana; identical to SEQ ID NO: 29645
  misc_feature (1)..(638): Ceres Seq. ID no. 13489850
  misc_feature: MA Experiment ID: 108434 Result: Up-regulated in Transcription
  misc_feature: MA Experiment 108434 PARAMETER Experiment Name: At_Root_Tips_cDNA_P Parameter: Tissue Value: Root Tips
  misc_feature: MA Experiment ID: 108462 Result: Down-regulated in Transcription
  misc_feature: MA Experiment 108462 PARAMETER Experiment Name: At_Germinating_Seeds_cDNA_P Parameter: Age (day) Value: 2 vs. 0
  misc_feature: MA Experiment 108462 PARAMETER Experiment Name: At_Germinating_Seeds_cDNA_P Parameter: Tissue Value: Germinating Seeds
  misc_feature: MA Experiment ID: 108463 Result: Down-regulated in Transcription
  misc_feature: MA Experiment 108463 PARAMETER Experiment Name: At_Germinating_Seeds_cDNA_P Parameter: Age (day) Value: 3 vs. 0
  misc_feature: MA Experiment 108463 PARAMETER Experiment Name: At_Germinating_Seeds_cDNA_P Parameter: Tissue Value: Germinating Seeds
  misc_feature: MA Experiment ID: 108464 Result: Down-regulated in Transcription
  misc_feature: MA Experiment 108464 PARAMETER Experiment Name: At_Germinating_Seeds_cDNA_P Parameter: Age (day) Value: 4 vs. 0
  misc_feature: MA Experiment 108464 PARAMETER Experiment Name: At_Germinating_Seeds_cDNA_P Parameter: Tissue Value: Germinating Seeds
  misc_feature: MA Experiment ID: 108573 Result: Down-regulated in Transcription
  misc_feature: MA Experiment 108573 PARAMETER Experiment Name: At_Drought_cDNA_P Parameter: Timepoint (hr) Value: 6
  misc_feature: MA Experiment 108573 PARAMETER Experiment Name: At_Drought_cDNA_P Parameter: Tissue Value: Aerial
  misc_feature: MA Experiment 108573 PARAMETER Experiment Name: At_Drought_cDNA_P Parameter: Treatment Value: Drought vs. No Drought
  misc_feature: MA Experiment ID: 20000111 Result: Down-regulated in Transcription
  misc_feature: MA Experiment 20000111 PARAMETER Experiment Name: At_42deg_Heat_cDNA_P Parameter: Temperature (deg C) Value: 42 vs. 22
  misc_feature: MA Experiment 20000111 PARAMETER Experiment Name: At_42deg_Heat_cDNA_P Parameter: Timepoint (hr) Value: 6
  misc_feature: MA Experiment 20000111 PARAMETER Experiment Name: At_42deg_Heat_cDNA_P Parameter: Tissue Value: Aerial

SEQ ID NO: 33236 - protein, 122 aa, Arabidopsis thaliana; identical to SEQ ID NO: 29646
  peptide (1)..(122): Ceres Seq. ID no. 13489851
  misc_feature (8)..(122): Pfam Name: Mitochondrial ATP synthase g subunit Pfam Description: Mitochondrial ATP synthase g subunit
  misc_feature (8)..(122): Pfam Name: Mitochondrial ATP synthase g subunit Pfam Description: Mitochondrial ATP synthase g subunit
  misc_feature (1)..(120): Homolog of NCBI NO: 34912342 NR Description: P0518F01.5 [Oryza sativa (japonica
  misc_feature (1)..(122): Homolog of NCBI NO: 15236143 NR Description: expressed protein [Arabidopsis thaliana]
  misc_feature (1)..(120): Homolog of NCBI NO: 34912342 NR Description: P0518F01.5 [Oryza sativa (japonica
  misc_feature (1)..(122): Homolog of NCBI NO: 15233603 NR Description: expressed protein [Arabidopsis thaliana]
  misc_feature (1)..(122): Homolog of NCBI NO: 15224821 NR Description: copia-related retroelement pol polyprotein
  misc_feature (1)..(122): Homolog of NCBI NO: 15236143 NR Description: expressed protein [Arabidopsis thaliana]
  misc_feature (1)..(122): Homolog of NCBI NO: 15233603 NR Description: expressed protein [Arabidopsis thaliana]
  misc_feature (1)..(122): Homolog of NCBI NO: 15224821 NR Description: copia-related retroelement pol polyprotein

SEQ ID NO: 33237 - protein, 65 aa, Arabidopsis thaliana; identical to SEQ ID NO: 29647
  peptide (1)..(65): Ceres Seq. ID no. 13489852

SEQ ID NO: 33238 - DNA, 732 bp, Arabidopsis thaliana; identical to SEQ ID NO: 29648
  misc_feature (1)..(732): Ceres Seq. ID no. 12476429
  misc_feature: MA Experiment ID: 108434 Result: Down-regulated in Transcription
  misc_feature: MA Experiment 108434 PARAMETER Experiment Name: At_Root_Tips_cDNA_P Parameter: Tissue Value: Root Tips
  misc_feature: MA Experiment ID: 108469 Result: Up-regulated in Transcription
  misc_feature: MA Experiment ID: 108488 Result: Down-regulated in Transcription
  misc_feature: MA Experiment ID: 108501 Result: Down-regulated in Transcription
  misc_feature: MA Experiment 108501 PARAMETER Experiment Name: At_ap2_floral_buds_cDNA_P Parameter: Plant Line Value: ap2 (Ler.)
  misc_feature: MA Experiment 108501 PARAMETER Experiment Name: At_ap2_floral_buds_cDNA_P Parameter: Tissue Value: Closed Flower
  misc_feature: MA Experiment ID: 108561 Result: Up-regulated in Transcription
  misc_feature: MA Experiment 108561 PARAMETER Experiment Name: At_100uM_ABA_cDNA_P Parameter: Timepoint (hr) Value: 6
  misc_feature: MA Experiment 108561 PARAMETER Experiment Name: At_100uM_ABA_cDNA_P Parameter: Tissue Value: Aerial
  misc_feature: MA Experiment 108561 PARAMETER Experiment Name: At_100uM_ABA_cDNA_P Parameter: Treatment Value: 100uM ABA vs. No Treatment
  misc_feature: MA Experiment ID: 108573 Result: Up-regulated in Transcription
  misc_feature: MA Experiment 108573 PARAMETER Experiment Name: At_Drought_cDNA_P Parameter: Timepoint (hr) Value: 6
  misc_feature: MA Experiment 108573 PARAMETER Experiment Name: At_Drought_cDNA_P Parameter: Tissue Value: Aerial
  misc_feature: MA Experiment 108573 PARAMETER Experiment Name: At_Drought_cDNA_P Parameter: Treatment Value: Drought vs. No Drought
  misc_feature: MA Experiment ID: 108576 Result: Up-regulated in Transcription
  misc_feature: MA Experiment 108576 PARAMETER Experiment Name: At_42deg_Heat_cDNA_P Parameter: Temperature (deg C) Value: 42 vs. 22
  misc_feature: MA Experiment 108576 PARAMETER Experiment Name: At_42deg_Heat_cDNA_P Parameter: Timepoint (hr) Value: 1
  misc_feature: MA Experiment 108576 PARAMETER Experiment Name: At_42deg_Heat_cDNA_P Parameter: Tissue Value: Aerial
  misc_feature: MA Experiment ID: 108579 Result: Down-regulated in Transcription
  misc_feature: MA Experiment 108579 PARAMETER Experiment Name: At_4deg_Cold_cDNA_P Parameter: Temperature (deg C) Value: 4 vs. 22
  misc_feature: MA Experiment 108579 PARAMETER Experiment Name: At_4deg_Cold_cDNA_P Parameter: Timepoint (hr) Value: 6
  misc_feature: MA Experiment 108579 PARAMETER Experiment Name: At_4deg_Cold_cDNA_P Parameter: Tissue Value: Aerial
  misc_feature: MA Experiment ID: 108585 Result: Up-regulated in Transcription
  misc_feature: MA Experiment 108585 PARAMETER Experiment Name: At_5mM_NaNP_cDNA_P Parameter: Timepoint (hr) Value: 6
  misc_feature: MA Experiment 108585 PARAMETER Experiment Name: At_5mM_NaNP_cDNA_P Parameter: Tissue Value: Aerial
  misc_feature: MA Experiment 108585 PARAMETER Experiment Name: At_5mM_NaNP_cDNA_P Parameter: Treatment Value: null
  misc_feature: MA Experiment ID: 108605 Result: Up-regulated in Transcription
  misc_feature: MA Experiment 108605 PARAMETER Experiment Name: At_100uM_ABA_cDNA_P Parameter: Timepoint (hr) Value: 6
  misc_feature: MA Experiment 108605 PARAMETER Experiment Name: At_100uM_ABA_cDNA_P Parameter: Tissue Value: Aerial
  misc_feature: MA Experiment 108605 PARAMETER Experiment Name: At_100uM_ABA_cDNA_P Parameter: Treatment Value: 100uM ABA vs. No Treatment
  misc_feature: MA Experiment ID: 108607 Result: Up-regulated in Transcription
  misc_feature: MA Experiment 108607 PARAMETER Experiment Name: At_100uM_ABA_cDNA_P Parameter: Timepoint (hr) Value: 4
  misc_feature: MA Experiment 108607 PARAMETER Experiment Name: At_100uM_ABA_cDNA_P Parameter: Tissue Value: Aerial
  misc_feature: MA Experiment 108607 PARAMETER Experiment Name: At_100uM_ABA_cDNA_P Parameter: Treatment Value: 100uM ABA vs. No Treatment
  misc_feature: MA Experiment ID: 108668 Result: Up-regulated in Transcription
  misc_feature: MA Experiment 108668 PARAMETER Experiment Name: At_2mM_SA_cDNA_P Parameter: Plant Line Value: WS
  misc_feature: MA Experiment 108668 PARAMETER Experiment Name: At_2mM_SA_cDNA_P Parameter: Timepoint (hr) Value: 6
  misc_feature: MA Experiment 108668 PARAMETER Experiment Name: At_2mM_SA_cDNA_P Parameter: Treatment Value: 2mM SA vs. No Treatment
  misc_feature: MA Experiment ID: 20000069 Result: Up-regulated in Transcription
  misc_feature: MA Experiment 20000069 PARAMETER Experiment Name: At_100uM_ABA_Mutants_cDNA_P Parameter: Plant Line Value: CS23
  misc_feature: MA Experiment 20000069 PARAMETER Experiment Name: At_100uM_ABA_Mutants_cDNA_P Parameter: Timepoint (hr) Value: 6
  misc_feature: MA Experiment 20000069 PARAMETER Experiment Name: At_100uM_ABA_Mutants_cDNA_P Parameter: Tissue Value: Aerial
  misc_feature: MA Experiment 20000069 PARAMETER Experiment Name: At_100uM_ABA_Mutants_cDNA_P Parameter: Treatment Value: 100uM ABA vs. No Treatment
  misc_feature: MA Experiment ID: 20000070 Result: Up-regulated in Transcription
  misc_feature: MA Experiment 20000070 PARAMETER Experiment Name: At_100uM_ABA_Mutants_cDNA_P Parameter: Plant Line Value: CS24
  misc_feature: MA Experiment 20000070 PARAMETER Experiment Name: At_100uM_ABA_Mutants_cDNA_P Parameter: Timepoint (hr) Value: 6
  misc_feature: MA Experiment 20000070 PARAMETER Experiment Name: At_100uM_ABA_Mutants_cDNA_P Parameter: Tissue Value: Aerial
  misc_feature: MA Experiment 20000070 PARAMETER Experiment Name: At_100uM_ABA_Mutants_cDNA_P Parameter: Treatment Value: 100uM ABA vs. No Treatment
  misc_feature: MA Experiment ID: 20000071 Result: Up-regulated in Transcription
  misc_feature: MA Experiment 20000071 PARAMETER Experiment Name: At_100uM_ABA_Mutants_cDNA_P Parameter: Plant Line Value: CS8104
  misc_feature: MA Experiment 20000071 PARAMETER Experiment Name: At_100uM_ABA_Mutants_cDNA_P Parameter: Timepoint (hr) Value: 6
  misc_feature: MA Experiment 20000071 PARAMETER Experiment Name: At_100uM_ABA_Mutants_cDNA_P Parameter: Tissue Value: Aerial
  misc_feature: MA Experiment 20000071 PARAMETER Experiment Name: At_100uM_ABA_Mutants_cDNA_P Parameter: Treatment Value: 100uM ABA vs. No Treatment
  misc_feature: MA Experiment ID: 20000072 Result: Up-regulated in Transcription
  misc_feature: MA Experiment 20000072 PARAMETER Experiment Name: At_100uM_ABA_Mutants_cDNA_P Parameter: Plant Line Value: CS8105
  misc_feature: MA Experiment 20000072 PARAMETER Experiment Name: At_100uM_ABA_Mutants_cDNA_P Parameter: Timepoint (hr) Value: 6
  misc_feature: MA Experiment 20000072 PARAMETER Experiment Name: At_100uM_ABA_Mutants_cDNA_P Parameter: Tissue Value: Aerial
  misc_feature: MA Experiment 20000072 PARAMETER Experiment Name: At_100uM_ABA_Mutants_cDNA_P Parameter: Treatment Value: 100uM ABA vs. No Treatment
  misc_feature: MA Experiment ID: 20000086 Result: Up-regulated in Transcription
  misc_feature: MA Experiment 20000086 PARAMETER Experiment Name: At_100uM_ABA_Mutants_cDNA_P Parameter: Plant Line Value: CS22
  misc_feature: MA Experiment 20000086 PARAMETER Experiment Name: At_100uM_ABA_Mutants_cDNA_P Parameter: Timepoint (hr) Value: 6
  misc_feature: MA Experiment 20000086 PARAMETER Experiment Name: At_100uM_ABA_Mutants_cDNA_P Parameter: Tissue Value: Aerial
  misc_feature: MA Experiment 20000086 PARAMETER Experiment Name: At_100uM_ABA_Mutants_cDNA_P Parameter: Treatment Value: 100uM ABA vs. No Treatment
  misc_feature: MA Experiment ID: 20000087 Result: Up-regulated in Transcription
  misc_feature: MA Experiment 20000087 PARAMETER Experiment Name: At_100uM_ABA_Mutants_cDNA_P Parameter: Plant Line Value: WS
  misc_feature: MA Experiment 20000087 PARAMETER Experiment Name: At_100uM_ABA_Mutants_cDNA_P Parameter: Timepoint (hr) Value: 6
  misc_feature: MA Experiment 20000087 PARAMETER Experiment Name: At_100uM_ABA_Mutants_cDNA_P Parameter: Tissue Value: Aerial
  misc_feature: MA Experiment 20000087 PARAMETER Experiment Name: At_100uM_ABA_Mutants_cDNA_P Parameter: Treatment Value: 100uM ABA vs. No Treatment
  misc_feature: MA Experiment ID: 20000088 Result: Up-regulated in Transcription
  misc_feature: MA Experiment 20000088 PARAMETER Experiment Name: At_100uM_ABA_Mutants_cDNA_P Parameter: Plant Line Value: Landsberg
  misc_feature: MA Experiment 20000088 PARAMETER Experiment Name: At_100uM_ABA_Mutants_cDNA_P Parameter: Timepoint (hr) Value: 6
  misc_feature: MA Experiment 20000088 PARAMETER Experiment Name: At_100uM_ABA_Mutants_cDNA_P Parameter: Tissue Value: Aerial
  misc_feature: MA Experiment 20000088 PARAMETER Experiment Name: At_100uM_ABA_Mutants_cDNA_P Parameter: Treatment Value: 100uM ABA vs. No Treatment
  misc_feature: MA Experiment ID: 20000111 Result: Up-regulated in Transcription
  misc_feature: MA Experiment 20000111 PARAMETER Experiment Name: At_42deg_Heat_cDNA_P Parameter: Temperature (deg C) Value: 42 vs. 22
  misc_feature: MA Experiment 20000111 PARAMETER Experiment Name: At_42deg_Heat_cDNA_P Parameter: Timepoint (hr) Value: 6
  misc_feature: MA Experiment 20000111 PARAMETER Experiment Name: At_42deg_Heat_cDNA_P Parameter: Tissue Value: Aerial
  misc_feature: MA Experiment ID: 20000112 Result: Up-regulated in Transcription
  misc_feature: MA Experiment 20000112 PARAMETER Experiment Name: At_42deg_Heat_cDNA_P Parameter: Temperature (deg C) Value: 42 vs. 22
  misc_feature: MA Experiment 20000112 PARAMETER Experiment Name: At_42deg_Heat_cDNA_P Parameter: Timepoint (hr) Value: 2
  misc_feature: MA Experiment 20000112 PARAMETER Experiment Name: At_42deg_Heat_cDNA_P Parameter: Tissue Value: Aerial
  misc_feature: MA Experiment ID: 20000117 Result: Up-regulated in Transcription
  misc_feature: MA Experiment 20000117 PARAMETER Experiment Name: At_100uM_ABA_Mutants_cDNA_P Parameter: Plant Line Value: Columbia
  misc_feature: MA Experiment 20000117 PARAMETER Experiment Name: At_100uM_ABA_Mutants_cDNA_P Parameter: Timepoint (hr) Value: 6
  misc_feature: MA Experiment 20000117 PARAMETER Experiment Name: At_100uM_ABA_Mutants_cDNA_P Parameter: Tissue Value: Aerial
  misc_feature: MA Experiment 20000117 PARAMETER Experiment Name: At_100uM_ABA_Mutants_cDNA_P Parameter: Treatment Value: 100uM ABA vs. No Treatment
  misc_feature: MA Experiment ID: 20000144 Result: Up-regulated in Transcription
  misc_feature: MA Experiment 20000144 PARAMETER Experiment Name: At_42deg_Heat_cDNA_P Parameter: Temperature (deg C) Value: 42 vs. 22
  misc_feature: MA Experiment 20000144 PARAMETER Experiment Name: At_42deg_Heat_cDNA_P Parameter: Timepoint (hr) Value: 1
  misc_feature: MA Experiment 20000144 PARAMETER Experiment Name: At_42deg_Heat_cDNA_P Parameter: Tissue Value: Aerial
  misc_feature: MA Experiment ID: 20000169 Result: Up-regulated in Transcription
  misc_feature: MA Experiment 20000169 PARAMETER Experiment Name: At_100uM_ABA_P Parameter: Age (day) Value: 14
  misc_feature: MA Experiment 20000169 PARAMETER Experiment Name: At_100uM_ABA_P Parameter: Organism Value: A. thaliana
  misc_feature: MA Experiment 20000169 PARAMETER Experiment Name: At_100uM_ABA_P Parameter: Plant Line Value: WS
  misc_feature: MA Experiment 20000169 PARAMETER Experiment Name: At_100uM_ABA_P Parameter: Timepoint (hr) Value: 6
  misc_feature: MA Experiment 20000169 PARAMETER Experiment Name: At_100uM_ABA_P Parameter: Tissue Value: Aerial
  misc_feature: MA Experiment 20000169 PARAMETER Experiment Name: At_100uM_ABA_P Parameter: Treatment Value: 100uM ABA vs. No Treatment
  misc_feature: MA Experiment ID: 20000171 Result: Up-regulated in Transcription
  misc_feature: MA Experiment 20000171 PARAMETER Experiment Name: At_42deg_Heat_P Parameter: Age (day) Value: 14
  misc_feature: MA Experiment 20000171 PARAMETER Experiment Name: At_42deg_Heat_P Parameter: Organism Value: A. thaliana
  misc_feature: MA Experiment 20000171 PARAMETER Experiment Name: At_42deg_Heat_P Parameter: Plant Line Value: WS
  misc_feature: MA Experiment 20000171 PARAMETER Experiment Name: At_42deg_Heat_P Parameter: Temperature (deg C) Value: 42 vs. 22
  misc_feature: MA Experiment 20000171 PARAMETER Experiment Name: At_42deg_Heat_P Parameter: Timepoint (hr) Value: 1
  misc_feature: MA Experiment 20000171 PARAMETER Experiment Name: At_42deg_Heat_P Parameter: Tissue Value: Aerial
  misc_feature: MA Experiment ID: 20000182 Result: Up-regulated in Transcription
  misc_feature: MA Experiment 20000182 PARAMETER Experiment Name: At_2mM_SA_P Parameter: Age (day) Value: 14
  misc_feature: MA Experiment 20000182 PARAMETER Experiment Name: At_2mM_SA_P Parameter: Organism Value: A. thaliana
  misc_feature: MA Experiment 20000182 PARAMETER Experiment Name: At_2mM_SA_P Parameter: Plant Line Value: WS
  misc_feature: MA Experiment 20000182 PARAMETER Experiment Name: At_2mM_SA_P Parameter: Timepoint (hr) Value: 6
  misc_feature: MA Experiment 20000182 PARAMETER Experiment Name: At_2mM_SA_P Parameter: Tissue Value: Aerial
  misc_feature: MA Experiment 20000182 PARAMETER Experiment Name: At_2mM_SA_P Parameter: Treatment Value: 2mM SA vs. No Treatment
  misc_feature: MA Experiment ID: 20000224 Result: Down-regulated in Transcription
  misc_feature: MA Experiment ID: 20000234 Result: Down-regulated in Transcription
  misc_feature: MA Experiment 20000234 PARAMETER Experiment Name: At_Siliques_P Parameter: Age (day) Value: 21
  misc_feature: MA Experiment 20000234 PARAMETER Experiment Name: At_Siliques_P Parameter: Organism Value: A. thaliana
  misc_feature: MA Experiment 20000234 PARAMETER Experiment Name: At_Siliques_P Parameter: Plant Line Value: WS
  misc_feature: MA Experiment 20000234 PARAMETER Experiment Name: At_Siliques_P Parameter: Tissue Value: Less Than 5mm Siliques vs. Whole Plant
  misc_feature: MA Experiment ID: 20000235 Result: Down-regulated in Transcription
  misc_feature: MA Experiment 20000235 PARAMETER Experiment Name: At_Siliques_P Parameter: Age (day) Value: 21
  misc_feature: MA Experiment 20000235 PARAMETER Experiment Name: At_Siliques_P Parameter: Organism Value: A. thaliana
  misc_feature: MA Experiment 20000235 PARAMETER Experiment Name: At_Siliques_P Parameter: Plant Line Value: WS
  misc_feature: MA Experiment 20000235 PARAMETER Experiment Name: At_Siliques_P Parameter: Tissue Value: 5-10mm Siliques vs. Whole Plant
  misc_feature: MA Experiment ID: 20000437 Result: Up-regulated in Transcription
  misc_feature: MA Experiment 20000437 PARAMETER Experiment Name: At_Drought_P Parameter: Age (day) Value: 8
  misc_feature: MA Experiment 20000437 PARAMETER Experiment Name: At_Drought_P Parameter: Organism Value: A. thaliana
  misc_feature: MA Experiment 20000437 PARAMETER Experiment Name: At_Drought_P Parameter: Plant Line Value: WS
  misc_feature: MA Experiment 20000437 PARAMETER Experiment Name: At_Drought_P Parameter: Timepoint (hr) Value: 24
  misc_feature: MA Experiment 20000437 PARAMETER Experiment Name: At_Drought_P Parameter: Tissue Value: Whole Plant
  misc_feature: MA Experiment 20000437 PARAMETER Experiment Name: At_Drought_P Parameter: Treatment Value: Drought vs. No Drought
  misc_feature: MA Experiment ID: 20000453 Result: Up-regulated in Transcription
  misc_feature: MA Experiment 20000453 PARAMETER Experiment Name: At_100uM_ABA_P Parameter: Age (day) Value: 15
  misc_feature: MA Experiment 20000453 PARAMETER Experiment Name: At_100uM_ABA_P Parameter: Organism Value: A. thaliana
  misc_feature: MA Experiment 20000453 PARAMETER Experiment Name: At_100uM_ABA_P Parameter: Plant Line Value: WS
  misc_feature: MA Experiment 20000453 PARAMETER Experiment Name: At_100uM_ABA_P Parameter: Timepoint (hr) Value: 24
  misc_feature: MA Experiment 20000453 PARAMETER Experiment Name: At_100uM_ABA_P Parameter: Tissue Value: Aerial
  misc_feature: MA Experiment 20000453 PARAMETER Experiment Name: At_100uM_ABA_P Parameter: Treatment Value: 100uM ABA vs. No Treatment
  misc_feature: MA Experiment ID: 20000794 Result: Up-regulated in Transcription
  misc_feature: MA Experiment 20000794 PARAMETER Experiment Name: At_Petals_P Parameter: Age (day) Value: 23-25 days
  misc_feature: MA Experiment 20000794 PARAMETER Experiment Name: At_Petals_P Parameter: Plant Line Value: WS
  misc_feature: MA Experiment 20000794 PARAMETER Experiment Name: At_Petals_P Parameter: Tissue Value: Petals vs. Whole plant
  misc_feature: MA Experiment ID: 20001450 Result: Up-regulated in Transcription
  misc_feature: MA Experiment 20001450 PARAMETER Experiment Name: At_Far-red-induction_P Parameter: Age (day) Value: 7
  misc_feature: MA Experiment 20001450 PARAMETER Experiment Name: At_Far-red-induction_P Parameter: Light Value: Far-red vs. White
  misc_feature: MA Experiment 20001450 PARAMETER Experiment Name: At_Far-red-induction_P Parameter: Organism Value: A. thaliana
  misc_feature: MA Experiment 20001450 PARAMETER Experiment Name: At_Far-red-induction_P Parameter: Plant Line Value: Columbia
  misc_feature: MA Experiment 20001450 PARAMETER Experiment Name: At_Far-red-induction_P Parameter: Timepoint (hr) Value: 8
  misc_feature: MA Experiment 20001450 PARAMETER Experiment Name: At_Far-red-induction_P Parameter: Tissue Value: Whole Plant
  misc_feature: MA Experiment ID: 20001451 Result: Up-regulated in Transcription
  misc_feature: MA Experiment 20001451 PARAMETER Experiment Name: At_Far-red-induction_P Parameter: Age (day) Value: 7
  misc_feature: MA Experiment 20001451 PARAMETER Experiment Name: At_Far-red-induction_P Parameter: Light Value: Far-red vs. White
  misc_feature: MA Experiment 20001451 PARAMETER Experiment Name: At_Far-red-induction_P Parameter: Organism Value: A. thaliana
  misc_feature: MA Experiment 20001451 PARAMETER Experiment Name: At_Far-red-induction_P Parameter: Plant Line Value: Columbia
  misc_feature: MA Experiment 20001451 PARAMETER Experiment Name: At_Far-red-induction_P Parameter: Timepoint (hr) Value: 24
  misc_feature: MA Experiment 20001451 PARAMETER Experiment Name: At_Far-red-induction_P Parameter: Tissue Value: Whole Plant
  misc_feature: MA Experiment ID: 20001557 Result: Down-regulated in Transcription
  misc_feature: MA Experiment 20001557 PARAMETER Experiment Name: At_Drought_Soil_Dry_P Parameter: Age (day) Value: 27
  misc_feature: MA Experiment 20001557 PARAMETER Experiment Name: At_Drought_Soil_Dry_P Parameter: Organism Value: A. thaliana
  misc_feature: MA Experiment 20001557 PARAMETER Experiment Name: At_Drought_Soil_Dry_P Parameter: Plant Line Value: WS
  misc_feature: MA Experiment 20001557 PARAMETER Experiment Name: At_Drought_Soil_Dry_P Parameter: Post Timepoint (hr) Value: 3
  misc_feature: MA Experiment 20001557 PARAMETER Experiment Name: At_Drought_Soil_Dry_P Parameter: Post-Treatment Value: Re-Water vs. No Drought
  misc_feature: MA Experiment 20001557 PARAMETER Experiment Name: At_Drought_Soil_Dry_P Parameter: Timepoint (day) Value: 13
  misc_feature: MA Experiment 20001557 PARAMETER Experiment Name: At_Drought_Soil_Dry_P Parameter: Treatment Value: Drought vs. No Drought
  misc_feature: MA Experiment ID: 20001558 Result: Down-regulated in Transcription
  misc_feature: MA Experiment 20001558 PARAMETER Experiment Name: At_Drought_Soil_Dry_P Parameter: Age (day) Value: 27
  misc_feature: MA Experiment 20001558 PARAMETER Experiment Name: At_Drought_Soil_Dry_P Parameter: Organism Value: A. thaliana
  misc_feature: MA Experiment 20001558 PARAMETER Experiment Name: At_Drought_Soil_Dry_P Parameter: Plant Line Value: WS
  misc_feature: MA Experiment 20001558 PARAMETER Experiment Name: At_Drought_Soil_Dry_P Parameter: Post Timepoint (hr) Value: 6
  misc_feature: MA Experiment 20001558 PARAMETER Experiment Name: At_Drought_Soil_Dry_P Parameter: Post-Treatment Value: Re-Water vs. No Drought
  misc_feature: MA Experiment 20001558 PARAMETER Experiment Name: At_Drought_Soil_Dry_P Parameter: Timepoint (day) Value: 13
  misc_feature: MA Experiment 20001558 PARAMETER Experiment Name: At_Drought_Soil_Dry_P Parameter: Treatment Value: Drought vs. No Drought
  misc_feature: MA Experiment ID: 20001904 Result: Up-regulated in Transcription
  misc_feature: MA Experiment 20001904 PARAMETER Experiment Name: At_Drought_Reproduction_P Parameter: Age (day) Value: 37
  misc_feature: MA Experiment 20001904 PARAMETER Experiment Name: At_Drought_Reproduction_P Parameter: Organism Value: A. thaliana
  misc_feature: MA Experiment 20001904 PARAMETER Experiment Name: At_Drought_Reproduction_P Parameter: Plant Line Value: WS
  misc_feature: MA Experiment 20001904 PARAMETER Experiment Name: At_Drought_Reproduction_P Parameter: Timepoint (day) Value: 7
  misc_feature: MA Experiment 20001904 PARAMETER Experiment Name: At_Drought_Reproduction_P Parameter: Tissue Value: Rosettes
  misc_feature: MA Experiment 20001904 PARAMETER Experiment Name: At_Drought_Reproduction_P Parameter: Treatment Value: Drought vs. No Drought

SEQ ID NO: 33239 - protein, 122 aa, Arabidopsis thaliana; identical to SEQ ID NO: 29649
  peptide (1)..(122): Ceres Seq. ID no. 12476430
  misc_feature (14)..(117): Pfam Name: Microtubule associated protein 1A/1B, light chain 3 Pfam Description: Microtubule associated protein 1A/1B, light
  misc_feature (1)..(117): Homolog of NCBI NO: 21592920 NR Description: putative microtubule-associated protein
  misc_feature (1)..(119): Homolog of NCBI NO: 38344173 NR Description: OSJNBa0053K19.12 [Oryza sativa (japonica
  misc_feature (1)..(118): Homolog of NCBI NO: 33146967 NR Description: putative microtubule associated protein
  misc_feature (1)..(117): Homolog of NCBI NO: 15220686 NR Description: symbiosis-related protein, putative
  misc_feature (1)..(117): Homolog of NCBI NO: 40253647 NR Description: putative microtubial binding protein
  misc_feature (1)..(118): Homolog of NCBI NO: 34595981 NR Description: microtubule-associated protein 1 light chain 3
  misc_feature (16)..(122): Homolog of NCBI NO: 11279074 NR Description: symbiosis-related like protein - Arabidopsis
  misc_feature (1)..(117): Homolog of NCBI NO: 15233593 NR Description: putative symbiosis-related protein
  misc_feature (1)..(122): Homolog of NCBI NO: 21553487 NR Description: symbiosis-related like protein [Arabidopsis
  misc_feature (1)..(122): Homolog of NCBI NO: 18415813 NR Description: symbiosis-related like protein

SEQ ID NO: 33240 - protein, 107 aa, Arabidopsis thaliana; identical to SEQ ID NO: 29650
  peptide (1)..(107): Ceres Seq. ID no. 12476431
  misc_feature (1)..(102): Pfam Name: Microtubule associated protein 1A/1B, light chain 3 Pfam Description: Microtubule associated protein 1A/1B, light
  misc_feature (1)..(102): Homolog of NCBI NO: 21592920 NR Description: putative microtubule-associated protein
  misc_feature (1)..(104): Homolog of NCBI NO: 38344173 NR Description: OSJNBa0053K19.12 [Oryza sativa (japonica
  misc_feature (1)..(103): Homolog of NCBI NO: 33146967 NR Description: putative microtubule associated protein
  misc_feature (1)..(102): Homolog of NCBI NO: 15220686 NR Description: symbiosis-related protein, putative
  misc_feature (1)..(102): Homolog of NCBI NO: 40253647 NR Description: putative microtubial binding protein
  misc_feature (1)..(103): Homolog of NCBI NO: 34595981 NR Description: microtubule-associated protein 1 light chain 3
  misc_feature (1)..(107): Homolog of NCBI NO: 11279074 NR Description: symbiosis-related like protein - Arabidopsis
  misc_feature (1)..(102): Homolog of NCBI NO: 15233593 NR Description: putative symbiosis-related protein
  misc_feature (1)..(107): Homolog of NCBI NO: 21553487 NR Description: symbiosis-related like protein [Arabidopsis
  misc_feature (1)..(107): Homolog of NCBI NO: 18415813 NR Description: symbiosis-related like protein

SEQ ID NO: 33241 - DNA, 537 bp, Arabidopsis thaliana; identical to SEQ ID NO: 29651
  misc_feature (1)..(537): Ceres Seq. ID no. 13491058
  misc_feature: MA Experiment ID: 108434 Result: Up-regulated in Transcription
  misc_feature: MA Experiment 108434 PARAMETER Experiment Name: At_Root_Tips_cDNA_P Parameter: Tissue Value: Root Tips
  misc_feature: MA Experiment ID: 108462 Result: Down-regulated in Transcription
  misc_feature: MA Experiment 108462 PARAMETER Experiment Name: At_Germinating_Seeds_cDNA_P Parameter: Age (day) Value: 2 vs. 0
  misc_feature: MA Experiment 108462 PARAMETER Experiment Name: At_Germinating_Seeds_cDNA_P Parameter: Tissue Value: Germinating Seeds
  misc_feature: MA Experiment ID: 108463 Result: Down-regulated in Transcription
  misc_feature: MA Experiment 108463 PARAMETER Experiment Name: At_Germinating_Seeds_cDNA_P Parameter: Age (day) Value: 3 vs. 0
  misc_feature: MA Experiment 108463 PARAMETER Experiment Name: At_Germinating_Seeds_cDNA_P Parameter: Tissue Value: Germinating Seeds
  misc_feature: MA Experiment ID: 108464 Result: Down-regulated in Transcription
  misc_feature: MA Experiment 108464 PARAMETER Experiment Name: At_Germinating_Seeds_cDNA_P Parameter: Age (day) Value: 4 vs. 0
  misc_feature: MA Experiment 108464 PARAMETER Experiment Name: At_Germinating_Seeds_cDNA_P Parameter: Tissue Value: Germinating Seeds

SEQ ID NO: 33242 - protein, 124 aa, Arabidopsis thaliana; identical to SEQ ID NO: 29652
  peptide (1)..(124): Ceres Seq. ID no. 13491059
  misc_feature (23)..(96): Pfam Name: Domain of unknown function (DUF543) Pfam Description: Domain of unknown function (DUF543)
  misc_feature (25)..(124): Homolog of NCBI NO: 18395129 NR Description: expressed protein [Arabidopsis thaliana]
  misc_feature (23)..(120): Homolog of NCBI NO: 25406151 NR Description: unknown protein T9N14.2 [imported] - Arabidopsis
  misc_feature (23)..(124): Homolog of NCBI NO: 21553491 NR Description: unknown [Arabidopsis thaliana]
  misc_feature (23)..(124): Homolog of NCBI NO: 18410008 NR Description: expressed protein [Arabidopsis thaliana]

SEQ ID NO: 33243 - protein, 102 aa, Arabidopsis thaliana; identical to SEQ ID NO: 29653
  peptide (1)..(102): Ceres Seq. ID no. 13491060
  misc_feature (1)..(74): Pfam Name: Domain of unknown function (DUF543) Pfam Description: Domain of unknown function (DUF543)
  misc_feature (3)..(102): Homolog of NCBI NO: 18395129 NR Description: expressed protein [Arabidopsis thaliana]
  misc_feature (1)..(98): Homolog of NCBI NO: 25406151 NR Description: unknown protein T9N14.2 [imported] - Arabidopsis
  misc_feature (1)..(102): Homolog of NCBI NO: 21553491 NR Description: unknown [Arabidopsis thaliana]
  misc_feature (1)..(102): Homolog of NCBI NO: 18410008 NR Description: expressed protein [Arabidopsis thaliana]

SEQ ID NO: 33244 - DNA, 857 bp, Arabidopsis thaliana; identical to SEQ ID NO: 29654
  misc_feature (1)..(857): Ceres Seq. ID no. 12332793
  misc_feature: MA Experiment ID: 108433 Result: Up-regulated in Transcription
  misc_feature: MA Experiment 108433 PARAMETER Experiment Name: At_rhl_Mutant2_cDNA_P Parameter: Age (day) Value: 7
  misc_feature: MA Experiment 108433 PARAMETER Experiment Name: At_rhl_Mutant2_cDNA_P Parameter: Organism Value: A. thaliana
  misc_feature: MA Experiment 108433 PARAMETER Experiment Name: At_rhl_Mutant2_cDNA_P Parameter: Plant Line Value: rhl Mutant vs. wt landsburg
  misc_feature: MA Experiment 108433 PARAMETER Experiment Name: At_rhl_Mutant2_cDNA_P Parameter: Tissue Value: Roots
  misc_feature: MA Experiment ID: 108434 Result: Down-regulated in Transcription
  misc_feature: MA Experiment 108434 PARAMETER Experiment Name: At_Root_Tips_cDNA_P Parameter: Tissue Value: Root Tips
  misc_feature: MA Experiment ID: 108435 Result: Down-regulated in Transcription
  misc_feature: MA Experiment 108435 PARAMETER Experiment Name: At_stm_Mutants_cDNA_P Parameter: Plant Line Value: wt Landsburg vs stm
  misc_feature: MA Experiment 108435 PARAMETER Experiment Name: At_stm_Mutants_cDNA_P Parameter: Tissue Value: Shoot Apical Meristem Region
  misc_feature: MA Experiment ID: 108462 Result: Up-regulated in Transcription
  misc_feature: MA Experiment 108462 PARAMETER Experiment Name: At_Germinating_Seeds_cDNA_P Parameter: Age (day) Value: 2 vs. 0
  misc_feature: MA Experiment 108462 PARAMETER Experiment Name: At_Germinating_Seeds_cDNA_P Parameter: Tissue Value: Germinating Seeds
  misc_feature: MA Experiment ID: 108463 Result: Up-regulated in Transcription
  misc_feature: MA Experiment 108463 PARAMETER Experiment Name: At_Germinating_Seeds_cDNA_P Parameter: Age (day) Value: 3 vs. 0
  misc_feature: MA Experiment 108463 PARAMETER Experiment Name: At_Germinating_Seeds_cDNA_P Parameter: Tissue Value: Germinating Seeds
  misc_feature: MA Experiment ID: 108464 Result: Up-regulated in Transcription
  misc_feature: MA Experiment 108464 PARAMETER Experiment Name: At_Germinating_Seeds_cDNA_P Parameter: Age (day) Value: 4 vs. 0
  misc_feature: MA Experiment 108464 PARAMETER Experiment Name: At_Germinating_Seeds_cDNA_P Parameter: Tissue Value: Germinating Seeds
  misc_feature: MA Experiment ID: 108488 Result: Down-regulated in Transcription
  misc_feature: MA Experiment ID: 108577 Result: Down-regulated in Transcription
  misc_feature: MA Experiment 108577 PARAMETER Experiment Name: At_42deg_Heat_cDNA_P Parameter: Temperature (deg C) Value: 42 vs. 22
  misc_feature: MA Experiment 108577 PARAMETER Experiment Name: At_42deg_Heat_cDNA_P Parameter: Timepoint (hr) Value: 6
  misc_feature: MA Experiment 108577 PARAMETER Experiment Name: At_42deg_Heat_cDNA_P Parameter: Tissue Value: Aerial
  misc_feature: MA Experiment ID: 20000090 Result: Up-regulated in Transcription
  misc_feature: MA Experiment ID: 20000111 Result: Down-regulated in Transcription
  misc_feature: MA Experiment 20000111 PARAMETER Experiment Name: At_42deg_Heat_cDNA_P Parameter: Temperature (deg C) Value: 42 vs. 22
  misc_feature: MA Experiment 20000111 PARAMETER Experiment Name: At_42deg_Heat_cDNA_P Parameter: Timepoint (hr) Value: 6
  misc_feature: MA Experiment 20000111 PARAMETER Experiment Name: At_42deg_Heat_cDNA_P Parameter: Tissue Value: Aerial
  misc_feature: MA Experiment ID: 20000113 Result: Down-regulated in Transcription
  misc_feature: MA Experiment 20000113 PARAMETER Experiment Name: At_42deg_Heat_cDNA_P Parameter: Temperature (deg C) Value: 42 vs. 22
  misc_feature: MA Experiment 20000113 PARAMETER Experiment Name: At_42deg_Heat_cDNA_P Parameter: Timepoint (hr) Value: 8
  misc_feature: MA Experiment 20000113 PARAMETER Experiment Name: At_42deg_Heat_cDNA_P Parameter: Tissue Value: Aerial

SEQ ID NO: 33245 - protein, 113 aa, Arabidopsis thaliana; identical to SEQ ID NO: 29655
  peptide (1)..(113): Ceres Seq. ID no. 12332794
  misc_feature (25)..(110): Pfam Name: Protein of unknown function (DUF567) Pfam Description: Protein of unknown function (DUF567)
  misc_feature (26)..(110): Homolog of NCBI NO: 17979321 NR Description: unknown protein [Arabidopsis thaliana]
  misc_feature (27)..(107): Homolog of NCBI NO: 15228906 NR Description: hypothetical protein; protein id: At3g16900.1
  misc_feature (18)..(109): Homolog of NCBI NO: 27818079 NR Description: OSJNBa0086N05.7 [Oryza sativa (japonica
  misc_feature (27)..(93): Homolog of NCBI NO: 15229837 NR Description: hypothetical protein; protein id: At3g11740.1
  misc_feature (26)..(110): Homolog of NCBI NO: 15217694 NR Description: unknown protein; protein id: At1g33840.1
  misc_feature (1)..(110): Homolog of NCBI NO: 9665105 NR Description: Hypothetical protein [Arabidopsis thaliana]
  misc_feature (1)..(110): Homolog of NCBI NO: 25352417 NR Description: hypothetical protein T3M13.14 - Arabidopsis
  misc_feature (1)..(110): Homolog of NCBI NO: 30679390 NR Description: expressed protein [Arabidopsis thaliana]
  misc_feature (1)..(110): Homolog of NCBI NO: 18413737 NR Description: expressed protein
  misc_feature (1)..(110): Homolog of NCBI NO: 21553506 NR Description: unknown [Arabidopsis thaliana]

SEQ ID NO: 33246 - protein, 76 aa, Arabidopsis thaliana; identical to SEQ ID NO: 29656
  peptide (1)..(76): Ceres Seq. ID no. 12332795
  misc_feature (10)..(73): Pfam Name: Protein of unknown function (DUF567) Pfam Description: Protein of unknown function (DUF567)
  misc_feature (12)..(76): Homolog of NCBI NO: 30694393 NR Description: expressed protein [Arabidopsis thaliana]
  misc_feature (16)..(74): Homolog of NCBI NO: 15228906 NR Description: hypothetical protein; protein id: At3g16900.1
  misc_feature (16)..(73): Homolog of NCBI NO: 27818079 NR Description: OSJNBa0086N05.7 [Oryza sativa (japonica
  misc_feature (27)..(74): Homolog of NCBI NO: 15229837 NR Description: hypothetical protein; protein id: At3g11740.1
  misc_feature (10)..(73): Homolog of NCBI NO: 15217694 NR Description: unknown protein; protein id: At1g33840.1
  misc_feature (10)..(73): Homolog of NCBI NO: 9665105 NR Description: Hypothetical protein [Arabidopsis thaliana]
  misc_feature (10)..(76): Homolog of NCBI NO: 25352417 NR Description: hypothetical protein T3M13.14 - Arabidopsis
  misc_feature (10)..(74): Homolog of NCBI NO: 30679390 NR Description: expressed protein [Arabidopsis thaliana]
  misc_feature (10)..(76): Homolog of NCBI NO: 18413737 NR Description: expressed protein
  misc_feature (10)..(76): Homolog of NCBI NO: 21553506 NR Description: unknown [Arabidopsis thaliana]

SEQ ID NO: 33247 - protein, 74 aa, Arabidopsis thaliana; identical to SEQ ID NO: 29657
  peptide (1)..(74): Ceres Seq. ID no. 12332796
  misc_feature (1)..(71): Pfam Name: Protein of unknown function (DUF567) Pfam Description: Protein of unknown function (DUF567)
  misc_feature (1)..(71): Homolog of NCBI NO: 17979321 NR Description: unknown protein [Arabidopsis thaliana]
  misc_feature (1)..(68): Homolog of NCBI NO: 15228906 NR Description: hypothetical protein; protein id: At3g16900.1
  misc_feature (1)..(70): Homolog of NCBI NO: 27818079 NR Description: OSJNBa0086N05.7 [Oryza sativa (japonica
  misc_feature (1)..(54): Homolog of NCBI NO: 15229837 NR Description: hypothetical protein; protein id: At3g11740.1
  misc_feature (1)..(71): Homolog of NCBI NO: 15217694 NR Description: unknown protein; protein id: At1g33840.1
  misc_feature (1)..(71): Homolog of NCBI NO: 9665105 NR Description: Hypothetical protein [Arabidopsis thaliana]
  misc_feature (1)..(71): Homolog of NCBI NO: 25352417 NR Description: hypothetical protein T3M13.14 - Arabidopsis
  misc_feature (1)..(71): Homolog of NCBI NO: 30679390 NR Description: expressed protein [Arabidopsis thaliana]
  misc_feature (1)..(71): Homolog of NCBI NO: 18413737 NR Description: expressed protein
  misc_feature (1)..(71): Homolog of NCBI NO: 21553506 NR Description: unknown [Arabidopsis thaliana]

SEQ ID NO: 33248 - DNA, 1558 bp, Arabidopsis thaliana; identical to SEQ ID NO: 22226
  misc_feature (1)..(1558): Ceres Seq. ID no. 13487458
  misc_feature: MA Experiment ID: 108434 Result: Up-regulated in Transcription
  misc_feature: MA Experiment 108434 PARAMETER Experiment Name: At_Root_Tips_cDNA_P Parameter: Tissue Value: Root Tips
  misc_feature: MA Experiment ID: 108462 Result: Down-regulated in Transcription
  misc_feature: MA Experiment 108462 PARAMETER Experiment Name: At_Germinating_Seeds_cDNA_P Parameter: Age (day) Value: 2 vs. 0
  misc_feature: MA Experiment 108462 PARAMETER Experiment Name: At_Germinating_Seeds_cDNA_P Parameter: Tissue Value: Germinating Seeds
  misc_feature: MA Experiment ID: 108463 Result: Down-regulated in Transcription
  misc_feature: MA Experiment 108463 PARAMETER Experiment Name: At_Germinating_Seeds_cDNA_P Parameter: Age (day) Value: 3 vs. 0
  misc_feature: MA Experiment 108463 PARAMETER Experiment Name: At_Germinating_Seeds_cDNA_P Parameter: Tissue Value: Germinating Seeds
  misc_feature: MA Experiment ID: 108464 Result: Down-regulated in Transcription
  misc_feature: MA Experiment 108464 PARAMETER Experiment Name: At_Germinating_Seeds_cDNA_P Parameter: Age (day) Value: 4 vs. 0
  misc_feature: MA Experiment 108464 PARAMETER Experiment Name: At_Germinating_Seeds_cDNA_P Parameter: Tissue Value: Germinating Seeds
  misc_feature: MA Experiment ID: 108573 Result: Down-regulated in Transcription
  misc_feature: MA Experiment 108573 PARAMETER Experiment Name: At_Drought_cDNA_P Parameter: Timepoint (hr) Value: 6
  misc_feature: MA Experiment 108573 PARAMETER Experiment Name: At_Drought_cDNA_P Parameter: Tissue Value: Aerial
  misc_feature: MA Experiment 108573 PARAMETER Experiment Name: At_Drought_cDNA_P Parameter: Treatment Value: Drought vs. No Drought
  misc_feature: MA Experiment ID: 20000224 Result: Up-regulated in Transcription
  misc_feature: MA Experiment ID: 20001451 Result: Up-regulated in Transcription
  misc_feature: MA Experiment 20001451 PARAMETER Experiment Name: At_Far-red-induction_P Parameter: Age (day) Value: 7
  misc_feature: MA Experiment 20001451 PARAMETER Experiment Name: At_Far-red-induction_P Parameter: Light Value: Far-red vs. White
  misc_feature: MA Experiment 20001451 PARAMETER Experiment Name: At_Far-red-induction_P Parameter: Organism Value: A. thaliana
  misc_feature: MA Experiment 20001451 PARAMETER Experiment Name: At_Far-red-induction_P Parameter: Plant Line Value: Columbia
  misc_feature: MA Experiment 20001451 PARAMETER Experiment Name: At_Far-red-induction_P Parameter: Timepoint (hr) Value: 24
  misc_feature: MA Experiment 20001451 PARAMETER Experiment Name: At_Far-red-induction_P Parameter: Tissue Value: Whole Plant
  misc_feature: MA Experiment ID: 20001557 Result: Up-regulated in Transcription
  misc_feature: MA Experiment 20001557 PARAMETER Experiment Name: At_Drought_Soil_Dry_P Parameter: Age (day) Value: 27
  misc_feature: MA Experiment 20001557 PARAMETER Experiment Name: At_Drought_Soil_Dry_P Parameter: Organism Value: A. thaliana
  misc_feature: MA Experiment 20001557 PARAMETER Experiment Name: At_Drought_Soil_Dry_P Parameter: Plant Line Value: WS
  misc_feature: MA Experiment 20001557 PARAMETER Experiment Name: At_Drought_Soil_Dry_P Parameter: Post Timepoint (hr) Value: 3
  misc_feature: MA Experiment 20001557 PARAMETER Experiment Name: At_Drought_Soil_Dry_P Parameter: Post-Treatment Value: Re-Water vs. No Drought
  misc_feature: MA Experiment 20001557 PARAMETER Experiment Name: At_Drought_Soil_Dry_P Parameter: Timepoint (day) Value: 13
  misc_feature: MA Experiment 20001557 PARAMETER Experiment Name: At_Drought_Soil_Dry_P Parameter: Treatment Value: Drought vs. No Drought
  misc_feature: MA Experiment ID: 20001558 Result: Up-regulated in Transcription
  misc_feature: MA Experiment 20001558 PARAMETER Experiment Name: At_Drought_Soil_Dry_P Parameter: Age (day) Value: 27
  misc_feature: MA Experiment 20001558 PARAMETER Experiment Name: At_Drought_Soil_Dry_P Parameter: Organism Value: A. thaliana
  misc_feature: MA Experiment 20001558 PARAMETER Experiment Name: At_Drought_Soil_Dry_P Parameter: Plant Line Value: WS
  misc_feature: MA Experiment 20001558 PARAMETER Experiment Name: At_Drought_Soil_Dry_P Parameter: Post Timepoint (hr) Value: 6
  misc_feature: MA Experiment 20001558 PARAMETER Experiment Name: At_Drought_Soil_Dry_P Parameter: Post-Treatment Value: Re-Water vs. No Drought
  misc_feature: MA Experiment 20001558 PARAMETER Experiment Name: At_Drought_Soil_Dry_P Parameter: Timepoint (day) Value: 13
  misc_feature: MA Experiment 20001558 PARAMETER Experiment Name: At_Drought_Soil_Dry_P Parameter: Treatment Value: Drought vs. No Drought

SEQ ID NO: 33249 - protein, 415 aa, Arabidopsis thaliana; identical to SEQ ID NO: 22227
  peptide (1)..(415): Ceres Seq. ID no. 13487459
  misc_feature (88)..(336): Pfam Name: Nucleosome assembly protein (NAP) Pfam Description: Nucleosome assembly protein (NAP)
  misc_feature (88)..(336): Pfam Name: Nucleosome assembly protein (NAP) Pfam Description: Nucleosome assembly protein (NAP)
  misc_feature (61)..(389): Homolog of NCBI NO: 32414795 NR Description: hypothetical protein [Neurospora crassa]
  misc_feature (37)..(415): Homolog of NCBI NO: 21898560 NR Description: nucleosome/chromatin assembly factor group A [Zea
  misc_feature (37)..(415): Homolog of NCBI NO: 2129840 NR Description: nucleosome assembly protein 1 - soybean
  misc_feature (37)..(415): Homolog of NCBI NO: 29569109 NR Description: nucleosome/chromatin assembly factor group A [Zea
  misc_feature (37)..(415): Homolog of NCBI NO: 7488816 NR Description: nucleosome assembly protein 1 - garden pea
  misc_feature (61)..(389): Homolog of NCBI NO: 32414795 NR Description: hypothetical protein [Neurospora crassa]
  misc_feature (37)..(415): Homolog of NCBI NO: 2129840 NR Description: nucleosome assembly protein 1 - soybean
  misc_feature (37)..(415): Homolog of NCBI NO: 7488816 NR Description: nucleosome assembly protein 1 - garden pea
  misc_feature (37)..(415): Homolog of NCBI NO: 15224782 NR Description: nucleosome assembly protein -related [Arabidopsis
  misc_feature (37)..(415): Homolog of NCBI NO: 18423918 NR Description: nucleosome assembly protein [Arabidopsis
  misc_feature (37)..(415): Homolog of NCBI NO: 8777435 NR Description: nucleosome assembly protein [Arabidopsis thaliana]
  misc_feature (36)..(415): Homolog of NCBI NO: 549975 NR Description: nucleosome assembly protein I-like protein
  misc_feature (37)..(415): Homolog of NCBI NO: 15236115 NR Description: nucleosome assembly protein I-related protein
  misc_feature (37)..(415): Homolog of NCBI NO: 29569109 NR Description: nucleosome/chromatin assembly factor group A [Zea
  misc_feature (37)..(415): Homolog of NCBI NO: 21898560 NR Description: nucleosome/chromatin assembly factor group A [Zea
  misc_feature (37)..(415): Homolog of NCBI NO: 15236115 NR Description: nucleosome assembly protein I-related protein
  misc_feature (36)..(415): Homolog of NCBI NO: 549975 NR Description: nucleosome assembly protein I-like protein
  misc_feature (37)..(415): Homolog of NCBI NO: 8777435 NR Description: nucleosome assembly protein [Arabidopsis thaliana]
  misc_feature (37)..(415): Homolog of NCBI NO: 18423918 NR Description: nucleosome assembly protein [Arabidopsis
  misc_feature (37)..(415): Homolog of NCBI NO: 15224782 NR Description: nucleosome assembly protein -related [Arabidopsis

SEQ ID NO: 33250 - protein, 379 aa, Arabidopsis thaliana; identical to SEQ ID NO: 22228
  peptide (1)..(379): Ceres Seq. ID no. 13487460
  misc_feature (52)..(300): Pfam Name: Nucleosome assembly protein (NAP) Pfam Description: Nucleosome assembly protein (NAP)
  misc_feature (52)..(300): Pfam Name: Nucleosome assembly protein (NAP) Pfam Description: Nucleosome assembly protein (NAP)
  misc_feature (25)..(353): Homolog of NCBI NO: 32414795 NR Description: hypothetical protein [Neurospora crassa]
  misc_feature (1)..(379): Homolog of NCBI NO: 21898560 NR Description: nucleosome/chromatin assembly factor group A [Zea
  misc_feature (1)..(379): Homolog of NCBI NO: 2129840 NR Description: nucleosome assembly protein 1 - soybean
  misc_feature (1)..(379): Homolog of NCBI NO: 29569109 NR Description: nucleosome/chromatin assembly factor group A [Zea
  misc_feature (1)..(379): Homolog of NCBI NO: 7488816 NR Description: nucleosome assembly protein 1 - garden pea
  misc_feature (25)..(353): Homolog of NCBI NO: 32414795 NR Description: hypothetical protein [Neurospora crassa]
  misc_feature (1)..(379): Homolog of NCBI NO: 2129840 NR Description: nucleosome assembly protein 1 - soybean
  misc_feature (1)..(379): Homolog of NCBI NO: 7488816 NR Description: nucleosome assembly protein 1 - garden pea
  misc_feature (1)..(379): Homolog of NCBI NO: 15224782 NR Description: nucleosome assembly protein -related [Arabidopsis
  misc_feature (1)..(379): Homolog of NCBI NO: 18423918 NR Description: nucleosome assembly protein [Arabidopsis
  misc_feature (1)..(379): Homolog of NCBI NO: 8777435 NR Description: nucleosome assembly protein [Arabidopsis thaliana]
  misc_feature (1)..(379): Homolog of NCBI NO: 549975 NR Description: nucleosome assembly protein I-like protein
  misc_feature (1)..(379): Homolog of NCBI NO: 15236115 NR Description: nucleosome assembly protein I-related protein
  misc_feature (1)..(379): Homolog of NCBI NO: 29569109 NR Description: nucleosome/chromatin assembly factor group A [Zea
  misc_feature (1)..(379): Homolog of NCBI NO: 21898560 NR Description: nucleosome/chromatin assembly factor group A [Zea
  misc_feature (1)..(379): Homolog of NCBI NO: 15236115 NR Description: nucleosome assembly protein I-related protein
  misc_feature (1)..(379): Homolog of NCBI NO: 549975 NR Description: nucleosome assembly protein I-like protein
  misc_feature (1)..(379): Homolog of NCBI NO: 8777435 NR Description: nucleosome assembly protein [Arabidopsis thaliana]
  misc_feature (1)..(379): Homolog of NCBI NO: 18423918 NR Description: nucleosome assembly protein [Arabidopsis
  misc_feature (1)..(379): Homolog of NCBI NO: 15224782 NR Description: nucleosome assembly protein -related [Arabidopsis

SEQ ID NO: 33251 - protein, 372 aa, Arabidopsis thaliana; identical to SEQ ID NO: 22229
  peptide (1)..(372): Ceres Seq. ID no. 13487461
  misc_feature (45)..(293): Pfam Name: Nucleosome assembly protein (NAP) Pfam Description: Nucleosome assembly protein (NAP)
  misc_feature (45)..(293): Pfam Name: Nucleosome assembly protein (NAP) Pfam Description: Nucleosome assembly protein (NAP)
  misc_feature (18)..(346): Homolog of NCBI NO: 32414795 NR Description: hypothetical protein [Neurospora crassa]
  misc_feature (1)..(372): Homolog of NCBI NO: 21898560 NR Description: nucleosome/chromatin assembly factor group A [Zea
  misc_feature (1)..(372): Homolog of NCBI NO: 2129840 NR Description: nucleosome assembly protein 1 - soybean
  misc_feature (1)..(372): Homolog of NCBI NO: 29569109 NR Description: nucleosome/chromatin assembly factor group A [Zea
  misc_feature (1)..(372): Homolog of NCBI NO: 7488816 NR Description: nucleosome assembly protein 1 - garden pea
  misc_feature (18)..(346): Homolog of NCBI NO: 32414795 NR Description: hypothetical protein [Neurospora crassa]
  misc_feature (1)..(372): Homolog of NCBI NO: 2129840 NR Description: nucleosome assembly protein 1 - soybean
  misc_feature (1)..(372): Homolog of NCBI NO: 7488816 NR Description: nucleosome assembly protein 1 - garden pea
  misc_feature (1)..(372): Homolog of NCBI NO: 15224782 NR Description: nucleosome assembly protein -related [Arabidopsis
  misc_feature (1)..(372): Homolog of NCBI NO: 18423918 NR Description: nucleosome assembly protein [Arabidopsis
  misc_feature (1)..(372): Homolog of NCBI NO: 8777435 NR Description: nucleosome assembly protein [Arabidopsis thaliana]
  misc_feature (1)..(372): Homolog of NCBI NO: 549975 NR Description: nucleosome assembly protein I-like protein
  misc_feature (1)..(372): Homolog of NCBI NO: 15236115 NR Description: nucleosome assembly protein I-related protein
  misc_feature (1)..(372): Homolog of NCBI NO: 29569109 NR Description: nucleosome/chromatin assembly factor group A [Zea
  misc_feature (1)..(372): Homolog of NCBI NO: 21898560 NR Description: nucleosome/chromatin assembly factor group A [Zea
  misc_feature (1)..(372): Homolog of NCBI NO: 15236115 NR Description: nucleosome assembly protein I-related protein
  misc_feature (1)..(372): Homolog of NCBI NO: 549975 NR Description: nucleosome assembly protein I-like protein
  misc_feature (1)..(372): Homolog of NCBI NO: 8777435 NR Description: nucleosome assembly protein [Arabidopsis thaliana]
  misc_feature (1)..(372): Homolog of NCBI NO: 18423918 NR Description: nucleosome assembly protein [Arabidopsis
  misc_feature (1)..(372): Homolog of NCBI NO: 15224782 NR Description: nucleosome assembly protein -related [Arabidopsis

SEQ ID NO: 33252 - DNA, 1004 bp, Arabidopsis thaliana; identical to SEQ ID NO: 29662
  misc_feature (1)..(1004): Ceres Seq. ID no. 12332763
  misc_feature: MA Experiment ID: 20000328 Result: Up-regulated in Transcription
  misc_feature: MA Experiment 20000328 PARAMETER Experiment Name: At_42deg_Heat_Sub_P Parameter: Age (day) Value: 14
  misc_feature: MA Experiment 20000328 PARAMETER Experiment Name: At_42deg_Heat_Sub_P Parameter: Organism Value: A. thaliana
  misc_feature: MA Experiment 20000328 PARAMETER Experiment Name: At_42deg_Heat_Sub_P Parameter: Plant Line Value: WS
  misc_feature: MA Experiment 20000328 PARAMETER Experiment Name: At_42deg_Heat_Sub_P Parameter: Temperature (deg C) Value: 42 vs. 22
  misc_feature: MA Experiment 20000328 PARAMETER Experiment Name: At_42deg_Heat_Sub_P Parameter: Timepoint (hr) Value: 6
  misc_feature: MA Experiment 20000328 PARAMETER Experiment Name: At_42deg_Heat_Sub_P Parameter: Tissue Value: Aerial

SEQ ID NO: 33253 - protein, 237 aa, Arabidopsis thaliana; identical to SEQ ID NO: 29663
  peptide (1)..(237): Ceres Seq. ID no. 12332764
  misc_feature (86)..(229): Pfam Name: Fatty acid hydroxylase Pfam Description: Fatty acid hydroxylase
  misc_feature (8)..(226): Homolog of NCBI NO: 19115335 NR Description: putative fatty acid hydroxylase
  misc_feature (8)..(226): Homolog of NCBI NO: 18376335 NR Description: related to fatty acid hydroxylase [Neurospora
  misc_feature (8)..(231): Homolog of NCBI NO: 40746791 NR Description: hypothetical protein AN0918.2 [Aspergillus
  misc_feature (8)..(226): Homolog of NCBI NO: 18447515 NR Description: RE63157p [Drosophila melanogaster]
  misc_feature (8)..(227): Homolog of NCBI NO: 17505701 NR Description: Fatty acid hydroxylase (36.3 kD) [Caenorhabditis
  misc_feature (8)..(227): Homolog of NCBI NO: 39589620 NR Description: Hypothetical protein CBG12227 [Caenorhabditis
  misc_feature (8)..(233): Homolog of NCBI NO: 6323928 NR Description: Required for the hydroxylation of the very long
  misc_feature (1)..(235): Homolog of NCBI NO: 34897078 NR Description: putative fatty acid hydroxylase
  misc_feature (1)..(236): Homolog of NCBI NO: 15233426 NR Description: fatty acid hydroxylase - like protein
  misc_feature (1)..(237): Homolog of NCBI NO: 15226828 NR Description: fatty acid hydroxylase (FAH1)

SEQ ID NO: 33254 - protein, 162 aa, Arabidopsis thaliana; identical to SEQ ID NO: 29664
  peptide (1)..(162): Ceres Seq. ID no. 12332765
  misc_feature (11)..(154): Pfam Name: Fatty acid hydroxylase Pfam Description: Fatty acid hydroxylase
  misc_feature (1)..(151): Homolog of NCBI NO: 19115335 NR Description: putative fatty acid hydroxylase
  misc_feature (1)..(151): Homolog of NCBI NO: 18376335 NR Description: related to fatty acid hydroxylase [Neurospora
  misc_feature (1)..(156): Homolog of NCBI NO: 40746791 NR Description: hypothetical protein AN0918.2 [Aspergillus
  misc_feature (1)..(151): Homolog of NCBI NO: 18447515 NR Description: RE63157p [Drosophila melanogaster]
  misc_feature (1)..(152): Homolog of NCBI NO: 17505701 NR Description: Fatty acid hydroxylase (36.3 kD) [Caenorhabditis
  misc_feature (1)..(152): Homolog of NCBI NO: 39589620 NR Description: Hypothetical protein CBG12227 [Caenorhabditis
  misc_feature (1)..(158): Homolog of NCBI NO: 6323928 NR Description: Required for the hydroxylation of the very long
  misc_feature (1)..(160): Homolog of NCBI NO: 34897078 NR Description: putative fatty acid hydroxylase
  misc_feature (1)..(161): Homolog of NCBI NO: 15233426 NR Description: fatty acid hydroxylase - like protein
  misc_feature (1)..(162): Homolog of NCBI NO: 15226828 NR Description: fatty acid hydroxylase (FAH1)

SEQ ID NO: 33255 - protein, 149 aa, Arabidopsis thaliana; identical to SEQ ID NO: 29665
  peptide (1)..(149): Ceres Seq. ID no. 12332766
  misc_feature (1)..(141): Pfam Name: Fatty acid hydroxylase Pfam Description: Fatty acid hydroxylase
  misc_feature (1)..(138): Homolog of NCBI NO: 19115335 NR Description: putative fatty acid hydroxylase
  misc_feature (1)..(138): Homolog of NCBI NO: 18376335 NR Description: related to fatty acid hydroxylase [Neurospora
  misc_feature (1)..(143): Homolog of NCBI NO: 40746791 NR Description: hypothetical protein AN0918.2 [Aspergillus
  misc_feature (1)..(138): Homolog of NCBI NO: 18447515 NR Description: RE63157p [Drosophila melanogaster]
  misc_feature (1)..(139): Homolog of NCBI NO: 17505701 NR Description: Fatty acid hydroxylase (36.3 kD) [Caenorhabditis
  misc_feature (1)..(139): Homolog of NCBI NO: 39589620 NR Description: Hypothetical protein CBG12227 [Caenorhabditis
  misc_feature (1)..(145): Homolog of NCBI NO: 6323928 NR Description: Required for the hydroxylation of the very long
  misc_feature (1)..(147): Homolog of NCBI NO: 34897078 NR Description: putative fatty acid hydroxylase
  misc_feature (1)..(148): Homolog of NCBI NO: 15233426 NR Description: fatty acid hydroxylase - like protein
  misc_feature (1)..(149): Homolog of NCBI NO: 15226828 NR Description: fatty acid hydroxylase (FAH1)

SEQ ID NO: 33256 - DNA, 636 bp, Arabidopsis thaliana; identical to SEQ ID NO: 22820
  misc_feature (1)..(636): Ceres Seq. ID no. 12562389
  misc_feature: MA Experiment ID: 108434 Result: Down-regulated in Transcription
  misc_feature: MA Experiment 108434 PARAMETER Experiment Name: At_Root_Tips_cDNA_P Parameter: Tissue Value: Root Tips
  misc_feature: MA Experiment ID: 108435 Result: Down-regulated in Transcription
  misc_feature: MA Experiment 108435 PARAMETER Experiment Name: At_stm_Mutants_cDNA_P Parameter: Plant Line Value: wt Landsburg vs stm
  misc_feature: MA Experiment 108435 PARAMETER Experiment Name: At_stm_Mutants_cDNA_P Parameter: Tissue Value: Shoot Apical Meristem Region
  misc_feature: MA Experiment ID: 108461 Result: Up-regulated in Transcription
  misc_feature: MA Experiment 108461 PARAMETER Experiment Name: At_Germinating_Seeds_cDNA_P Parameter: Age (day) Value: 1 vs. 0
  misc_feature: MA Experiment 108461 PARAMETER Experiment Name: At_Germinating_Seeds_cDNA_P Parameter: Tissue Value: Germinating Seeds
  misc_feature: MA Experiment ID: 108462 Result: Up-regulated in Transcription
  misc_feature: MA Experiment 108462 PARAMETER Experiment Name: At_Germinating_Seeds_cDNA_P Parameter: Age (day) Value: 2 vs. 0
  misc_feature: MA Experiment 108462 PARAMETER Experiment Name: At_Germinating_Seeds_cDNA_P Parameter: Tissue Value: Germinating Seeds
  misc_feature: MA Experiment ID: 108488 Result: Up-regulated in Transcription
  misc_feature: MA Experiment ID: 108489 Result: Down-regulated in Transcription
  misc_feature: MA Experiment ID: 20000180 Result: Up-regulated in Transcription
  misc_feature: MA Experiment 20000180 PARAMETER Experiment Name: At_Germinating_Seeds_P Parameter: Age (hr) Value: 24 vs. 0
  misc_feature: MA Experiment 20000180 PARAMETER Experiment Name: At_Germinating_Seeds_P Parameter: Tissue Value: Germinating Seeds
  misc_feature: MA Experiment ID: 20000185 Result: Down-regulated in Transcription
  misc_feature: MA Experiment 20000185 PARAMETER Experiment Name: At_Roots__P Parameter: Age (day) Value: 7 vs. 21
  misc_feature: MA Experiment 20000185 PARAMETER Experiment Name: At_Roots__P Parameter: Organism Value: A. thaliana
  misc_feature: MA Experiment 20000185 PARAMETER Experiment Name: At_Roots__P Parameter: Tissue Value: Roots vs. Whole Plant
  misc_feature: MA Experiment ID: 20000227 Result: Down-regulated in Transcription
  misc_feature: MA Experiment 20000227 PARAMETER Experiment Name: At_Root-Tips-vs-Tops_P Parameter: Tissue Value: Root Tips vs. Root Tops
  misc_feature: MA Experiment ID: 20000264 Result: Down-regulated in Transcription
  misc_feature: MA Experiment 20000264 PARAMETER Experiment Name: At_Open_Flower_P Parameter: Age (day) Value: 21
  misc_feature: MA Experiment 20000264 PARAMETER Experiment Name: At_Open_Flower_P Parameter: Plant Line Value: WS
  misc_feature: MA Experiment 20000264 PARAMETER Experiment Name: At_Open_Flower_P Parameter: Tissue Value: Open Flower vs. Whole Plant
  misc_feature: MA Experiment ID: 20000286 Result: Down-regulated in Transcription
  misc_feature: MA Experiment 20000286 PARAMETER Experiment Name: At_Open_Flower_P Parameter: Age (day) Value: 21
  misc_feature: MA Experiment 20000286 PARAMETER Experiment Name: At_Open_Flower_P Parameter: Plant Line Value: WS
  misc_feature: MA Experiment 20000286 PARAMETER Experiment Name: At_Open_Flower_P Parameter: Tissue Value: Half Open vs. Whole Plant
  misc_feature: MA Experiment ID: 20000439 Result: Down-regulated in Transcription
  misc_feature: MA Experiment 20000439 PARAMETER Experiment Name: At_Roots__P Parameter: Age (day) Value: 14 vs. 21
  misc_feature: MA Experiment 20000439 PARAMETER Experiment Name: At_Roots__P Parameter: Organism Value: A. thaliana
  misc_feature: MA Experiment 20000439 PARAMETER Experiment Name: At_Roots__P Parameter: Tissue Value: Roots vs. Whole Plant
  misc_feature: MA Experiment ID: 20000794 Result: Down-regulated in Transcription
  misc_feature: MA Experiment 20000794 PARAMETER Experiment Name: At_Petals_P Parameter: Age (day) Value: 23-25 days
  misc_feature: MA Experiment 20000794 PARAMETER Experiment Name: At_Petals_P Parameter: Plant Line Value: WS
  misc_feature: MA Experiment 20000794 PARAMETER Experiment Name: At_Petals_P Parameter: Tissue Value: Petals vs. Whole plant
  misc_feature: MA Experiment ID: 20001557 Result: Down-regulated in Transcription
  misc_feature: MA Experiment 20001557 PARAMETER Experiment Name: At_Drought_Soil_Dry_P Parameter: Age (day) Value: 27
  misc_feature: MA Experiment 20001557 PARAMETER Experiment Name: At_Drought_Soil_Dry_P Parameter: Organism Value: A. thaliana
  misc_feature: MA Experiment 20001557 PARAMETER Experiment Name: At_Drought_Soil_Dry_P Parameter: Plant Line Value: WS
  misc_feature: MA Experiment 20001557 PARAMETER Experiment Name: At_Drought_Soil_Dry_P Parameter: Post Timepoint (hr) Value: 3
  misc_feature: MA Experiment 20001557 PARAMETER Experiment Name: At_Drought_Soil_Dry_P Parameter: Post-Treatment Value: Re-Water vs. No Drought
  misc_feature: MA Experiment 20001557 PARAMETER Experiment Name: At_Drought_Soil_Dry_P Parameter: Timepoint (day) Value: 13
  misc_feature: MA Experiment 20001557 PARAMETER Experiment Name: At_Drought_Soil_Dry_P Parameter: Treatment Value: Drought vs. No Drought
  misc_feature: MA Experiment ID: 20001757 Result: Up-regulated in Transcription
  misc_feature: MA Experiment 20001757 PARAMETER Experiment Name: At_50mM_NH4NO3_L-to-H_P Parameter: Timepoint (hr) Value: 6
  misc_feature: MA Experiment 20001757 PARAMETER Experiment Name: At_50mM_NH4NO3_L-to-H_P Parameter: Tissue Value: Leaf
  misc_feature: MA Experiment 20001757 PARAMETER Experiment Name: At_50mM_NH4NO3_L-to-H_P Parameter: Treatment Value: 50mM NH4NO3 vs 100mM Mannitol
  misc_feature: MA Experiment ID: 20001908 Result: Down-regulated in Transcription
  misc_feature: MA Experiment 20001908 PARAMETER Experiment Name: At_Drought_Reproduction_P Parameter: Age (day) Value: 40
  misc_feature: MA Experiment 20001908 PARAMETER Experiment Name: At_Drought_Reproduction_P Parameter: Organism Value: A. thaliana
  misc_feature: MA Experiment 20001908 PARAMETER Experiment Name: At_Drought_Reproduction_P Parameter: Plant Line Value: WS
  misc_feature: MA Experiment 20001908 PARAMETER Experiment Name: At_Drought_Reproduction_P Parameter: Timepoint (day) Value: 10
  misc_feature: MA Experiment 20001908 PARAMETER Experiment Name: At_Drought_Reproduction_P Parameter: Tissue Value: Siliques
  misc_feature: MA Experiment 20001908 PARAMETER Experiment Name: At_Drought_Reproduction_P Parameter: Treatment Value: Drought vs. No Drought

SEQ ID NO: 33257 - protein, 140 aa, Arabidopsis thaliana; identical to SEQ ID NO: 22821
  peptide (1)..(140): Ceres Seq. ID no. 12562390
  misc_feature (6)..(140): Homolog of NCBI NO: 6996562 NR Description: putative 16kDa membrane protein [Nicotiana
  misc_feature (1)..(140): Homolog of NCBI NO: 22531014 NR Description: expressed protein [Arabidopsis thaliana]
  misc_feature (1)..(140): Homolog of NCBI NO: 18390888 NR Description: expressed protein
  misc_feature (6)..(140): Homolog of NCBI NO: 6996562 NR Description: putative 16kDa membrane protein [Nicotiana
  misc_feature (1)..(140): Homolog of NCBI NO: 22531014 NR Description: expressed protein [Arabidopsis thaliana]
  misc_feature (1)..(140): Homolog of NCBI NO: 18390888 NR Description: expressed protein
  misc_feature (6)..(140): Homolog of NCBI NO: 6996562 NR Description: putative 16kDa membrane protein [Nicotiana
  misc_feature (1)..(140): Homolog of NCBI NO: 22531014 NR Description: expressed protein [Arabidopsis thaliana]
  misc_feature (1)..(140): Homolog of NCBI NO: 18390888 NR Description: expressed protein

SEQ ID NO: 33258 - DNA, 851 bp, Arabidopsis thaliana; identical to SEQ ID NO: 29668
  misc_feature (1)..(851): Ceres Seq. ID no. 13496922
  misc_feature: MA Experiment ID: 108462 Result: Up-regulated in Transcription
  misc_feature: MA Experiment 108462 PARAMETER Experiment Name: At_Germinating_Seeds_cDNA_P Parameter: Age (day) Value: 2 vs. 0
  misc_feature: MA Experiment 108462 PARAMETER Experiment Name: At_Germinating_Seeds_cDNA_P Parameter: Tissue Value: Germinating Seeds
  misc_feature: MA Experiment ID: 108464 Result: Up-regulated in Transcription
  misc_feature: MA Experiment 108464 PARAMETER Experiment Name: At_Germinating_Seeds_cDNA_P Parameter: Age (day) Value: 4 vs. 0
  misc_feature: MA Experiment 108464 PARAMETER Experiment Name: At_Germinating_Seeds_cDNA_P Parameter: Tissue Value: Germinating Seeds
  misc_feature: MA Experiment ID: 108569 Result: Up-regulated in Transcription
  misc_feature: MA Experiment 108569 PARAMETER Experiment Name: At_0.001%_MeJA__cDNA_P Parameter: Timepoint (hr) Value: 6
  misc_feature: MA Experiment 108569 PARAMETER Experiment Name: At_0.001%_MeJA__cDNA_P Parameter: Tissue Value: Aerial
  misc_feature: MA Experiment 108569 PARAMETER Experiment Name: At_0.001%_MeJA__cDNA_P Parameter: Treatment Value: 0.001% MeJA vs. No Treatment
  misc_feature: MA Experiment ID: 108573 Result: Up-regulated in Transcription
  misc_feature: MA Experiment 108573 PARAMETER Experiment Name: At_Drought_cDNA_P Parameter: Timepoint (hr) Value: 6
  misc_feature: MA Experiment 108573 PARAMETER Experiment Name: At_Drought_cDNA_P Parameter: Tissue Value: Aerial
  misc_feature: MA Experiment 108573 PARAMETER Experiment Name: At_Drought_cDNA_P Parameter: Treatment Value: Drought vs. No Drought
  misc_feature: MA Experiment ID: 20000111 Result: Up-regulated in Transcription
  misc_feature: MA Experiment 20000111 PARAMETER Experiment Name: At_42deg_Heat_cDNA_P Parameter: Temperature (deg C) Value: 42 vs. 22
  misc_feature: MA Experiment 20000111 PARAMETER Experiment Name: At_42deg_Heat_cDNA_P Parameter: Timepoint (hr) Value: 6
  misc_feature: MA Experiment 20000111 PARAMETER Experiment Name: At_42deg_Heat_cDNA_P Parameter: Tissue Value: Aerial
  misc_feature: MA Experiment ID: 20000112 Result: Up-regulated in Transcription
  misc_feature: MA Experiment 20000112 PARAMETER Experiment Name: At_42deg_Heat_cDNA_P Parameter: Temperature (deg C) Value: 42 vs. 22
  misc_feature: MA Experiment 20000112 PARAMETER Experiment Name: At_42deg_Heat_cDNA_P Parameter: Timepoint (hr) Value: 2
  misc_feature: MA Experiment 20000112 PARAMETER Experiment Name: At_42deg_Heat_cDNA_P Parameter: Tissue Value: Aerial
  misc_feature: MA Experiment ID: 20000113 Result: Up-regulated in Transcription
  misc_feature: MA Experiment 20000113 PARAMETER Experiment Name: At_42deg_Heat_cDNA_P Parameter: Temperature (deg C) Value: 42 vs. 22
  misc_feature: MA Experiment 20000113 PARAMETER Experiment Name: At_42deg_Heat_cDNA_P Parameter: Timepoint (hr) Value: 8
  misc_feature: MA Experiment 20000113 PARAMETER Experiment Name: At_42deg_Heat_cDNA_P Parameter: Tissue Value: Aerial
  misc_feature: MA Experiment ID: 20000224 Result: Down-regulated in Transcription
  misc_feature: MA Experiment ID: 20000234 Result: Down-regulated in Transcription
  misc_feature: MA Experiment 20000234 PARAMETER Experiment Name: At_Siliques_P Parameter: Age (day) Value: 21
  misc_feature: MA Experiment 20000234 PARAMETER Experiment Name: At_Siliques_P Parameter: Organism Value: A. thaliana
  misc_feature: MA Experiment 20000234 PARAMETER Experiment Name: At_Siliques_P Parameter: Plant Line Value: WS
  misc_feature: MA Experiment 20000234 PARAMETER Experiment Name: At_Siliques_P Parameter: Tissue Value: Less Than 5mm Siliques vs. Whole Plant
  misc_feature: MA Experiment ID: 20000264 Result: Down-regulated in Transcription
  misc_feature: MA Experiment 20000264 PARAMETER Experiment Name: At_Open_Flower_P Parameter: Age (day) Value: 21
  misc_feature: MA Experiment 20000264 PARAMETER Experiment Name: At_Open_Flower_P Parameter: Plant Line Value: WS
  misc_feature: MA Experiment 20000264 PARAMETER Experiment Name: At_Open_Flower_P Parameter: Tissue Value: Open Flower vs. Whole Plant
  misc_feature: MA Experiment ID: 20000265 Result: Down-regulated in Transcription
  misc_feature: MA Experiment 20000265 PARAMETER Experiment Name: At_Open_Flower_P Parameter: Age (day) Value: 21
  misc_feature: MA Experiment 20000265 PARAMETER Experiment Name: At_Open_Flower_P Parameter: Plant Line Value: WS
  misc_feature: MA Experiment 20000265 PARAMETER Experiment Name: At_Open_Flower_P Parameter: Tissue Value: Closed Flower vs. Whole Plant
  misc_feature: MA Experiment ID: 20000286 Result: Down-regulated in Transcription
  misc_feature: MA Experiment 20000286 PARAMETER Experiment Name: At_Open_Flower_P Parameter: Age (day) Value: 21
  misc_feature: MA Experiment 20000286 PARAMETER Experiment Name: At_Open_Flower_P Parameter: Plant Line Value: WS
  misc_feature: MA Experiment 20000286 PARAMETER Experiment Name: At_Open_Flower_P Parameter: Tissue Value: Half Open vs. Whole Plant
  misc_feature: MA Experiment ID: 20000794 Result: Down-regulated in Transcription
  misc_feature: MA Experiment 20000794 PARAMETER Experiment Name: At_Petals_P Parameter: Age (day) Value: 23-25 days
  misc_feature: MA Experiment 20000794 PARAMETER Experiment Name: At_Petals_P Parameter: Plant Line Value: WS
  misc_feature: MA Experiment 20000794 PARAMETER Experiment Name: At_Petals_P Parameter: Tissue Value: Petals vs. Whole plant
  misc_feature: MA Experiment ID: 20001450 Result: Up-regulated in Transcription
  misc_feature: MA Experiment 20001450 PARAMETER Experiment Name: At_Far-red-induction_P Parameter: Age (day) Value: 7
  misc_feature: MA Experiment 20001450 PARAMETER Experiment Name: At_Far-red-induction_P Parameter: Light Value: Far-red vs. White
  misc_feature: MA Experiment 20001450 PARAMETER Experiment Name: At_Far-red-induction_P Parameter: Organism Value: A. thaliana
  misc_feature: MA Experiment 20001450 PARAMETER Experiment Name: At_Far-red-induction_P Parameter: Plant Line Value: Columbia
  misc_feature: MA Experiment 20001450 PARAMETER Experiment Name: At_Far-red-induction_P Parameter: Timepoint (hr) Value: 8
  misc_feature: MA Experiment 20001450 PARAMETER Experiment Name: At_Far-red-induction_P Parameter: Tissue Value: Whole Plant
  misc_feature: MA Experiment ID: 20001451 Result: Up-regulated in Transcription
  misc_feature: MA Experiment 20001451 PARAMETER Experiment Name: At_Far-red-induction_P Parameter: Age (day) Value: 7
  misc_feature: MA Experiment 20001451 PARAMETER Experiment Name: At_Far-red-induction_P Parameter: Light Value: Far-red vs. White
  misc_feature: MA Experiment 20001451 PARAMETER Experiment Name: At_Far-red-induction_P Parameter: Organism Value: A. thaliana
  misc_feature: MA Experiment 20001451 PARAMETER Experiment Name: At_Far-red-induction_P Parameter: Plant Line Value: Columbia
  misc_feature: MA Experiment 20001451 PARAMETER Experiment Name: At_Far-red-induction_P Parameter: Timepoint (hr) Value: 24
  misc_feature: MA Experiment 20001451 PARAMETER Experiment Name: At_Far-red-induction_P Parameter: Tissue Value: Whole Plant
  misc_feature: MA Experiment ID: 20001558 Result: Down-regulated in Transcription
  misc_feature: MA Experiment 20001558 PARAMETER Experiment Name: At_Drought_Soil_Dry_P Parameter: Age (day) Value: 27
  misc_feature: MA Experiment 20001558 PARAMETER Experiment Name: At_Drought_Soil_Dry_P Parameter: Organism Value: A. thaliana
  misc_feature: MA Experiment 20001558 PARAMETER Experiment Name: At_Drought_Soil_Dry_P Parameter: Plant Line Value: WS
  misc_feature: MA Experiment 20001558 PARAMETER Experiment Name: At_Drought_Soil_Dry_P Parameter: Post Timepoint (hr) Value: 6
  misc_feature: MA Experiment 20001558 PARAMETER Experiment Name: At_Drought_Soil_Dry_P Parameter: Post-Treatment Value: Re-Water vs. No Drought
  misc_feature: MA Experiment 20001558 PARAMETER Experiment Name: At_Drought_Soil_Dry_P Parameter: Timepoint (day) Value: 13
  misc_feature: MA Experiment 20001558 PARAMETER Experiment Name: At_Drought_Soil_Dry_P Parameter: Treatment Value: Drought vs. No Drought
  misc_feature: MA Experiment ID: 20001560 Result: Down-regulated in Transcription
  misc_feature: MA Experiment 20001560 PARAMETER Experiment Name: At_Drought_Soil_Dry_P Parameter: Age (day) Value: 28
  misc_feature: MA Experiment 20001560 PARAMETER Experiment Name: At_Drought_Soil_Dry_P Parameter: Organism Value: A. thaliana
  misc_feature: MA Experiment 20001560 PARAMETER Experiment Name: At_Drought_Soil_Dry_P Parameter: Plant Line Value: WS
  misc_feature: MA Experiment 20001560 PARAMETER Experiment Name: At_Drought_Soil_Dry_P Parameter: Post Timepoint (hr) Value: None
  misc_feature: MA Experiment 20001560 PARAMETER Experiment Name: At_Drought_Soil_Dry_P Parameter: Post-Treatment Value: None
  misc_feature: MA Experiment 20001560 PARAMETER Experiment Name: At_Drought_Soil_Dry_P Parameter: Timepoint (day) Value: 14
  misc_feature: MA Experiment 20001560 PARAMETER Experiment Name: At_Drought_Soil_Dry_P Parameter: Treatment Value: Drought vs. No Drought
  misc_feature: Phenotype: ROSETTE LEAVES Petiole Length-Short Petioles
  misc_feature: Phenotype: WHOLE PLANT Size-Small
  misc_feature: Phenotype: WHOLE PLANT Other
  misc_feature: Phenotype: INFLORESCENCE Height-Short
  misc_feature: Phenotype: INFLORESCENCE Height-Short
  misc_feature: Phenotype: ROSETTE LEAVES Petiole Length-Short Petioles
  misc_feature: Phenotype: WHOLE PLANT Other
  misc_feature: Phenotype: INFLORESCENCE Flowering Time-Late Flowering
  misc_feature: Phenotype: INFLORESCENCE Height-Short

SEQ ID NO: 33259 - protein, 181 aa, Arabidopsis thaliana; identical to SEQ ID NO: 29669
  peptide (1)..(181): Ceres Seq. ID no. 13496923
  misc_feature (4)..(177): Pfam Name: ADP-ribosylation factor family Pfam Description: ADP-ribosylation factor family
  misc_feature (1)..(181): Homolog of NCBI NO: 15241463 NR Description: ADP-ribosylation factor ARF1, putative
  misc_feature (1)..(180): Homolog of NCBI NO: 25294174 NR Description: F5O8.5 protein - Arabidopsis thaliana
  misc_feature (1)..(180): Homolog of NCBI NO: 6573751 NR Description: F20B24.7 [Arabidopsis thaliana]
  misc_feature (1)..(181): Homolog of NCBI NO: 1703380 NR Description: ADP-RIBOSYLATION FACTOR
  misc_feature (1)..(181): Homolog of NCBI NO: 15223164 NR Description: ADP-ribosylation factor 1 (ARF1), putative
  misc_feature (1)..(181): Homolog of NCBI NO: 30681825 NR Description: ADP-ribosylation factor, putative [Arabidopsis
  misc_feature (1)..(180): Homolog of NCBI NO: 17154685 NR Description: ADP-ribosylation factor [Gossypium hirsutum]
  misc_feature (1)..(181): Homolog of NCBI NO: 15226521 NR Description: ADP-ribosylation factor 1 (ARF1) [Arabidopsis
  misc_feature (1)..(181): Homolog of NCBI NO: 25294169 NR Description: ADP-ribosylation factor [imported] - pepper
  misc_feature (1)..(181): Homolog of NCBI NO: 15228723 NR Description: ADP-ribosylation factor [Arabidopsis thaliana]

SEQ ID NO: 33260 - protein, 164 aa, Arabidopsis thaliana; identical to SEQ ID NO: 29670
  peptide (1)..(164): Ceres Seq. ID no. 13496924
  misc_feature (1)..(160): Pfam Name: ADP-ribosylation factor family Pfam Description: ADP-ribosylation factor family
  misc_feature (1)..(164): Homolog of NCBI NO: 15241463 NR Description: ADP-ribosylation factor ARF1, putative
  misc_feature (1)..(163): Homolog of NCBI NO: 25294174 NR Description: F5O8.5 protein - Arabidopsis thaliana
  misc_feature (1)..(163): Homolog of NCBI NO: 6573751 NR Description: F20B24.7 [Arabidopsis thaliana]
  misc_feature (1)..(164): Homolog of NCBI NO: 1703380 NR Description: ADP-RIBOSYLATION FACTOR
  misc_feature (1)..(164): Homolog of NCBI NO: 15223164 NR Description: ADP-ribosylation factor 1 (ARF1), putative
  misc_feature (1)..(164): Homolog of NCBI NO: 30681825 NR Description: ADP-ribosylation factor, putative [Arabidopsis
  misc_feature (1)..(163): Homolog of NCBI NO: 17154685 NR Description: ADP-ribosylation factor [Gossypium hirsutum]
  misc_feature (1)..(164): Homolog of NCBI NO: 15226521 NR Description: ADP-ribosylation factor 1 (ARF1) [Arabidopsis
  misc_feature (1)..(164): Homolog of NCBI NO: 25294169 NR Description: ADP-ribosylation factor [imported] - pepper
  misc_feature (1)..(164): Homolog of NCBI NO: 15228723 NR Description: ADP-ribosylation factor [Arabidopsis thaliana]

SEQ ID NO: 33261 - protein, 160 aa, Arabidopsis thaliana; identical to SEQ ID NO: 29671
  peptide (1)..(160): Ceres Seq. ID no. 13496925
  misc_feature (1)..(156): Pfam Name: ADP-ribosylation factor family Pfam Description: ADP-ribosylation factor family
  misc_feature (1)..(160): Homolog of NCBI NO: 15241463 NR Description: ADP-ribosylation factor ARF1, putative
  misc_feature (1)..(159): Homolog of NCBI NO: 25294174 NR Description: F5O8.5 protein - Arabidopsis thaliana
  misc_feature (1)..(159): Homolog of NCBI NO: 6573751 NR Description: F20B24.7 [Arabidopsis thaliana]
  misc_feature (1)..(160): Homolog of NCBI NO: 1703380 NR Description: ADP-RIBOSYLATION FACTOR
  misc_feature (1)..(160): Homolog of NCBI NO: 15223164 NR Description: ADP-ribosylation factor 1 (ARF1), putative
  misc_feature (1)..(160): Homolog of NCBI NO: 30681825 NR Description: ADP-ribosylation factor, putative [Arabidopsis
  misc_feature (1)..(159): Homolog of NCBI NO: 17154685 NR Description: ADP-ribosylation factor [Gossypium hirsutum]
  misc_feature (1)..(160): Homolog of NCBI NO: 15226521 NR Description: ADP-ribosylation factor 1 (ARF1) [Arabidopsis
  misc_feature (1)..(160): Homolog of NCBI NO: 25294169 NR Description: ADP-ribosylation factor [imported] - pepper
  misc_feature (1)..(160): Homolog of NCBI NO: 15228723 NR Description: ADP-ribosylation factor [Arabidopsis thaliana]

SEQ ID NO: 33262 - DNA, 2121 bp, Arabidopsis thaliana; identical to SEQ ID NO: 29672
  misc_feature (1)..(2121): Ceres Seq. ID no. 13493768
  misc_feature: MA Experiment ID: 108434 Result: Down-regulated in Transcription
  misc_feature: MA Experiment 108434 PARAMETER Experiment Name: At_Root_Tips_cDNA_P Parameter: Tissue Value: Root Tips
  misc_feature: MA Experiment ID: 108461 Result: Down-regulated in Transcription
  misc_feature: MA Experiment 108461 PARAMETER Experiment Name: At_Germinating_Seeds_cDNA_P Parameter: Age (day) Value: 1 vs. 0
  misc_feature: MA Experiment 108461 PARAMETER Experiment Name: At_Germinating_Seeds_cDNA_P Parameter: Tissue Value: Germinating Seeds
  misc_feature: MA Experiment ID: 108462 Result: Down-regulated in Transcription
  misc_feature: MA Experiment 108462 PARAMETER Experiment Name: At_Germinating_Seeds_cDNA_P Parameter: Age (day) Value: 2 vs. 0
  misc_feature: MA Experiment 108462 PARAMETER Experiment Name: At_Germinating_Seeds_cDNA_P Parameter: Tissue Value: Germinating Seeds
  misc_feature: MA Experiment ID: 108469 Result: Up-regulated in Transcription
  misc_feature: MA Experiment ID: 108668 Result: Up-regulated in Transcription
  misc_feature: MA Experiment 108668 PARAMETER Experiment Name: At_2mM_SA_cDNA_P Parameter: Plant Line Value: WS
  misc_feature: MA Experiment 108668 PARAMETER Experiment Name: At_2mM_SA_cDNA_P Parameter: Timepoint (hr) Value: 6
  misc_feature: MA Experiment 108668 PARAMETER Experiment Name: At_2mM_SA_cDNA_P Parameter: Treatment Value: 2mM SA vs. No Treatment
  misc_feature: MA Experiment ID: 20000069 Result: Up-regulated in Transcription
  misc_feature: MA Experiment 20000069 PARAMETER Experiment Name: At_100uM_ABA_Mutants_cDNA_P Parameter: Plant Line Value: CS23
  misc_feature: MA Experiment 20000069 PARAMETER Experiment Name: At_100uM_ABA_Mutants_cDNA_P Parameter: Timepoint (hr) Value: 6
  misc_feature: MA Experiment 20000069 PARAMETER Experiment Name: At_100uM_ABA_Mutants_cDNA_P Parameter: Tissue Value: Aerial
  misc_feature: MA Experiment 20000069 PARAMETER Experiment Name: At_100uM_ABA_Mutants_cDNA_P Parameter: Treatment Value: 100uM ABA vs. No Treatment
  misc_feature: MA Experiment ID: 20000087 Result: Up-regulated in Transcription
  misc_feature: MA Experiment 20000087 PARAMETER Experiment Name: At_100uM_ABA_Mutants_cDNA_P Parameter: Plant Line Value: WS
  misc_feature: MA Experiment 20000087 PARAMETER Experiment Name: At_100uM_ABA_Mutants_cDNA_P Parameter: Timepoint (hr) Value: 6
  misc_feature: MA Experiment 20000087 PARAMETER Experiment Name: At_100uM_ABA_Mutants_cDNA_P Parameter: Tissue Value: Aerial
  misc_feature: MA Experiment 20000087 PARAMETER Experiment Name: At_100uM_ABA_Mutants_cDNA_P Parameter: Treatment Value: 100uM ABA vs. No Treatment
  misc_feature: MA Experiment ID: 20000090 Result: Up-regulated in Transcription
  misc_feature: MA Experiment ID: 20000117 Result: Up-regulated in Transcription
  misc_feature: MA Experiment 20000117 PARAMETER Experiment Name: At_100uM_ABA_Mutants_cDNA_P Parameter: Plant Line Value: Columbia
  misc_feature: MA Experiment 20000117 PARAMETER Experiment Name: At_100uM_ABA_Mutants_cDNA_P Parameter: Timepoint (hr) Value: 6
  misc_feature: MA Experiment 20000117 PARAMETER Experiment Name: At_100uM_ABA_Mutants_cDNA_P Parameter: Tissue Value: Aerial
  misc_feature: MA Experiment 20000117 PARAMETER Experiment Name: At_100uM_ABA_Mutants_cDNA_P Parameter: Treatment Value: 100uM ABA vs. No Treatment
  misc_feature: MA Experiment ID: 20000182 Result: Up-regulated in Transcription
  misc_feature: MA Experiment 20000182 PARAMETER Experiment Name: At_2mM_SA_P Parameter: Age (day) Value: 14
  misc_feature: MA Experiment 20000182 PARAMETER Experiment Name: At_2mM_SA_P Parameter: Organism Value: A. thaliana
  misc_feature: MA Experiment 20000182 PARAMETER Experiment Name: At_2mM_SA_P Parameter: Plant Line Value: WS
  misc_feature: MA Experiment 20000182 PARAMETER Experiment Name: At_2mM_SA_P Parameter: Timepoint (hr) Value: 6
  misc_feature: MA Experiment 20000182 PARAMETER Experiment Name: At_2mM_SA_P Parameter: Tissue Value: Aerial
  misc_feature: MA Experiment 20000182 PARAMETER Experiment Name: At_2mM_SA_P Parameter: Treatment Value: 2mM SA vs. No Treatment
  misc_feature: MA Experiment ID: 20000184 Result: Down-regulated in Transcription
  misc_feature: MA Experiment 20000184 PARAMETER Experiment Name: At_Shoots__P Parameter: Age (day) Value: 7
  misc_feature: MA Experiment 20000184 PARAMETER Experiment Name: At_Shoots__P Parameter: Tissue Value: Shoots vs. Whole Plant
  misc_feature: MA Experiment ID: 20000185 Result: Down-regulated in Transcription
  misc_feature: MA Experiment 20000185 PARAMETER Experiment Name: At_Roots__P Parameter: Age (day) Value: 7 vs. 21
  misc_feature: MA Experiment 20000185 PARAMETER Experiment Name: At_Roots__P Parameter: Organism Value: A. thaliana
  misc_feature: MA Experiment 20000185 PARAMETER Experiment Name: At_Roots__P Parameter: Tissue Value: Roots vs. Whole Plant
  misc_feature: MA Experiment ID: 20000234 Result: Down-regulated in Transcription
  misc_feature: MA Experiment 20000234 PARAMETER Experiment Name: At_Siliques_P Parameter: Age (day) Value: 21
  misc_feature: MA Experiment 20000234 PARAMETER Experiment Name: At_Siliques_P Parameter: Organism Value: A. thaliana
  misc_feature: MA Experiment 20000234 PARAMETER Experiment Name: At_Siliques_P Parameter: Plant Line Value: WS
  misc_feature: MA Experiment 20000234 PARAMETER Experiment Name: At_Siliques_P Parameter: Tissue Value: Less Than 5mm Siliques vs. Whole Plant
  misc_feature: MA Experiment ID: 20000235 Result: Down-regulated in Transcription
  misc_feature: MA Experiment 20000235 PARAMETER Experiment Name: At_Siliques_P Parameter: Age (day) Value: 21
  misc_feature: MA Experiment 20000235 PARAMETER Experiment Name: At_Siliques_P Parameter: Organism Value: A. thaliana
  misc_feature: MA Experiment 20000235 PARAMETER Experiment Name: At_Siliques_P Parameter: Plant Line Value: WS
  misc_feature: MA Experiment 20000235 PARAMETER Experiment Name: At_Siliques_P Parameter: Tissue Value: 5-10mm Siliques vs. Whole Plant
  misc_feature: MA Experiment ID: 20000264 Result: Down-regulated in Transcription
  misc_feature: MA Experiment 20000264 PARAMETER Experiment Name: At_Open_Flower_P Parameter: Age (day) Value: 21
  misc_feature: MA Experiment 20000264 PARAMETER Experiment Name: At_Open_Flower_P Parameter: Plant Line Value: WS
  misc_feature: MA Experiment 20000264 PARAMETER Experiment Name: At_Open_Flower_P Parameter: Tissue Value: Open Flower vs. Whole Plant
  misc_feature: MA Experiment ID: 20000265 Result: Down-regulated in Transcription
  misc_feature: MA Experiment 20000265 PARAMETER Experiment Name: At_Open_Flower_P Parameter: Age (day) Value: 21
  misc_feature: MA Experiment 20000265 PARAMETER Experiment Name: At_Open_Flower_P Parameter: Plant Line Value: WS
  misc_feature: MA Experiment 20000265 PARAMETER Experiment Name: At_Open_Flower_P Parameter: Tissue Value: Closed Flower vs. Whole Plant
  misc_feature: MA Experiment ID: 20000286 Result: Down-regulated in Transcription
  misc_feature: MA Experiment 20000286 PARAMETER Experiment Name: At_Open_Flower_P Parameter: Age (day) Value: 21
  misc_feature: MA Experiment 20000286 PARAMETER Experiment Name: At_Open_Flower_P Parameter: Plant Line Value: WS
  misc_feature: MA Experiment 20000286 PARAMETER Experiment Name: At_Open_Flower_P Parameter: Tissue Value: Half Open vs. Whole Plant
  misc_feature: MA Experiment ID: 20000438 Result: Down-regulated in Transcription
  misc_feature: MA Experiment 20000438 PARAMETER Experiment Name: At_Shoots__P Parameter: Age (day) Value: 14
  misc_feature: MA Experiment 20000438 PARAMETER Experiment Name: At_Shoots__P Parameter: Tissue Value: Shoots vs. Whole Plant
  misc_feature: MA Experiment ID: 20000439 Result: Down-regulated in Transcription
  misc_feature: MA Experiment 20000439 PARAMETER Experiment Name: At_Roots__P Parameter: Age (day) Value: 14 vs. 21
  misc_feature: MA Experiment 20000439 PARAMETER Experiment Name: At_Roots__P Parameter: Organism Value: A. thaliana
  misc_feature: MA Experiment 20000439 PARAMETER Experiment Name: At_Roots__P Parameter: Tissue Value: Roots vs. Whole Plant
  misc_feature: MA Experiment ID: 20000441 Result: Up-regulated in Transcription
  misc_feature: MA Experiment 20000441 PARAMETER Experiment Name: At_1uM_BR-BRZ__P Parameter: Tissue Value: Shoot Apices
  misc_feature: MA Experiment 20000441 PARAMETER Experiment Name: At_1uM_BR-BRZ__P Parameter: Treatment Value: 1uM BR vs. No Treatment
  misc_feature: MA Experiment ID: 20000443 Result: Up-regulated in Transcription
  misc_feature: MA Experiment 20000443 PARAMETER Experiment Name: At_1uM_BR-BRZ__P Parameter: Tissue Value: Shoot Apices
  misc_feature: MA Experiment 20000443 PARAMETER Experiment Name: At_1uM_BR-BRZ__P Parameter: Treatment Value: 1uM BRZ vs. No Treatment
  misc_feature: MA Experiment ID: 20000452 Result: Up-regulated in Transcription
  misc_feature: MA Experiment 20000452 PARAMETER Experiment Name: At_CS6879_Shoots-Roots_P Parameter: Age (day) Value: 14
  misc_feature: MA Experiment 20000452 PARAMETER Experiment Name: At_CS6879_Shoots-Roots_P Parameter: Organism Value: A. thaliana
  misc_feature: MA Experiment 20000452 PARAMETER Experiment Name: At_CS6879_Shoots-Roots_P Parameter: Plant Line Value: CS6879 vs. WS
  misc_feature: MA Experiment 20000452 PARAMETER Experiment Name: At_CS6879_Shoots-Roots_P Parameter: Tissue Value: Shoots
  misc_feature: MA Experiment ID: 20000460 Result: Up-regulated in Transcription
  misc_feature: MA Experiment 20000460 PARAMETER Experiment Name: At_10percent_PEG_P Parameter: Age (day) Value: 12
  misc_feature: MA Experiment 20000460 PARAMETER Experiment Name: At_10percent_PEG_P Parameter: Organism Value: A. thaliana
  misc_feature: MA Experiment 20000460 PARAMETER Experiment Name: At_10percent_PEG_P Parameter: Plant Line Value: WS
  misc_feature: MA Experiment 20000460 PARAMETER Experiment Name: At_10percent_PEG_P Parameter: Timepoint (day) Value: 12
  misc_feature: MA Experiment 20000460 PARAMETER Experiment Name: At_10percent_PEG_P Parameter: Tissue Value: Whole Plant
  misc_feature: MA Experiment 20000460 PARAMETER Experiment Name: At_10percent_PEG_P Parameter: Treatment Value: 10percent PEG vs. No Treatment
  misc_feature: MA Experiment ID: 20000527 Result: Up-regulated in Transcription
  misc_feature: MA Experiment 20000527 PARAMETER Experiment Name: At_10percent_PEG_P Parameter: Age (day) Value: 20
  misc_feature: MA Experiment 20000527 PARAMETER Experiment Name: At_10percent_PEG_P Parameter: Organism Value: A. thaliana
  misc_feature: MA Experiment 20000527 PARAMETER Experiment Name: At_10percent_PEG_P Parameter: Plant Line Value: WS
  misc_feature: MA Experiment 20000527 PARAMETER Experiment Name: At_10percent_PEG_P Parameter: Timepoint (day) Value: 20
  misc_feature: MA Experiment 20000527 PARAMETER Experiment Name: At_10percent_PEG_P Parameter: Tissue Value: Whole Plant
  misc_feature: MA Experiment 20000527 PARAMETER Experiment Name: At_10percent_PEG_P Parameter: Treatment Value: 10percent PEG vs. No Treatment
  misc_feature: MA Experiment ID: 20000573 Result: Down-regulated in Transcription
  misc_feature: MA Experiment 20000573 PARAMETER Experiment Name: At_100uM_ABA_Mutants__P Parameter: Organism Value: A. thaliana
  misc_feature: MA Experiment 20000573 PARAMETER Experiment Name: At_100uM_ABA_Mutants__P Parameter: Plant Line Value: CS22 vs. Ler wt
  misc_feature: MA Experiment 20000573 PARAMETER Experiment Name: At_100uM_ABA_Mutants__P Parameter: Timepoint (hr) Value: N/A
  misc_feature: MA Experiment 20000573 PARAMETER Experiment Name: At_100uM_ABA_Mutants__P Parameter: Tissue Value: Whole Plant
  misc_feature: MA Experiment 20000573 PARAMETER Experiment Name: At_100uM_ABA_Mutants__P Parameter: Treatment Value: None
  misc_feature: MA Experiment ID: 20000574 Result: Down-regulated in Transcription
  misc_feature: MA Experiment 20000574 PARAMETER Experiment Name: At_100uM_ABA_Mutants__P Parameter: Organism Value: A. thaliana
  misc_feature: MA Experiment 20000574 PARAMETER Experiment Name: At_100uM_ABA_Mutants__P Parameter: Plant Line Value: CS23 vs. Ler wt
  misc_feature: MA Experiment 20000574 PARAMETER Experiment Name: At_100uM_ABA_Mutants__P Parameter: Timepoint (hr) Value: N/A
  misc_feature: MA Experiment 20000574 PARAMETER Experiment Name: At_100uM_ABA_Mutants__P Parameter: Tissue Value: Whole Plant
  misc_feature: MA Experiment 20000574 PARAMETER Experiment Name: At_100uM_ABA_Mutants__P Parameter: Treatment Value: None
  misc_feature: MA Experiment ID: 20001911 Result: Up-regulated in Transcription
  misc_feature: MA Experiment 20001911 PARAMETER Experiment Name: At_Drought_Reproduction_P Parameter: Age (day) Value: 40
  misc_feature: MA Experiment 20001911 PARAMETER Experiment Name: At_Drought_Reproduction_P Parameter: Organism Value: A. thaliana
  misc_feature: MA Experiment 20001911 PARAMETER Experiment Name: At_Drought_Reproduction_P Parameter: Plant Line Value: WS
  misc_feature: MA Experiment 20001911 PARAMETER Experiment Name: At_Drought_Reproduction_P Parameter: Timepoint (day) Value: 10
  misc_feature: MA Experiment 20001911 PARAMETER Experiment Name: At_Drought_Reproduction_P Parameter: Tissue Value: Flowers
  misc_feature: MA Experiment 20001911 PARAMETER Experiment Name: At_Drought_Reproduction_P Parameter: Treatment Value: Drought vs. No Drought

SEQ ID NO: 33263 - protein, 631 aa, Arabidopsis thaliana; identical to SEQ ID NO: 29673
  peptide (1)..(631): Ceres Seq. ID no. 13493769
  misc_feature (145)..(180): Pfam Name: Ankyrin repeat Pfam Description: Ankyrin repeat
  misc_feature (104)..(431): Homolog of NCBI NO: 18405834 NR Description: CCCH-type zinc finger protein -related
  misc_feature (67)..(189): Homolog of NCBI NO: 34899832 NR Description: OJ1092_A07.25 [Oryza sativa (japonica
  misc_feature (229)..(507): Homolog of NCBI NO: 34899832 NR Description: OJ1092_A07.25 [Oryza sativa (japonica
  misc_feature (35)..(214): Homolog of NCBI NO: 20466590 NR Description: zinc finger transcription factor-like protein
  misc_feature (229)..(434): Homolog of NCBI NO: 20466590 NR Description: zinc finger transcription factor-like protein
  misc_feature (35)..(214): Homolog of NCBI NO: 15239917 NR Description: zinc finger transcription factor -related protein
  misc_feature (229)..(434): Homolog of NCBI NO: 15239917 NR Description: zinc finger transcription factor -related protein
  misc_feature (67)..(438): Homolog of NCBI NO: 15237721 NR Description: zinc finger transcription factor-related protein
  misc_feature (35)..(630): Homolog of NCBI NO: 18410398 NR Description: expressed protein [Arabidopsis thaliana]
  misc_feature (35)..(630): Homolog of NCBI NO: 11357692 NR Description: hypothetical protein F27K19.160 - Arabidopsis

SEQ ID NO: 33264 - protein, 597 aa, Arabidopsis thaliana; identical to SEQ ID NO: 29674
  peptide (1)..(597): Ceres Seq. ID no. 13493770
  misc_feature (111)..(146): Pfam Name: Ankyrin repeat Pfam Description: Ankyrin repeat
  misc_feature (70)..(397): Homolog of NCBI NO: 18405834 NR Description: CCCH-type zinc finger protein -related
  misc_feature (33)..(155): Homolog of NCBI NO: 34899832 NR Description: OJ1092_A07.25 [Oryza sativa (japonica
  misc_feature (195)..(473): Homolog of NCBI NO: 34899832 NR Description: OJ1092_A07.25 [Oryza sativa (japonica
  misc_feature (1)..(180): Homolog of NCBI NO: 20466590 NR Description: zinc finger transcription factor-like protein
  misc_feature (195)..(400): Homolog of NCBI NO: 20466590 NR Description: zinc finger transcription factor-like protein
  misc_feature (1)..(180): Homolog of NCBI NO: 15239917 NR Description: zinc finger transcription factor -related protein
  misc_feature (195)..(400): Homolog of NCBI NO: 15239917 NR Description: zinc finger transcription factor -related protein
  misc_feature (33)..(404): Homolog of NCBI NO: 15237721 NR Description: zinc finger transcription factor-related protein
  misc_feature (1)..(596): Homolog of NCBI NO: 18410398 NR Description: expressed protein [Arabidopsis thaliana]
  misc_feature (1)..(596): Homolog of NCBI NO: 11357692 NR Description: hypothetical protein F27K19.160 - Arabidopsis

SEQ ID NO: 33265 - protein, 578 aa, Arabidopsis thaliana; identical to SEQ ID NO: 29675
  peptide (1)..(578): Ceres Seq. ID no. 13493771
  misc_feature (92)..(127): Pfam Name: Ankyrin repeat Pfam Description: Ankyrin repeat
  misc_feature (51)..(378): Homolog of NCBI NO: 18405834 NR Description: CCCH-type zinc finger protein -related
  misc_feature (14)..(136): Homolog of NCBI NO: 34899832 NR Description: OJ1092_A07.25 [Oryza sativa (japonica
  misc_feature (176)..(454): Homolog of NCBI NO: 34899832 NR Description: OJ1092_A07.25 [Oryza sativa (japonica
  misc_feature (1)..(161): Homolog of NCBI NO: 20466590 NR Description: zinc finger transcription factor-like protein
  misc_feature (176)..(381): Homolog of NCBI NO: 20466590 NR Description: zinc finger transcription factor-like protein
  misc_feature (1)..(161): Homolog of NCBI NO: 15239917 NR Description: zinc finger transcription factor -related protein
  misc_feature (176)..(381): Homolog of NCBI NO: 15239917 NR Description: zinc finger transcription factor -related protein
  misc_feature (14)..(385): Homolog of NCBI NO: 15237721 NR Description: zinc finger transcription factor-related protein
  misc_feature (1)..(577): Homolog of NCBI NO: 18410398 NR Description: expressed protein [Arabidopsis thaliana]
  misc_feature (1)..(577): Homolog of NCBI NO: 11357692 NR Description: hypothetical protein F27K19.160 - Arabidopsis

SEQ ID NO: 33266 - DNA, 853 bp, Arabidopsis thaliana; identical to SEQ ID NO: 29676
  misc_feature (1)..(853): Ceres Seq. ID no. 13490099
  misc_feature: MA Experiment ID: 108434 Result: Up-regulated in Transcription
  misc_feature: MA Experiment 108434 PARAMETER Experiment Name: At_Root_Tips_cDNA_P Parameter: Tissue Value: Root Tips
  misc_feature: MA Experiment ID: 20000184 Result: Down-regulated in Transcription
  misc_feature: MA Experiment 20000184 PARAMETER Experiment Name: At_Shoots__P Parameter: Age (day) Value: 7
  misc_feature: MA Experiment 20000184 PARAMETER Experiment Name: At_Shoots__P Parameter: Tissue Value: Shoots vs. Whole Plant

SEQ ID NO: 33267 - protein, 146 aa, Arabidopsis thaliana; identical to SEQ ID NO: 29677
  peptide (1)..(146): Ceres Seq. ID no. 13490100
  misc_feature (26)..(133): Pfam Name: Thioredoxin Pfam Description: Thioredoxin
  misc_feature (1)..(133): Homolog of NCBI NO: 21740140 NR Description: hypothetical protein [Homo sapiens]
  misc_feature (1)..(133): Homolog of NCBI NO: 20067392 NR Description: thioredoxin related protein [Homo sapiens]
  misc_feature (1)..(133): Homolog of NCBI NO: 13540604 NR Description: thioredoxin domain containing 5; thioredoxin
  misc_feature (24)..(133): Homolog of NCBI NO: 37574006 NR Description: Txndc5 protein [Mus musculus]
  misc_feature (24)..(133): Homolog of NCBI NO: 21703732 NR Description: similar to thioredoxin related protein [Mus
  misc_feature (24)..(133): Homolog of NCBI NO: 19353593 NR Description: similar to thioredoxin related protein [Mus
  misc_feature (23)..(145): Homolog of NCBI NO: 38649034 NR Description: Unknown (protein for MGC:75894) [Silurana
  misc_feature (30)..(146): Homolog of NCBI NO: 8778824 NR Description: T6D22.5 [Arabidopsis thaliana]
  misc_feature (1)..(130): Homolog of NCBI NO: 1532175 NR Description: similar to protein disulfide isomerase
  misc_feature (1)..(146): Homolog of NCBI NO: 15223058 NR Description: protein disulfide isomerase - related

SEQ ID NO: 33268 - protein, 136 aa, Arabidopsis thaliana; identical to SEQ ID NO: 29678
  peptide (1)..(136): Ceres Seq. ID no. 13490101
  misc_feature (16)..(123): Pfam Name: Thioredoxin Pfam Description: Thioredoxin
  misc_feature (1)..(123): Homolog of NCBI NO: 21740140 NR Description: hypothetical protein [Homo sapiens]
  misc_feature (1)..(123): Homolog of NCBI NO: 20067392 NR Description: thioredoxin related protein [Homo sapiens]
  misc_feature (1)..(123): Homolog of NCBI NO: 13540604 NR Description: thioredoxin domain containing 5; thioredoxin
  misc_feature (14)..(123): Homolog of NCBI NO: 37574006 NR Description: Txndc5 protein [Mus musculus]
  misc_feature (14)..(123): Homolog of NCBI NO: 21703732 NR Description: similar to thioredoxin related protein [Mus
  misc_feature (14)..(123): Homolog of NCBI NO: 19353593 NR Description: similar to thioredoxin related protein [Mus
  misc_feature (13)..(135): Homolog of NCBI NO: 38649034 NR Description: Unknown (protein for MGC:75894) [Silurana
  misc_feature (20)..(136): Homolog of NCBI NO: 8778824 NR Description: T6D22.5 [Arabidopsis thaliana]
  misc_feature (1)..(120): Homolog of NCBI NO: 1532175 NR Description: similar to protein disulfide isomerase
  misc_feature (1)..(136): Homolog of NCBI NO: 15223058 NR Description: protein disulfide isomerase - related

SEQ ID NO: 33269 - protein, 75 aa, Arabidopsis thaliana; identical to SEQ ID NO: 29679
  peptide (1)..(75): Ceres Seq. ID no. 13490102
  misc_feature (1)..(62): Pfam Name: Thioredoxin Pfam Description: Thioredoxin
  misc_feature (1)..(62): Homolog of NCBI NO: 21740140 NR Description: hypothetical protein [Homo sapiens]
  misc_feature (1)..(62): Homolog of NCBI NO: 20067392 NR Description: thioredoxin related protein [Homo sapiens]
  misc_feature (1)..(62): Homolog of NCBI NO: 13540604 NR Description: thioredoxin domain containing 5; thioredoxin
  misc_feature (1)..(62): Homolog of NCBI NO: 37574006 NR Description: Txndc5 protein [Mus musculus]
  misc_feature (1)..(62): Homolog of NCBI NO: 21703732 NR Description: similar to thioredoxin related protein [Mus
  misc_feature (1)..(62): Homolog of NCBI NO: 19353593 NR Description: similar to thioredoxin related protein [Mus
  misc_feature (1)..(74): Homolog of NCBI NO: 38649034 NR Description: Unknown (protein for MGC:75894) [Silurana
  misc_feature (1)..(75): Homolog of NCBI NO: 8778824 NR Description: T6D22.5 [Arabidopsis thaliana]
  misc_feature (1)..(59): Homolog of NCBI NO: 1532175 NR Description: similar to protein disulfide isomerase
  misc_feature (1)..(75): Homolog of NCBI NO: 15223058 NR Description: protein disulfide isomerase - related

SEQ ID NO: 33270 - DNA, 689 bp, Arabidopsis thaliana; identical to SEQ ID NO: 29680
  misc_feature (1)..(689): Ceres Seq. ID no. 12466456
  misc_feature: MA Experiment ID: 108561 Result: Up-regulated in Transcription
  misc_feature: MA Experiment 108561 PARAMETER Experiment Name: At_100uM_ABA_cDNA_P Parameter: Timepoint (hr) Value: 6
  misc_feature: MA Experiment 108561 PARAMETER Experiment Name: At_100uM_ABA_cDNA_P Parameter: Tissue Value: Aerial
  misc_feature: MA Experiment 108561 PARAMETER Experiment Name: At_100uM_ABA_cDNA_P Parameter: Treatment Value: 100uM ABA vs. No Treatment
  misc_feature: MA Experiment ID: 108573 Result: Up-regulated in Transcription
  misc_feature: MA Experiment 108573 PARAMETER Experiment Name: At_Drought_cDNA_P Parameter: Timepoint (hr) Value: 6
  misc_feature: MA Experiment 108573 PARAMETER Experiment Name: At_Drought_cDNA_P Parameter: Tissue Value: Aerial
  misc_feature: MA Experiment 108573 PARAMETER Experiment Name: At_Drought_cDNA_P Parameter: Treatment Value: Drought vs. No Drought
  misc_feature: MA Experiment ID: 108579 Result: Down-regulated in Transcription
  misc_feature: MA Experiment 108579 PARAMETER Experiment Name: At_4deg_Cold_cDNA_P Parameter: Temperature (deg C) Value: 4 vs. 22
  misc_feature: MA Experiment 108579 PARAMETER Experiment Name: At_4deg_Cold_cDNA_P Parameter: Timepoint (hr) Value: 6
  misc_feature: MA Experiment 108579 PARAMETER Experiment Name: At_4deg_Cold_cDNA_P Parameter: Tissue Value: Aerial
  misc_feature: MA Experiment ID: 108605 Result: Up-regulated in Transcription
  misc_feature: MA Experiment 108605 PARAMETER Experiment Name: At_100uM_ABA_cDNA_P Parameter: Timepoint (hr) Value: 6
  misc_feature: MA Experiment 108605 PARAMETER Experiment Name: At_100uM_ABA_cDNA_P Parameter: Tissue Value: Aerial
  misc_feature: MA Experiment 108605 PARAMETER Experiment Name: At_100uM_ABA_cDNA_P Parameter: Treatment Value: 100uM ABA vs. No Treatment
  misc_feature: MA Experiment ID: 108607 Result: Up-regulated in Transcription
  misc_feature: MA Experiment 108607 PARAMETER Experiment Name: At_100uM_ABA_cDNA_P Parameter: Timepoint (hr) Value: 4
  misc_feature: MA Experiment 108607 PARAMETER Experiment Name: At_100uM_ABA_cDNA_P Parameter: Tissue Value: Aerial
  misc_feature: MA Experiment 108607 PARAMETER Experiment Name: At_100uM_ABA_cDNA_P Parameter: Treatment Value: 100uM ABA vs. No Treatment
  misc_feature: MA Experiment ID: 108668 Result: Up-regulated in Transcription
  misc_feature: MA Experiment 108668 PARAMETER Experiment Name: At_2mM_SA_cDNA_P Parameter: Plant Line Value: WS
  misc_feature: MA Experiment 108668 PARAMETER Experiment Name: At_2mM_SA_cDNA_P Parameter: Timepoint (hr) Value: 6
  misc_feature: MA Experiment 108668 PARAMETER Experiment Name: At_2mM_SA_cDNA_P Parameter: Treatment Value: 2mM SA vs. No Treatment
  misc_feature: MA Experiment ID: 20000069 Result: Up-regulated in Transcription
  misc_feature: MA Experiment 20000069 PARAMETER Experiment Name: At_100uM_ABA_Mutants_cDNA_P Parameter: Plant Line Value: CS23
  misc_feature: MA Experiment 20000069 PARAMETER Experiment Name: At_100uM_ABA_Mutants_cDNA_P Parameter: Timepoint (hr) Value: 6
  misc_feature: MA Experiment 20000069 PARAMETER Experiment Name: At_100uM_ABA_Mutants_cDNA_P Parameter: Tissue Value: Aerial
  misc_feature: MA Experiment 20000069 PARAMETER Experiment Name: At_100uM_ABA_Mutants_cDNA_P Parameter: Treatment Value: 100uM ABA vs. No Treatment
  misc_feature: MA Experiment ID: 20000070 Result: Up-regulated in Transcription
  misc_feature: MA Experiment 20000070 PARAMETER Experiment Name: At_100uM_ABA_Mutants_cDNA_P Parameter: Plant Line Value: CS24
  misc_feature: MA Experiment 20000070 PARAMETER Experiment Name: At_100uM_ABA_Mutants_cDNA_P Parameter: Timepoint (hr) Value: 6
  misc_feature: MA Experiment 20000070 PARAMETER Experiment Name: At_100uM_ABA_Mutants_cDNA_P Parameter: Tissue Value: Aerial
  misc_feature: MA Experiment 20000070 PARAMETER Experiment Name: At_100uM_ABA_Mutants_cDNA_P Parameter: Treatment Value: 100uM ABA vs. No Treatment
  misc_feature: MA Experiment ID: 20000071 Result: Up-regulated in Transcription
  misc_feature: MA Experiment 20000071 PARAMETER Experiment Name: At_100uM_ABA_Mutants_cDNA_P Parameter: Plant Line Value: CS8104
  misc_feature: MA Experiment 20000071 PARAMETER Experiment Name: At_100uM_ABA_Mutants_cDNA_P Parameter: Timepoint (hr) Value: 6
  misc_feature: MA Experiment 20000071 PARAMETER Experiment Name: At_100uM_ABA_Mutants_cDNA_P Parameter: Tissue Value: Aerial
  misc_feature: MA Experiment 20000071 PARAMETER Experiment Name: At_100uM_ABA_Mutants_cDNA_P Parameter: Treatment Value: 100uM ABA vs. No Treatment
  misc_feature: MA Experiment ID: 20000072 Result: Up-regulated in Transcription
  misc_feature: MA Experiment 20000072 PARAMETER Experiment Name: At_100uM_ABA_Mutants_cDNA_P Parameter: Plant Line Value: CS8105
  misc_feature: MA Experiment 20000072 PARAMETER Experiment Name: At_100uM_ABA_Mutants_cDNA_P Parameter: Timepoint (hr) Value: 6
  misc_feature: MA Experiment 20000072 PARAMETER Experiment Name: At_100uM_ABA_Mutants_cDNA_P Parameter: Tissue Value: Aerial
  misc_feature: MA Experiment 20000072 PARAMETER Experiment Name: At_100uM_ABA_Mutants_cDNA_P Parameter: Treatment Value: 100uM ABA vs. No Treatment
  misc_feature: MA Experiment ID: 20000087 Result: Up-regulated in Transcription
  misc_feature: MA Experiment 20000087 PARAMETER Experiment Name: At_100uM_ABA_Mutants_cDNA_P Parameter: Plant Line Value: WS
  misc_feature: MA Experiment 20000087 PARAMETER Experiment Name: At_100uM_ABA_Mutants_cDNA_P Parameter: Timepoint (hr) Value: 6
  misc_feature: MA Experiment 20000087 PARAMETER Experiment Name: At_100uM_ABA_Mutants_cDNA_P Parameter: Tissue Value: Aerial
  misc_feature: MA Experiment 20000087 PARAMETER Experiment Name: At_100uM_ABA_Mutants_cDNA_P Parameter: Treatment Value: 100uM ABA vs. No Treatment
  misc_feature: MA Experiment ID: 20000088 Result: Up-regulated in Transcription
  misc_feature: MA Experiment 20000088 PARAMETER Experiment Name: At_100uM_ABA_Mutants_cDNA_P Parameter: Plant Line Value: Landsberg
  misc_feature: MA Experiment 20000088 PARAMETER Experiment Name: At_100uM_ABA_Mutants_cDNA_P Parameter: Timepoint (hr) Value: 6
  misc_feature: MA Experiment 20000088 PARAMETER Experiment Name: At_100uM_ABA_Mutants_cDNA_P Parameter: Tissue Value: Aerial
  misc_feature: MA Experiment 20000088 PARAMETER Experiment Name: At_100uM_ABA_Mutants_cDNA_P Parameter: Treatment Value: 100uM ABA vs. No Treatment
  misc_feature: MA Experiment ID: 20000111 Result: Down-regulated in Transcription
  misc_feature: MA Experiment 20000111 PARAMETER Experiment Name: At_42deg_Heat_cDNA_P Parameter: Temperature (deg C) Value: 42 vs. 22
  misc_feature: MA Experiment 20000111 PARAMETER Experiment Name: At_42deg_Heat_cDNA_P Parameter: Timepoint (hr) Value: 6
  misc_feature: MA Experiment 20000111 PARAMETER Experiment Name: At_42deg_Heat_cDNA_P Parameter: Tissue Value: Aerial
  misc_feature: MA Experiment ID: 20000112 Result: Down-regulated in Transcription
  misc_feature: MA Experiment 20000112 PARAMETER Experiment Name: At_42deg_Heat_cDNA_P Parameter: Temperature (deg C) Value: 42 vs. 22
  misc_feature: MA Experiment 20000112 PARAMETER Experiment Name: At_42deg_Heat_cDNA_P Parameter: Timepoint (hr) Value: 2
  misc_feature: MA Experiment 20000112 PARAMETER Experiment Name: At_42deg_Heat_cDNA_P Parameter: Tissue Value: Aerial
  misc_feature: MA Experiment ID: 20000113 Result: Down-regulated in Transcription
  misc_feature: MA Experiment 20000113 PARAMETER Experiment Name: At_42deg_Heat_cDNA_P Parameter: Temperature (deg C) Value: 42 vs. 22
  misc_feature: MA Experiment 20000113 PARAMETER Experiment Name: At_42deg_Heat_cDNA_P Parameter: Timepoint (hr) Value: 8
  misc_feature: MA Experiment 20000113 PARAMETER Experiment Name: At_42deg_Heat_cDNA_P Parameter: Tissue Value: Aerial
  misc_feature: MA Experiment ID: 20000117 Result: Up-regulated in Transcription
  misc_feature: MA Experiment 20000117 PARAMETER Experiment Name: At_100uM_ABA_Mutants_cDNA_P Parameter: Plant Line Value: Columbia
  misc_feature: MA Experiment 20000117 PARAMETER Experiment Name: At_100uM_ABA_Mutants_cDNA_P Parameter: Timepoint (hr) Value: 6
  misc_feature: MA Experiment 20000117 PARAMETER Experiment Name: At_100uM_ABA_Mutants_cDNA_P Parameter: Tissue Value: Aerial
  misc_feature: MA Experiment 20000117 PARAMETER Experiment Name: At_100uM_ABA_Mutants_cDNA_P Parameter: Treatment Value: 100uM ABA vs. No Treatment
  misc_feature: MA Experiment ID: 20000144 Result: Down-regulated in Transcription
  misc_feature: MA Experiment 20000144 PARAMETER Experiment Name: At_42deg_Heat_cDNA_P Parameter: Temperature (deg C) Value: 42 vs. 22
  misc_feature: MA Experiment 20000144 PARAMETER Experiment Name: At_42deg_Heat_cDNA_P Parameter: Timepoint (hr) Value: 1
  misc_feature: MA Experiment 20000144 PARAMETER Experiment Name: At_42deg_Heat_cDNA_P Parameter: Tissue Value: Aerial
  misc_feature: MA Experiment ID: 20000264 Result: Up-regulated in Transcription
  misc_feature: MA Experiment 20000264 PARAMETER Experiment Name: At_Open_Flower_P Parameter: Age (day) Value: 21
  misc_feature: MA Experiment 20000264 PARAMETER Experiment Name: At_Open_Flower_P Parameter: Plant Line Value: WS
  misc_feature: MA Experiment 20000264 PARAMETER Experiment Name: At_Open_Flower_P Parameter: Tissue Value: Open Flower vs. Whole Plant
  misc_feature: MA Experiment ID: 20000794 Result: Up-regulated in Transcription
  misc_feature: MA Experiment 20000794 PARAMETER Experiment Name: At_Petals_P Parameter: Age (day) Value: 23-25 days
  misc_feature: MA Experiment 20000794 PARAMETER Experiment Name: At_Petals_P Parameter: Plant Line Value: WS
  misc_feature: MA Experiment 20000794 PARAMETER Experiment Name: At_Petals_P Parameter: Tissue Value: Petals vs. Whole plant

SEQ ID NO: 33271 - protein, 179 aa, Arabidopsis thaliana; identical to SEQ ID NO: 29681
  peptide (1)..(179): Ceres Seq. ID no. 12466457
  misc_feature (36)..(175): Pfam Name: Protein of unknown function, DUF538 Pfam Description: Protein of unknown function, DUF538
  misc_feature (54)..(171): Homolog of NCBI NO: 34906900 NR Description: P0470A12.30 [Oryza sativa (japonica
  misc_feature (51)..(170): Homolog of NCBI NO: 21553956 NR Description: unknown [Arabidopsis thaliana]
  misc_feature (51)..(170): Homolog of NCBI NO: 18407279 NR Description: Expressed protein
  misc_feature (45)..(170): Homolog of NCBI NO: 30696469 NR Description: expressed protein [Arabidopsis thaliana]
  misc_feature (45)..(178): Homolog of NCBI NO: 9758945 NR Description: gb|AAF02153.1~gene_id:MRB17.3~similar to unknown
  misc_feature (54)..(170): Homolog of NCBI NO: 34898576 NR Description: P0534A03.14 [Oryza sativa (japonica
  misc_feature (59)..(177): Homolog of NCBI NO: 28273404 NR Description: unknown protein [Oryza sativa (japonica
  misc_feature (33)..(173): Homolog of NCBI NO: 18420052 NR Description: unknown protein; protein id: At5g19860.1
  misc_feature (59)..(177): Homolog of NCBI NO: 28273408 NR Description: unknown protein [Oryza sativa (japonica
  misc_feature (5)..(179): Homolog of NCBI NO: 18405296 NR Description: Expressed protein

SEQ ID NO: 33272 - protein, 175 aa, Arabidopsis thaliana; identical to SEQ ID NO: 29682
  peptide (1)..(175): Ceres Seq. ID no. 12466458
  misc_feature (32)..(171): Pfam Name: Protein of unknown function, DUF538 Pfam Description: Protein of unknown function, DUF538
  misc_feature (50)..(167): Homolog of NCBI NO: 34906900 NR Description: P0470A12.30 [Oryza sativa (japonica
  misc_feature (47)..(166): Homolog of NCBI NO: 21553956 NR Description: unknown [Arabidopsis thaliana]
  misc_feature (47)..(166): Homolog of NCBI NO: 18407279 NR Description: Expressed protein
  misc_feature (41)..(166): Homolog of NCBI NO: 30696469 NR Description: expressed protein [Arabidopsis thaliana]
  misc_feature (41)..(174): Homolog of NCBI NO: 9758945 NR Description: gb|AAF02153.1~gene_id:MRB17.3~similar to unknown
  misc_feature (50)..(166): Homolog of NCBI NO: 34898576 NR Description: P0534A03.14 [Oryza sativa (japonica
  misc_feature (55)..(173): Homolog of NCBI NO: 28273404 NR Description: unknown protein [Oryza sativa (japonica
  misc_feature (29)..(169): Homolog of NCBI NO: 18420052 NR Description: unknown protein; protein id: At5g19860.1
  misc_feature (55)..(173): Homolog of NCBI NO: 28273408 NR Description: unknown protein [Oryza sativa (japonica
  misc_feature (1)..(175): Homolog of NCBI NO: 18405296 NR Description: Expressed protein

SEQ ID NO: 33273 - DNA, 908 bp, Arabidopsis thaliana; identical to SEQ ID NO: 29683
  misc_feature (1)..(908): Ceres Seq. ID no. 12333389
  misc_feature: MA Experiment ID: 108434 Result: Down-regulated in Transcription
  misc_feature: MA Experiment 108434 PARAMETER Experiment Name: At_Root_Tips_cDNA_P Parameter: Tissue Value: Root Tips
  misc_feature: MA Experiment ID: 108461 Result: Up-regulated in Transcription
  misc_feature: MA Experiment 108461 PARAMETER Experiment Name: At_Germinating_Seeds_cDNA_P Parameter: Age (day) Value: 1 vs. 0
  misc_feature: MA Experiment 108461 PARAMETER Experiment Name: At_Germinating_Seeds_cDNA_P Parameter: Tissue Value: Germinating Seeds
  misc_feature: MA Experiment ID: 108464 Result: Up-regulated in Transcription
  misc_feature: MA Experiment 108464 PARAMETER Experiment Name: At_Germinating_Seeds_cDNA_P Parameter: Age (day) Value: 4 vs. 0
  misc_feature: MA Experiment 108464 PARAMETER Experiment Name: At_Germinating_Seeds_cDNA_P Parameter: Tissue Value: Germinating Seeds
  misc_feature: MA Experiment ID: 108488 Result: Up-regulated in Transcription
  misc_feature: MA Experiment ID: 108594 Result: Down-regulated in Transcription
  misc_feature: MA Experiment 108594 PARAMETER Experiment Name: At_Ler-rhl_Root_cDNA_P Parameter: Plant Line Value: null
  misc_feature: MA Experiment ID: 108595 Result: Up-regulated in Transcription
  misc_feature: MA Experiment 108595 PARAMETER Experiment Name: At_Ler-pi_Ovule_cDNA_P Parameter: Plant Line Value: null
  misc_feature: MA Experiment ID: 20000113 Result: Down-regulated in Transcription
  misc_feature: MA Experiment 20000113 PARAMETER Experiment Name: At_42deg_Heat_cDNA_P Parameter: Temperature (deg C) Value: 42 vs. 22
  misc_feature: MA Experiment 20000113 PARAMETER Experiment Name: At_42deg_Heat_cDNA_P Parameter: Timepoint (hr) Value: 8
  misc_feature: MA Experiment 20000113 PARAMETER Experiment Name: At_42deg_Heat_cDNA_P Parameter: Tissue Value: Aerial
  misc_feature: MA Experiment ID: 20000180 Result: Up-regulated in Transcription
  misc_feature: MA Experiment 20000180 PARAMETER Experiment Name: At_Germinating_Seeds_P Parameter: Age (hr) Value: 24 vs. 0
  misc_feature: MA Experiment 20000180 PARAMETER Experiment Name: At_Germinating_Seeds_P Parameter: Tissue Value: Germinating Seeds
  misc_feature: MA Experiment ID: 20000184 Result: Down-regulated in Transcription
  misc_feature: MA Experiment 20000184 PARAMETER Experiment Name: At_Shoots__P Parameter: Age (day) Value: 7
  misc_feature: MA Experiment 20000184 PARAMETER Experiment Name: At_Shoots__P Parameter: Tissue Value: Shoots vs. Whole Plant
  misc_feature: MA Experiment ID: 20000185 Result: Down-regulated in Transcription
  misc_feature: MA Experiment 20000185 PARAMETER Experiment Name: At_Roots__P Parameter: Age (day) Value: 7 vs. 21
  misc_feature: MA Experiment 20000185 PARAMETER Experiment Name: At_Roots__P Parameter: Organism Value: A. thaliana
  misc_feature: MA Experiment 20000185 PARAMETER Experiment Name: At_Roots__P Parameter: Tissue Value: Roots vs. Whole Plant
  misc_feature: MA Experiment ID: 20000234 Result: Down-regulated in Transcription
  misc_feature: MA Experiment 20000234 PARAMETER Experiment Name: At_Siliques_P Parameter: Age (day) Value: 21
  misc_feature: MA Experiment 20000234 PARAMETER Experiment Name: At_Siliques_P Parameter: Organism Value: A. thaliana
  misc_feature: MA Experiment 20000234 PARAMETER Experiment Name: At_Siliques_P Parameter: Plant Line Value: WS
  misc_feature: MA Experiment 20000234 PARAMETER Experiment Name: At_Siliques_P Parameter: Tissue Value: Less Than 5mm Siliques vs. Whole Plant
  misc_feature: MA Experiment ID: 20000264 Result: Down-regulated in Transcription
  misc_feature: MA Experiment 20000264 PARAMETER Experiment Name: At_Open_Flower_P Parameter: Age (day) Value: 21
  misc_feature: MA Experiment 20000264 PARAMETER Experiment Name: At_Open_Flower_P Parameter: Plant Line Value: WS
  misc_feature: MA Experiment 20000264 PARAMETER Experiment Name: At_Open_Flower_P Parameter: Tissue Value: Open Flower vs. Whole Plant
  misc_feature: MA Experiment ID: 20000265 Result: Down-regulated in Transcription
  misc_feature: MA Experiment 20000265 PARAMETER Experiment Name: At_Open_Flower_P Parameter: Age (day) Value: 21
  misc_feature: MA Experiment 20000265 PARAMETER Experiment Name: At_Open_Flower_P Parameter: Plant Line Value: WS
  misc_feature: MA Experiment 20000265 PARAMETER Experiment Name: At_Open_Flower_P Parameter: Tissue Value: Closed Flower vs. Whole Plant
  misc_feature: MA Experiment ID: 20000286 Result: Down-regulated in Transcription
  misc_feature: MA Experiment 20000286 PARAMETER Experiment Name: At_Open_Flower_P Parameter: Age (day) Value: 21
  misc_feature: MA Experiment 20000286 PARAMETER Experiment Name: At_Open_Flower_P Parameter: Plant Line Value: WS
  misc_feature: MA Experiment 20000286 PARAMETER Experiment Name: At_Open_Flower_P Parameter: Tissue Value: Half Open vs. Whole Plant
  misc_feature: MA Experiment ID: 20000438 Result: Down-regulated in Transcription
  misc_feature: MA Experiment 20000438 PARAMETER Experiment Name: At_Shoots__P Parameter: Age (day) Value: 14
  misc_feature: MA Experiment 20000438 PARAMETER Experiment Name: At_Shoots__P Parameter: Tissue Value: Shoots vs. Whole Plant
  misc_feature: MA Experiment ID: 20000439 Result: Down-regulated in Transcription
  misc_feature: MA Experiment 20000439 PARAMETER Experiment Name: At_Roots__P Parameter: Age (day) Value: 14 vs. 21
  misc_feature: MA Experiment 20000439 PARAMETER Experiment Name: At_Roots__P Parameter: Organism Value: A. thaliana
  misc_feature: MA Experiment 20000439 PARAMETER Experiment Name: At_Roots__P Parameter: Tissue Value: Roots vs. Whole Plant
  misc_feature: MA Experiment ID: 20000495 Result: Up-regulated in Transcription
  misc_feature: MA Experiment 20000495 PARAMETER Experiment Name: At_Guard_Cells_P Parameter: Harvest Date Value: 8/2/2002
  misc_feature: MA Experiment 20000495 PARAMETER Experiment Name: At_Guard_Cells_P Parameter: Organism Value: A. thaliana
  misc_feature: MA Experiment 20000495 PARAMETER Experiment Name: At_Guard_Cells_P Parameter: Tissue Value: Guard Cells vs. Leaves
  misc_feature: MA Experiment ID: 20000527 Result: Down-regulated in Transcription
  misc_feature: MA Experiment 20000527 PARAMETER Experiment Name: At_10percent_PEG_P Parameter: Age (day) Value: 20
  misc_feature: MA Experiment 20000527 PARAMETER Experiment Name: At_10percent_PEG_P Parameter: Organism Value: A. thaliana
  misc_feature: MA Experiment 20000527 PARAMETER Experiment Name: At_10percent_PEG_P Parameter: Plant Line Value: WS
  misc_feature: MA Experiment 20000527 PARAMETER Experiment Name: At_10percent_PEG_P Parameter: Timepoint (day) Value: 20
  misc_feature: MA Experiment 20000527 PARAMETER Experiment Name: At_10percent_PEG_P Parameter: Tissue Value: Whole Plant
  misc_feature: MA Experiment 20000527 PARAMETER Experiment Name: At_10percent_PEG_P Parameter: Treatment Value: 10percent PEG vs. No Treatment
  misc_feature: MA Experiment ID: 20000794 Result: Down-regulated in Transcription
  misc_feature: MA Experiment 20000794 PARAMETER Experiment Name: At_Petals_P Parameter: Age (day) Value: 23-25 days
  misc_feature: MA Experiment 20000794 PARAMETER Experiment Name: At_Petals_P Parameter: Plant Line Value: WS
  misc_feature: MA Experiment 20000794 PARAMETER Experiment Name: At_Petals_P Parameter: Tissue Value: Petals vs. Whole plant
  misc_feature: MA Experiment ID: 20001248 Result: Down-regulated in Transcription
  misc_feature: MA Experiment 20001248 PARAMETER Experiment Name: At_Far-red-induction_P Parameter: Age (day) Value: 7
  misc_feature: MA Experiment 20001248 PARAMETER Experiment Name: At_Far-red-induction_P Parameter: Light Value: Far-red vs. White
  misc_feature: MA Experiment 20001248 PARAMETER Experiment Name: At_Far-red-induction_P Parameter: Organism Value: A. thaliana
  misc_feature: MA Experiment 20001248 PARAMETER Experiment Name: At_Far-red-induction_P Parameter: Plant Line Value: Columbia
  misc_feature: MA Experiment 20001248 PARAMETER Experiment Name: At_Far-red-induction_P Parameter: Timepoint (hr) Value: 4
  misc_feature: MA Experiment 20001248 PARAMETER Experiment Name: At_Far-red-induction_P Parameter: Tissue Value: Whole Plant
  misc_feature: MA Experiment ID: 20001451 Result: Up-regulated in Transcription
  misc_feature: MA Experiment 20001451 PARAMETER Experiment Name: At_Far-red-induction_P Parameter: Age (day) Value: 7
  misc_feature: MA Experiment 20001451 PARAMETER Experiment Name: At_Far-red-induction_P Parameter: Light Value: Far-red vs. White
  misc_feature: MA Experiment 20001451 PARAMETER Experiment Name: At_Far-red-induction_P Parameter: Organism Value: A. thaliana
  misc_feature: MA Experiment 20001451 PARAMETER Experiment Name: At_Far-red-induction_P Parameter: Plant Line Value: Columbia
  misc_feature: MA Experiment 20001451 PARAMETER Experiment Name: At_Far-red-induction_P Parameter: Timepoint (hr) Value: 24
  misc_feature: MA Experiment 20001451 PARAMETER Experiment Name: At_Far-red-induction_P Parameter: Tissue Value: Whole Plant
  misc_feature: MA Experiment ID: 20001556 Result: Down-regulated in Transcription
  misc_feature: MA Experiment 20001556 PARAMETER Experiment Name: At_Drought_Soil_Dry_P Parameter: Age (day) Value: 26
  misc_feature: MA Experiment 20001556 PARAMETER Experiment Name: At_Drought_Soil_Dry_P Parameter: Organism Value: A. thaliana
  misc_feature: MA Experiment 20001556 PARAMETER Experiment Name: At_Drought_Soil_Dry_P Parameter: Plant Line Value: WS
  misc_feature: MA Experiment 20001556 PARAMETER Experiment Name: At_Drought_Soil_Dry_P Parameter: Post Timepoint (hr) Value: None
  misc_feature: MA Experiment 20001556 PARAMETER Experiment Name: At_Drought_Soil_Dry_P Parameter: Post-Treatment Value: None
  misc_feature: MA Experiment 20001556 PARAMETER Experiment Name: At_Drought_Soil_Dry_P Parameter: Timepoint (day) Value: 12
  misc_feature: MA Experiment 20001556 PARAMETER Experiment Name: At_Drought_Soil_Dry_P Parameter: Treatment Value: Drought vs. No Drought
  misc_feature: MA Experiment ID: 20001557 Result: Down-regulated in Transcription
  misc_feature: MA Experiment 20001557 PARAMETER Experiment Name: At_Drought_Soil_Dry_P Parameter: Age (day) Value: 27
  misc_feature: MA Experiment 20001557 PARAMETER Experiment Name: At_Drought_Soil_Dry_P Parameter: Organism Value: A. thaliana
  misc_feature: MA Experiment 20001557 PARAMETER Experiment Name: At_Drought_Soil_Dry_P Parameter: Plant Line Value: WS
  misc_feature: MA Experiment 20001557 PARAMETER Experiment Name: At_Drought_Soil_Dry_P Parameter: Post Timepoint (hr) Value: 3
  misc_feature: MA Experiment 20001557 PARAMETER Experiment Name: At_Drought_Soil_Dry_P Parameter: Post-Treatment Value: Re-Water vs. No Drought
  misc_feature: MA Experiment 20001557 PARAMETER Experiment Name: At_Drought_Soil_Dry_P Parameter: Timepoint (day) Value: 13
  misc_feature: MA Experiment 20001557 PARAMETER Experiment Name: At_Drought_Soil_Dry_P Parameter: Treatment Value: Drought vs. No Drought
  misc_feature: MA Experiment ID: 20001558 Result: Down-regulated in Transcription
  misc_feature: MA Experiment 20001558 PARAMETER Experiment Name: At_Drought_Soil_Dry_P Parameter: Age (day) Value: 27
  misc_feature: MA Experiment 20001558 PARAMETER Experiment Name: At_Drought_Soil_Dry_P Parameter: Organism Value: A. thaliana
  misc_feature: MA Experiment 20001558 PARAMETER Experiment Name: At_Drought_Soil_Dry_P Parameter: Plant Line Value: WS
  misc_feature: MA Experiment 20001558 PARAMETER Experiment Name: At_Drought_Soil_Dry_P Parameter: Post Timepoint (hr) Value: 6
  misc_feature: MA Experiment 20001558 PARAMETER Experiment Name: At_Drought_Soil_Dry_P Parameter: Post-Treatment Value: Re-Water vs. No Drought
  misc_feature: MA Experiment 20001558 PARAMETER Experiment Name: At_Drought_Soil_Dry_P Parameter: Timepoint (day) Value: 13
  misc_feature: MA Experiment 20001558 PARAMETER Experiment Name: At_Drought_Soil_Dry_P Parameter: Treatment Value: Drought vs. No Drought
  misc_feature: MA Experiment ID: 20001757 Result: Up-regulated in Transcription
  misc_feature: MA Experiment 20001757 PARAMETER Experiment Name: At_50mM_NH4NO3_L-to-H_P Parameter: Timepoint (hr) Value: 6
  misc_feature: MA Experiment 20001757 PARAMETER Experiment Name: At_50mM_NH4NO3_L-to-H_P Parameter: Tissue Value: Leaf
  misc_feature: MA Experiment 20001757 PARAMETER Experiment Name: At_50mM_NH4NO3_L-to-H_P Parameter: Treatment Value: 50mM NH4NO3 vs 100mM Mannitol
  misc_feature: MA Experiment ID: 20001768 Result: Up-regulated in Transcription
  misc_feature: MA Experiment 20001768 PARAMETER Experiment Name: At_Far-red-enriched-adult_P Parameter: Age (day) Value: 28
  misc_feature: MA Experiment 20001768 PARAMETER Experiment Name: At_Far-red-enriched-adult_P Parameter: Light Value: Far-red enriched vs. White
  misc_feature: MA Experiment 20001768 PARAMETER Experiment Name: At_Far-red-enriched-adult_P Parameter: Organism Value: A. thaliana
  misc_feature: MA Experiment 20001768 PARAMETER Experiment Name: At_Far-red-enriched-adult_P Parameter: Plant Line Value: Columbia
  misc_feature: MA Experiment 20001768 PARAMETER Experiment Name: At_Far-red-enriched-adult_P Parameter: Timepoint (hr) Value: 1
  misc_feature: MA Experiment 20001768 PARAMETER Experiment Name: At_Far-red-enriched-adult_P Parameter: Tissue Value: Aerial
  misc_feature: MA Experiment ID: 20001773 Result: Up-regulated in Transcription
  misc_feature: MA Experiment 20001773 PARAMETER Experiment Name: At_Far-red-enriched-adult_P Parameter: Age (day) Value: 30
  misc_feature: MA Experiment 20001773 PARAMETER Experiment Name: At_Far-red-enriched-adult_P Parameter: Light Value: Far-red enriched vs. White
  misc_feature: MA Experiment 20001773 PARAMETER Experiment Name: At_Far-red-enriched-adult_P Parameter: Organism Value: A. thaliana
  misc_feature: MA Experiment 20001773 PARAMETER Experiment Name: At_Far-red-enriched-adult_P Parameter: Plant Line Value: Columbia
  misc_feature: MA Experiment 20001773 PARAMETER Experiment Name: At_Far-red-enriched-adult_P Parameter: Timepoint (hr) Value: 48
  misc_feature: MA Experiment 20001773 PARAMETER Experiment Name: At_Far-red-enriched-adult_P Parameter: Tissue Value: Aerial
  misc_feature: MA Experiment ID: 20001908 Result: Down-regulated in Transcription
  misc_feature: MA Experiment 20001908 PARAMETER Experiment Name: At_Drought_Reproduction_P Parameter: Age (day) Value: 40
  misc_feature: MA Experiment 20001908 PARAMETER Experiment Name: At_Drought_Reproduction_P Parameter: Organism Value: A. thaliana
  misc_feature: MA Experiment 20001908 PARAMETER Experiment Name: At_Drought_Reproduction_P Parameter: Plant Line Value: WS
  misc_feature: MA Experiment 20001908 PARAMETER Experiment Name: At_Drought_Reproduction_P Parameter: Timepoint (day) Value: 10
  misc_feature: MA Experiment 20001908 PARAMETER Experiment Name: At_Drought_Reproduction_P Parameter: Tissue Value: Siliques
  misc_feature: MA Experiment 20001908 PARAMETER Experiment Name: At_Drought_Reproduction_P Parameter: Treatment Value: Drought vs. No Drought
  misc_feature: MA Experiment ID: 20001911 Result: Down-regulated in Transcription
  misc_feature: MA Experiment 20001911 PARAMETER Experiment Name: At_Drought_Reproduction_P Parameter: Age (day) Value: 40
  misc_feature: MA Experiment 20001911 PARAMETER Experiment Name: At_Drought_Reproduction_P Parameter: Organism Value: A. thaliana
  misc_feature: MA Experiment 20001911 PARAMETER Experiment Name: At_Drought_Reproduction_P Parameter: Plant Line Value: WS
  misc_feature: MA Experiment 20001911 PARAMETER Experiment Name: At_Drought_Reproduction_P Parameter: Timepoint (day) Value: 10
  misc_feature: MA Experiment 20001911 PARAMETER Experiment Name: At_Drought_Reproduction_P Parameter: Tissue Value: Flowers
  misc_feature: MA Experiment 20001911 PARAMETER Experiment Name: At_Drought_Reproduction_P Parameter: Treatment Value: Drought vs. No Drought

SEQ ID NO: 33274 - protein, 252 aa, Arabidopsis thaliana; identical to SEQ ID NO: 29684
  peptide (1)..(252): Ceres Seq. ID no. 12333390
  misc_feature (40)..(187): Pfam Name: Fasciclin domain Pfam Description: Fasciclin domain
  misc_feature (7)..(236): Homolog of NCBI NO: 18379157 NR Description: fasciclin-like arabinogalactan-protein (FLA9)
  misc_feature (33)..(246): Homolog of NCBI NO: 34910950 NR Description: putative arabinogalactan-like protein
  misc_feature (13)..(213): Homolog of NCBI NO: 5919185 NR Description: arabinogalactan protein Pop14A9 [Populus x
  misc_feature (32)..(252): Homolog of NCBI NO: 34896012 NR Description: EST D25138(R3286) corresponds to a region of the gene.~Similar to Pinus taeda arabinogalactan-like protein
  misc_feature (18)..(228): Homolog of NCBI NO: 21553590 NR Description: arabinogalactan protein-like [Arabidopsis
  misc_feature (18)..(227): Homolog of NCBI NO: 15294288 NR Description: AT5g60490/muf9_140 [Arabidopsis thaliana]
  misc_feature (18)..(228): Homolog of NCBI NO: 15239344 NR Description: fasciclin-like arabinogalactan-protein (FLA12)
  misc_feature (18)..(242): Homolog of NCBI NO: 30841338 NR Description: arabinogalactan protein [Gossypium hirsutum]
  misc_feature (7)..(252): Homolog of NCBI NO: 21553523 NR Description: arabinogalactan protein-like [Arabidopsis
  misc_feature (7)..(252): Homolog of NCBI NO: 15242651 NR Description: fasciclin-like arabinogalactan-protein (FLA11)

SEQ ID NO: 33275 - protein, 246 aa, Arabidopsis thaliana; identical to SEQ ID NO: 29685
  peptide (1)..(246): Ceres Seq. ID no. 12333391
  misc_feature (34)..(181): Pfam Name: Fasciclin domain Pfam Description: Fasciclin domain
  misc_feature (1)..(230): Homolog of NCBI NO: 18379157 NR Description: fasciclin-like arabinogalactan-protein (FLA9)
  misc_feature (27)..(240): Homolog of NCBI NO: 34910950 NR Description: putative arabinogalactan-like protein
  misc_feature (7)..(207): Homolog of NCBI NO: 5919185 NR Description: arabinogalactan protein Pop14A9 [Populus x
  misc_feature (26)..(246): Homolog of NCBI NO: 34896012 NR Description: EST D25138(R3286) corresponds to a region of the gene.~Similar to Pinus taeda arabinogalactan-like protein
  misc_feature (12)..(222): Homolog of NCBI NO: 21553590 NR Description: arabinogalactan protein-like [Arabidopsis
  misc_feature (12)..(221): Homolog of NCBI NO: 15294288 NR Description: AT5g60490/muf9_140 [Arabidopsis thaliana]
  misc_feature (12)..(222): Homolog of NCBI NO: 15239344 NR Description: fasciclin-like arabinogalactan-protein (FLA12)
  misc_feature (12)..(236): Homolog of NCBI NO: 30841338 NR Description: arabinogalactan protein [Gossypium hirsutum]
  misc_feature (1)..(246): Homolog of NCBI NO: 21553523 NR Description: arabinogalactan protein-like [Arabidopsis
  misc_feature (1)..(246): Homolog of NCBI NO: 15242651 NR Description: fasciclin-like arabinogalactan-protein (FLA11)

SEQ ID NO: 33276 - protein, 131 aa, Arabidopsis thaliana; identical to SEQ ID NO: 29686
  peptide (1)..(131): Ceres Seq. ID no. 12333392
  misc_feature (1)..(66): Pfam Name: Fasciclin domain Pfam Description: Fasciclin domain
  misc_feature (1)..(115): Homolog of NCBI NO: 18379157 NR Description: fasciclin-like arabinogalactan-protein (FLA9)
  misc_feature (1)..(125): Homolog of NCBI NO: 34910950 NR Description: putative arabinogalactan-like protein
  misc_feature (1)..(92): Homolog of NCBI NO: 5919185 NR Description: arabinogalactan protein Pop14A9 [Populus x
  misc_feature (1)..(131): Homolog of NCBI NO: 34896012 NR Description: EST D25138(R3286) corresponds to a region of the gene.~Similar to Pinus taeda arabinogalactan-like protein
  misc_feature (1)..(107): Homolog of NCBI NO: 21553590 NR Description: arabinogalactan protein-like [Arabidopsis
  misc_feature (1)..(106): Homolog of NCBI NO: 15294288 NR Description: AT5g60490/muf9_140 [Arabidopsis thaliana]
  misc_feature (1)..(107): Homolog of NCBI NO: 15239344 NR Description: fasciclin-like arabinogalactan-protein (FLA12)
  misc_feature (1)..(121): Homolog of NCBI NO: 30841338 NR Description: arabinogalactan protein [Gossypium hirsutum]
  misc_feature (1)..(131): Homolog of NCBI NO: 21553523 NR Description: arabinogalactan protein-like [Arabidopsis
  misc_feature (1)..(131): Homolog of NCBI NO: 15242651 NR Description: fasciclin-like arabinogalactan-protein (FLA11)

SEQ ID NO: 33277 - DNA, 1135 bp, Arabidopsis thaliana; identical to SEQ ID NO: 29687
  misc_feature (1)..(1135): Ceres Seq. ID no. 12559930
  misc_feature: MA Experiment ID: 20000070 Result: Down-regulated in Transcription
  misc_feature: MA Experiment 20000070 PARAMETER Experiment Name: At_100uM_ABA_Mutants_cDNA_P Parameter: Plant Line Value: CS24
  misc_feature: MA Experiment 20000070 PARAMETER Experiment Name: At_100uM_ABA_Mutants_cDNA_P Parameter: Timepoint (hr) Value: 6
  misc_feature: MA Experiment 20000070 PARAMETER Experiment Name: At_100uM_ABA_Mutants_cDNA_P Parameter: Tissue Value: Aerial
  misc_feature: MA Experiment 20000070 PARAMETER Experiment Name: At_100uM_ABA_Mutants_cDNA_P Parameter: Treatment Value: 100uM ABA vs. No Treatment
  misc_feature: MA Experiment ID: 20000071 Result: Down-regulated in Transcription
  misc_feature: MA Experiment 20000071 PARAMETER Experiment Name: At_100uM_ABA_Mutants_cDNA_P Parameter: Plant Line Value: CS8104
  misc_feature: MA Experiment 20000071 PARAMETER Experiment Name: At_100uM_ABA_Mutants_cDNA_P Parameter: Timepoint (hr) Value: 6
  misc_feature: MA Experiment 20000071 PARAMETER Experiment Name: At_100uM_ABA_Mutants_cDNA_P Parameter: Tissue Value: Aerial
  misc_feature: MA Experiment 20000071 PARAMETER Experiment Name: At_100uM_ABA_Mutants_cDNA_P Parameter: Treatment Value: 100uM ABA vs. No Treatment
  misc_feature: MA Experiment ID: 20000086 Result: Down-regulated in Transcription
  misc_feature: MA Experiment 20000086 PARAMETER Experiment Name: At_100uM_ABA_Mutants_cDNA_P Parameter: Plant Line Value: CS22
  misc_feature: MA Experiment 20000086 PARAMETER Experiment Name: At_100uM_ABA_Mutants_cDNA_P Parameter: Timepoint (hr) Value: 6
  misc_feature: MA Experiment 20000086 PARAMETER Experiment Name: At_100uM_ABA_Mutants_cDNA_P Parameter: Tissue Value: Aerial
  misc_feature: MA Experiment 20000086 PARAMETER Experiment Name: At_100uM_ABA_Mutants_cDNA_P Parameter: Treatment Value: 100uM ABA vs. No Treatment
  misc_feature: MA Experiment ID: 20000087 Result: Down-regulated in Transcription
  misc_feature: MA Experiment 20000087 PARAMETER Experiment Name: At_100uM_ABA_Mutants_cDNA_P Parameter: Plant Line Value: WS
  misc_feature: MA Experiment 20000087 PARAMETER Experiment Name: At_100uM_ABA_Mutants_cDNA_P Parameter: Timepoint (hr) Value: 6
  misc_feature: MA Experiment 20000087 PARAMETER Experiment Name: At_100uM_ABA_Mutants_cDNA_P Parameter: Tissue Value: Aerial
  misc_feature: MA Experiment 20000087 PARAMETER Experiment Name: At_100uM_ABA_Mutants_cDNA_P Parameter: Treatment Value: 100uM ABA vs. No Treatment
  misc_feature: MA Experiment ID: 20000117 Result: Down-regulated in Transcription
  misc_feature: MA Experiment 20000117 PARAMETER Experiment Name: At_100uM_ABA_Mutants_cDNA_P Parameter: Plant Line Value: Columbia
  misc_feature: MA Experiment 20000117 PARAMETER Experiment Name: At_100uM_ABA_Mutants_cDNA_P Parameter: Timepoint (hr) Value: 6
  misc_feature: MA Experiment 20000117 PARAMETER Experiment Name: At_100uM_ABA_Mutants_cDNA_P Parameter: Tissue Value: Aerial
  misc_feature: MA Experiment 20000117 PARAMETER Experiment Name: At_100uM_ABA_Mutants_cDNA_P Parameter: Treatment Value: 100uM ABA vs. No Treatment
  misc_feature: MA Experiment ID: 20000180 Result: Up-regulated in Transcription
  misc_feature: MA Experiment 20000180 PARAMETER Experiment Name: At_Germinating_Seeds_P Parameter: Age (hr) Value: 24 vs. 0
  misc_feature: MA Experiment 20000180 PARAMETER Experiment Name: At_Germinating_Seeds_P Parameter: Tissue Value: Germinating Seeds
  misc_feature: MA Experiment ID: 20000185 Result: Down-regulated in Transcription
  misc_feature: MA Experiment 20000185 PARAMETER Experiment Name: At_Roots__P Parameter: Age (day) Value: 7 vs. 21
  misc_feature: MA Experiment 20000185 PARAMETER Experiment Name: At_Roots__P Parameter: Organism Value: A. thaliana
  misc_feature: MA Experiment 20000185 PARAMETER Experiment Name: At_Roots__P Parameter: Tissue Value: Roots vs. Whole Plant
  misc_feature: MA Experiment ID: 20000234 Result: Up-regulated in Transcription
  misc_feature: MA Experiment 20000234 PARAMETER Experiment Name: At_Siliques_P Parameter: Age (day) Value: 21
  misc_feature: MA Experiment 20000234 PARAMETER Experiment Name: At_Siliques_P Parameter: Organism Value: A. thaliana
  misc_feature: MA Experiment 20000234 PARAMETER Experiment Name: At_Siliques_P Parameter: Plant Line Value: WS
  misc_feature: MA Experiment 20000234 PARAMETER Experiment Name: At_Siliques_P Parameter: Tissue Value: Less Than 5mm Siliques vs. Whole Plant
  misc_feature: MA Experiment ID: 20000436 Result: Down-regulated in Transcription
  misc_feature: MA Experiment 20000436 PARAMETER Experiment Name: At_Drought_P Parameter: Age (day) Value: 7
  misc_feature: MA Experiment 20000436 PARAMETER Experiment Name: At_Drought_P Parameter: Organism Value: A. thaliana
  misc_feature: MA Experiment 20000436 PARAMETER Experiment Name: At_Drought_P Parameter: Plant Line Value: WS
  misc_feature: MA Experiment 20000436 PARAMETER Experiment Name: At_Drought_P Parameter: Timepoint (hr) Value: 12
  misc_feature: MA Experiment 20000436 PARAMETER Experiment Name: At_Drought_P Parameter: Tissue Value: Whole Plant
  misc_feature: MA Experiment 20000436 PARAMETER Experiment Name: At_Drought_P Parameter: Treatment Value: Drought vs. No Drought
  misc_feature: MA Experiment ID: 20000437 Result: Down-regulated in Transcription
  misc_feature: MA Experiment 20000437 PARAMETER Experiment Name: At_Drought_P Parameter: Age (day) Value: 8
  misc_feature: MA Experiment 20000437 PARAMETER Experiment Name: At_Drought_P Parameter: Organism Value: A. thaliana
  misc_feature: MA Experiment 20000437 PARAMETER Experiment Name: At_Drought_P Parameter: Plant Line Value: WS
  misc_feature: MA Experiment 20000437 PARAMETER Experiment Name: At_Drought_P Parameter: Timepoint (hr) Value: 24
  misc_feature: MA Experiment 20000437 PARAMETER Experiment Name: At_Drought_P Parameter: Tissue Value: Whole Plant
  misc_feature: MA Experiment 20000437 PARAMETER Experiment Name: At_Drought_P Parameter: Treatment Value: Drought vs. No Drought
  misc_feature: MA Experiment ID: 20000438 Result: Up-regulated in Transcription
  misc_feature: MA Experiment 20000438 PARAMETER Experiment Name: At_Shoots__P Parameter: Age (day) Value: 14
  misc_feature: MA Experiment 20000438 PARAMETER Experiment Name: At_Shoots__P Parameter: Tissue Value: Shoots vs. Whole Plant
  misc_feature: MA Experiment ID: 20000439 Result: Down-regulated in Transcription
  misc_feature: MA Experiment 20000439 PARAMETER Experiment Name: At_Roots__P Parameter: Age (day) Value: 14 vs. 21
  misc_feature: MA Experiment 20000439 PARAMETER Experiment Name: At_Roots__P Parameter: Organism Value: A. thaliana
  misc_feature: MA Experiment 20000439 PARAMETER Experiment Name: At_Roots__P Parameter: Tissue Value: Roots vs. Whole Plant
  misc_feature: MA Experiment ID: 20000794 Result: Down-regulated in Transcription
  misc_feature: MA Experiment 20000794 PARAMETER Experiment Name: At_Petals_P Parameter: Age (day) Value: 23-25 days
  misc_feature: MA Experiment 20000794 PARAMETER Experiment Name: At_Petals_P Parameter: Plant Line Value: WS
  misc_feature: MA Experiment 20000794 PARAMETER Experiment Name: At_Petals_P Parameter: Tissue Value: Petals vs. Whole plant
  misc_feature: MA Experiment ID: 20001450 Result: Down-regulated in Transcription
  misc_feature: MA Experiment 20001450 PARAMETER Experiment Name: At_Far-red-induction_P Parameter: Age (day) Value: 7
  misc_feature: MA Experiment 20001450 PARAMETER Experiment Name: At_Far-red-induction_P Parameter: Light Value: Far-red vs. White
  misc_feature: MA Experiment 20001450 PARAMETER Experiment Name: At_Far-red-induction_P Parameter: Organism Value: A. thaliana
  misc_feature: MA Experiment 20001450 PARAMETER Experiment Name: At_Far-red-induction_P Parameter: Plant Line Value: Columbia
  misc_feature: MA Experiment 20001450 PARAMETER Experiment Name: At_Far-red-induction_P Parameter: Timepoint (hr) Value: 8
  misc_feature: MA Experiment 20001450 PARAMETER Experiment Name: At_Far-red-induction_P Parameter: Tissue Value: Whole Plant
  misc_feature: MA Experiment ID: 20001757 Result: Up-regulated in Transcription
  misc_feature: MA Experiment 20001757 PARAMETER Experiment Name: At_50mM_NH4NO3_L-to-H_P Parameter: Timepoint (hr) Value: 6
  misc_feature: MA Experiment 20001757 PARAMETER Experiment Name: At_50mM_NH4NO3_L-to-H_P Parameter: Tissue Value: Leaf
  misc_feature: MA Experiment 20001757 PARAMETER Experiment Name: At_50mM_NH4NO3_L-to-H_P Parameter: Treatment Value: 50mM NH4NO3 vs 100mM Mannitol
  misc_feature: MA Experiment ID: 20001905 Result: Down-regulated in Transcription
  misc_feature: MA Experiment 20001905 PARAMETER Experiment Name: At_Drought_Reproduction_P Parameter: Age (day) Value: 40
  misc_feature: MA Experiment 20001905 PARAMETER Experiment Name: At_Drought_Reproduction_P Parameter: Organism Value: A. thaliana
  misc_feature: MA Experiment 20001905 PARAMETER Experiment Name: At_Drought_Reproduction_P Parameter: Plant Line Value: WS
  misc_feature: MA Experiment 20001905 PARAMETER Experiment Name: At_Drought_Reproduction_P Parameter: Timepoint (day) Value: 10
  misc_feature: MA Experiment 20001905 PARAMETER Experiment Name: At_Drought_Reproduction_P Parameter: Tissue Value: Rosettes
  misc_feature: MA Experiment 20001905 PARAMETER Experiment Name: At_Drought_Reproduction_P Parameter: Treatment Value: Drought vs. No Drought
  misc_feature: MA Experiment ID: 20001906 Result: Down-regulated in Transcription
  misc_feature: MA Experiment 20001906 PARAMETER Experiment Name: At_Drought_Reproduction_P Parameter: Age (day) Value: 35
  misc_feature: MA Experiment 20001906 PARAMETER Experiment Name: At_Drought_Reproduction_P Parameter: Organism Value: A. thaliana
  misc_feature: MA Experiment 20001906 PARAMETER Experiment Name: At_Drought_Reproduction_P Parameter: Plant Line Value: WS
  misc_feature: MA Experiment 20001906 PARAMETER Experiment Name: At_Drought_Reproduction_P Parameter: Timepoint (day) Value: 5
  misc_feature: MA Experiment 20001906 PARAMETER Experiment Name: At_Drought_Reproduction_P Parameter: Tissue Value: Siliques
  misc_feature: MA Experiment 20001906 PARAMETER Experiment Name: At_Drought_Reproduction_P Parameter: Treatment Value: Drought vs. No Drought
  misc_feature: MA Experiment ID: 20001911 Result: Down-regulated in Transcription
  misc_feature: MA Experiment 20001911 PARAMETER Experiment Name: At_Drought_Reproduction_P Parameter: Age (day) Value: 40
  misc_feature: MA Experiment 20001911 PARAMETER Experiment Name: At_Drought_Reproduction_P Parameter: Organism Value: A. thaliana
  misc_feature: MA Experiment 20001911 PARAMETER Experiment Name: At_Drought_Reproduction_P Parameter: Plant Line Value: WS
  misc_feature: MA Experiment 20001911 PARAMETER Experiment Name: At_Drought_Reproduction_P Parameter: Timepoint (day) Value: 10
  misc_feature: MA Experiment 20001911 PARAMETER Experiment Name: At_Drought_Reproduction_P Parameter: Tissue Value: Flowers
  misc_feature: MA Experiment 20001911 PARAMETER Experiment Name: At_Drought_Reproduction_P Parameter: Treatment Value: Drought vs. No Drought

SEQ ID NO: 33278 - protein, 269 aa, Arabidopsis thaliana; identical to SEQ ID NO: 24385
  peptide (1)..(269): Ceres Seq. ID no. 12559931
  misc_feature (94)..(165): Pfam Name: RNA recognition motif. (a.k.a. RRM, RBD, or RNP domain) Pfam Description: RNA recognition motif. (a.k.a. RRM, RBD, or RNP
  misc_feature (94)..(165): Pfam Name: RNA recognition motif. (a.k.a. RRM, RBD, or RNP domain) Pfam Description: RNA recognition motif. (a.k.a. RRM, RBD, or RNP
  misc_feature (76)..(269): Homolog of NCBI NO: 1076509 NR Description: RNA-binding protein RNP1 precursor - kidney bean
  misc_feature (76)..(269): Homolog of NCBI NO: 7446342 NR Description: RNA-binding protein precursor, 33K - wood tobacco
  misc_feature (76)..(269): Homolog of NCBI NO: 681912 NR Description: cp33 [Arabidopsis thaliana]
  misc_feature (66)..(269): Homolog of NCBI NO: 34913270 NR Description: putative ribonucleoprotein
  misc_feature (76)..(269): Homolog of NCBI NO: 17064758 NR Description: ubiquitin / ribosomal protein CEP52 [Arabidopsis
  misc_feature (76)..(269): Homolog of NCBI NO: 1076509 NR Description: RNA-binding protein RNP1 precursor - kidney bean
  misc_feature (76)..(269): Homolog of NCBI NO: 681912 NR Description: cp33 [Arabidopsis thaliana]
  misc_feature (76)..(269): Homolog of NCBI NO: 17064758 NR Description: ubiquitin / ribosomal protein CEP52 [Arabidopsis
  misc_feature (17)..(269): Homolog of NCBI NO: 30693595 NR Description: RNA recognition motif (RRM)-containing protein
  misc_feature (17)..(266): Homolog of NCBI NO: 11357772 NR Description: hypothetical protein F4F15.260 - Arabidopsis
  misc_feature (26)..(269): Homolog of NCBI NO: 7578881 NR Description: plastid-specific ribosomal protein 2 precursor
  misc_feature (18)..(269): Homolog of NCBI NO: 18921322 NR Description: putative ribonucleoprotein [Oryza sativa]
  misc_feature (76)..(269): Homolog of NCBI NO: 15231200 NR Description: chloroplast RNA-binding protein cp33
  misc_feature (66)..(269): Homolog of NCBI NO: 34913270 NR Description: putative ribonucleoprotein
  misc_feature (76)..(269): Homolog of NCBI NO: 7446342 NR Description: RNA-binding protein precursor, 33K - wood tobacco
  misc_feature (76)..(269): Homolog of NCBI NO: 15231200 NR Description: chloroplast RNA-binding protein cp33
  misc_feature (18)..(269): Homolog of NCBI NO: 18921322 NR Description: putative ribonucleoprotein [Oryza sativa]
  misc_feature (26)..(269): Homolog of NCBI NO: 7578881 NR Description: plastid-specific ribosomal protein 2 precursor
  misc_feature (17)..(266): Homolog of NCBI NO: 11357772 NR Description: hypothetical protein F4F15.260 - Arabidopsis
  misc_feature (17)..(269): Homolog of NCBI NO: 30693595 NR Description: RNA recognition motif (RRM)-containing protein

SEQ ID NO: 33279 - protein, 253 aa, Arabidopsis thaliana; identical to SEQ ID NO: 24386
  peptide (1)..(253): Ceres Seq. ID no. 12559932
  misc_feature (78)..(149): Pfam Name: RNA recognition motif. (a.k.a. RRM, RBD, or RNP domain) Pfam Description: RNA recognition motif. (a.k.a. RRM, RBD, or RNP
  misc_feature (78)..(149): Pfam Name: RNA recognition motif. (a.k.a. RRM, RBD, or RNP domain) Pfam Description: RNA recognition motif. (a.k.a. RRM, RBD, or RNP
  misc_feature (60)..(253): Homolog of NCBI NO: 1076509 NR Description: RNA-binding protein RNP1 precursor - kidney bean
  misc_feature (60)..(253): Homolog of NCBI NO: 7446342 NR Description: RNA-binding protein precursor, 33K - wood tobacco
  misc_feature (60)..(253): Homolog of NCBI NO: 681912 NR Description: cp33 [Arabidopsis thaliana]
  misc_feature (50)..(253): Homolog of NCBI NO: 34913270 NR Description: putative ribonucleoprotein
  misc_feature (60)..(253): Homolog of NCBI NO: 17064758 NR Description: ubiquitin / ribosomal protein CEP52 [Arabidopsis
  misc_feature (60)..(253): Homolog of NCBI NO: 1076509 NR Description: RNA-binding protein RNP1 precursor - kidney bean
  misc_feature (60)..(253): Homolog of NCBI NO: 681912 NR Description: cp33 [Arabidopsis thaliana]
  misc_feature (60)..(253): Homolog of NCBI NO: 17064758 NR Description: ubiquitin / ribosomal protein CEP52 [Arabidopsis
  misc_feature (1)..(253): Homolog of NCBI NO: 30693595 NR Description: RNA recognition motif (RRM)-containing protein
  misc_feature (1)..(250): Homolog of NCBI NO: 11357772 NR Description: hypothetical protein F4F15.260 - Arabidopsis
  misc_feature (10)..(253): Homolog of NCBI NO: 7578881 NR Description: plastid-specific ribosomal protein 2 precursor
  misc_feature (2)..(253): Homolog of NCBI NO: 18921322 NR Description: putative ribonucleoprotein [Oryza sativa]
  misc_feature (60)..(253): Homolog of NCBI NO: 15231200 NR Description: chloroplast RNA-binding protein cp33
  misc_feature (50)..(253): Homolog of NCBI NO: 34913270 NR Description: putative ribonucleoprotein
  misc_feature (60)..(253): Homolog of NCBI NO: 7446342 NR Description: RNA-binding protein precursor, 33K - wood tobacco
  misc_feature (60)..(253): Homolog of NCBI NO: 15231200 NR Description: chloroplast RNA-binding protein cp33
  misc_feature (2)..(253): Homolog of NCBI NO: 18921322 NR Description: putative ribonucleoprotein [Oryza sativa]
  misc_feature (10)..(253): Homolog of NCBI NO: 7578881 NR Description: plastid-specific ribosomal protein 2 precursor
  misc_feature (1)..(250): Homolog of NCBI NO: 11357772 NR Description: hypothetical protein F4F15.260 - Arabidopsis
  misc_feature (1)..(253): Homolog of NCBI NO: 30693595 NR Description: RNA recognition motif (RRM)-containing protein

SEQ ID NO: 33280 - protein, 146 aa, Arabidopsis thaliana; identical to SEQ ID NO: 24387
  peptide (1)..(146): Ceres Seq. ID no. 12559933
  misc_feature (72)..(143): Pfam Name: RNA recognition motif. (a.k.a. RRM, RBD, or RNP domain) Pfam Description: RNA recognition motif. (a.k.a. RRM, RBD, or RNP
  misc_feature (72)..(143): Pfam Name: RNA recognition motif. (a.k.a. RRM, RBD, or RNP domain) Pfam Description: RNA recognition motif. (a.k.a. RRM, RBD, or RNP
  misc_feature (1)..(146): Homolog of NCBI NO: 1076509 NR Description: RNA-binding protein RNP1 precursor - kidney bean
  misc_feature (1)..(146): Homolog of NCBI NO: 7446342 NR Description: RNA-binding protein precursor, 33K - wood tobacco
  misc_feature (1)..(146): Homolog of NCBI NO: 681912 NR Description: cp33 [Arabidopsis thaliana]
  misc_feature (1)..(146): Homolog of NCBI NO: 34913270 NR Description: putative ribonucleoprotein
  misc_feature (1)..(146): Homolog of NCBI NO: 17064758 NR Description: ubiquitin / ribosomal protein CEP52 [Arabidopsis
  misc_feature (1)..(146): Homolog of NCBI NO: 1076509 NR Description: RNA-binding protein RNP1 precursor - kidney bean
  misc_feature (1)..(146): Homolog of NCBI NO: 681912 NR Description: cp33 [Arabidopsis thaliana]
  misc_feature (1)..(146): Homolog of NCBI NO: 17064758 NR Description: ubiquitin / ribosomal protein CEP52 [Arabidopsis
  misc_feature (1)..(146): Homolog of NCBI NO: 30693595 NR Description: RNA recognition motif (RRM)-containing protein
  misc_feature (1)..(143): Homolog of NCBI NO: 11357772 NR Description: hypothetical protein F4F15.260 - Arabidopsis
  misc_feature (1)..(146): Homolog of NCBI NO: 7578881 NR Description: plastid-specific ribosomal protein 2 precursor
  misc_feature (1)..(146): Homolog of NCBI NO: 18921322 NR Description: putative ribonucleoprotein [Oryza sativa]
  misc_feature (1)..(146): Homolog of NCBI NO: 15231200 NR Description: chloroplast RNA-binding protein cp33
  misc_feature (1)..(146): Homolog of NCBI NO: 34913270 NR Description: putative ribonucleoprotein
  misc_feature (1)..(146): Homolog of NCBI NO: 7446342 NR Description: RNA-binding protein precursor, 33K - wood tobacco
  misc_feature (1)..(146): Homolog of NCBI NO: 15231200 NR Description: chloroplast RNA-binding protein cp33
  misc_feature (1)..(146): Homolog of NCBI NO: 18921322 NR Description: putative ribonucleoprotein [Oryza sativa]
  misc_feature (1)..(146): Homolog of NCBI NO: 7578881 NR Description: plastid-specific ribosomal protein 2 precursor
  misc_feature (1)..(143): Homolog of NCBI NO: 11357772 NR Description: hypothetical protein F4F15.260 - Arabidopsis
  misc_feature (1)..(146): Homolog of NCBI NO: 30693595 NR Description: RNA recognition motif (RRM)-containing protein

SEQ ID NO: 33281 - DNA, 684 bp, Arabidopsis thaliana; identical to SEQ ID NO: 24528
  misc_feature (1)..(684): Ceres Seq. ID no. 12332058
  misc_feature: MA Experiment ID: 108435 Result: Down-regulated in Transcription
  misc_feature: MA Experiment 108435 PARAMETER Experiment Name: At_stm_Mutants_cDNA_P Parameter: Plant Line Value: wt Landsburg vs stm
  misc_feature: MA Experiment 108435 PARAMETER Experiment Name: At_stm_Mutants_cDNA_P Parameter: Tissue Value: Shoot Apical Meristem Region
  misc_feature: MA Experiment ID: 108464 Result: Up-regulated in Transcription
  misc_feature: MA Experiment 108464 PARAMETER Experiment Name: At_Germinating_Seeds_cDNA_P Parameter: Age (day) Value: 4 vs. 0
  misc_feature: MA Experiment 108464 PARAMETER Experiment Name: At_Germinating_Seeds_cDNA_P Parameter: Tissue Value: Germinating Seeds
  misc_feature: MA Experiment ID: 108488 Result: Down-regulated in Transcription
  misc_feature: MA Experiment ID: 108572 Result: Down-regulated in Transcription
  misc_feature: MA Experiment 108572 PARAMETER Experiment Name: At_Drought_cDNA_P Parameter: Timepoint (hr) Value: 1
  misc_feature: MA Experiment 108572 PARAMETER Experiment Name: At_Drought_cDNA_P Parameter: Tissue Value: Aerial
  misc_feature: MA Experiment 108572 PARAMETER Experiment Name: At_Drought_cDNA_P Parameter: Treatment Value: Drought vs. No Drought
  misc_feature: MA Experiment ID: 108573 Result: Down-regulated in Transcription
  misc_feature: MA Experiment 108573 PARAMETER Experiment Name: At_Drought_cDNA_P Parameter: Timepoint (hr) Value: 6
  misc_feature: MA Experiment 108573 PARAMETER Experiment Name: At_Drought_cDNA_P Parameter: Tissue Value: Aerial
  misc_feature: MA Experiment 108573 PARAMETER Experiment Name: At_Drought_cDNA_P Parameter: Treatment Value: Drought vs. No Drought
  misc_feature: MA Experiment ID: 108585 Result: Down-regulated in Transcription
  misc_feature: MA Experiment 108585 PARAMETER Experiment Name: At_5mM_NaNP_cDNA_P Parameter: Timepoint (hr) Value: 6
  misc_feature: MA Experiment 108585 PARAMETER Experiment Name: At_5mM_NaNP_cDNA_P Parameter: Tissue Value: Aerial
  misc_feature: MA Experiment 108585 PARAMETER Experiment Name: At_5mM_NaNP_cDNA_P Parameter: Treatment Value: null
  misc_feature: MA Experiment ID: 108595 Result: Down-regulated in Transcription
  misc_feature: MA Experiment 108595 PARAMETER Experiment Name: At_Ler-pi_Ovule_cDNA_P Parameter: Plant Line Value: null
  misc_feature: MA Experiment ID: 20000069 Result: Up-regulated in Transcription
  misc_feature: MA Experiment 20000069 PARAMETER Experiment Name: At_100uM_ABA_Mutants_cDNA_P Parameter: Plant Line Value: CS23
  misc_feature: MA Experiment 20000069 PARAMETER Experiment Name: At_100uM_ABA_Mutants_cDNA_P Parameter: Timepoint (hr) Value: 6
  misc_feature: MA Experiment 20000069 PARAMETER Experiment Name: At_100uM_ABA_Mutants_cDNA_P Parameter: Tissue Value: Aerial
  misc_feature: MA Experiment 20000069 PARAMETER Experiment Name: At_100uM_ABA_Mutants_cDNA_P Parameter: Treatment Value: 100uM ABA vs. No Treatment
  misc_feature: MA Experiment ID: 20000070 Result: Up-regulated in Transcription
  misc_feature: MA Experiment 20000070 PARAMETER Experiment Name: At_100uM_ABA_Mutants_cDNA_P Parameter: Plant Line Value: CS24
  misc_feature: MA Experiment 20000070 PARAMETER Experiment Name: At_100uM_ABA_Mutants_cDNA_P Parameter: Timepoint (hr) Value: 6
  misc_feature: MA Experiment 20000070 PARAMETER Experiment Name: At_100uM_ABA_Mutants_cDNA_P Parameter: Tissue Value: Aerial
  misc_feature: MA Experiment 20000070 PARAMETER Experiment Name: At_100uM_ABA_Mutants_cDNA_P Parameter: Treatment Value: 100uM ABA vs. No Treatment
  misc_feature: MA Experiment ID: 20000071 Result: Up-regulated in Transcription
  misc_feature: MA Experiment 20000071 PARAMETER Experiment Name: At_100uM_ABA_Mutants_cDNA_P Parameter: Plant Line Value: CS8104
  misc_feature: MA Experiment 20000071 PARAMETER Experiment Name: At_100uM_ABA_Mutants_cDNA_P Parameter: Timepoint (hr) Value: 6
  misc_feature: MA Experiment 20000071 PARAMETER Experiment Name: At_100uM_ABA_Mutants_cDNA_P Parameter: Tissue Value: Aerial
  misc_feature: MA Experiment 20000071 PARAMETER Experiment Name: At_100uM_ABA_Mutants_cDNA_P Parameter: Treatment Value: 100uM ABA vs. No Treatment
  misc_feature: MA Experiment ID: 20000089 Result: Up-regulated in Transcription
  misc_feature: MA Experiment ID: 20000093 Result: Down-regulated in Transcription
  misc_feature: MA Experiment 20000093 PARAMETER Experiment Name: At_42deg_Heat_cDNA_P Parameter: Temperature (deg C) Value: 42 vs. 22
  misc_feature: MA Experiment 20000093 PARAMETER Experiment Name: At_42deg_Heat_cDNA_P Parameter: Timepoint (hr) Value: 0.5
  misc_feature: MA Experiment 20000093 PARAMETER Experiment Name: At_42deg_Heat_cDNA_P Parameter: Tissue Value: Aerial
  misc_feature: MA Experiment ID: 20000112 Result: Down-regulated in Transcription
  misc_feature: MA Experiment 20000112 PARAMETER Experiment Name: At_42deg_Heat_cDNA_P Parameter: Temperature (deg C) Value: 42 vs. 22
  misc_feature: MA Experiment 20000112 PARAMETER Experiment Name: At_42deg_Heat_cDNA_P Parameter: Timepoint (hr) Value: 2
  misc_feature: MA Experiment 20000112 PARAMETER Experiment Name: At_42deg_Heat_cDNA_P Parameter: Tissue Value: Aerial
  misc_feature: MA Experiment ID: 20000117 Result: Up-regulated in Transcription
  misc_feature: MA Experiment 20000117 PARAMETER Experiment Name: At_100uM_ABA_Mutants_cDNA_P Parameter: Plant Line Value: Columbia
  misc_feature: MA Experiment 20000117 PARAMETER Experiment Name: At_100uM_ABA_Mutants_cDNA_P Parameter: Timepoint (hr) Value: 6
  misc_feature: MA Experiment 20000117 PARAMETER Experiment Name: At_100uM_ABA_Mutants_cDNA_P Parameter: Tissue Value: Aerial
  misc_feature: MA Experiment 20000117 PARAMETER Experiment Name: At_100uM_ABA_Mutants_cDNA_P Parameter: Treatment Value: 100uM ABA vs. No Treatment
  misc_feature: MA Experiment ID: 20000144 Result: Down-regulated in Transcription
  misc_feature: MA Experiment 20000144 PARAMETER Experiment Name: At_42deg_Heat_cDNA_P Parameter: Temperature (deg C) Value: 42 vs. 22
  misc_feature: MA Experiment 20000144 PARAMETER Experiment Name: At_42deg_Heat_cDNA_P Parameter: Timepoint (hr) Value: 1
  misc_feature: MA Experiment 20000144 PARAMETER Experiment Name: At_42deg_Heat_cDNA_P Parameter: Tissue Value: Aerial
  misc_feature: MA Experiment ID: 20000171 Result: Down-regulated in Transcription
  misc_feature: MA Experiment 20000171 PARAMETER Experiment Name: At_42deg_Heat_P Parameter: Age (day) Value: 14
  misc_feature: MA Experiment 20000171 PARAMETER Experiment Name: At_42deg_Heat_P Parameter: Organism Value: A. thaliana
  misc_feature: MA Experiment 20000171 PARAMETER Experiment Name: At_42deg_Heat_P Parameter: Plant Line Value: WS
  misc_feature: MA Experiment 20000171 PARAMETER Experiment Name: At_42deg_Heat_P Parameter: Temperature (deg C) Value: 42 vs. 22
  misc_feature: MA Experiment 20000171 PARAMETER Experiment Name: At_42deg_Heat_P Parameter: Timepoint (hr) Value: 1
  misc_feature: MA Experiment 20000171 PARAMETER Experiment Name: At_42deg_Heat_P Parameter: Tissue Value: Aerial
  misc_feature: MA Experiment ID: 20000173 Result: Down-regulated in Transcription
  misc_feature: MA Experiment 20000173 PARAMETER Experiment Name: At_42deg_Heat_P Parameter: Age (day) Value: 14
  misc_feature: MA Experiment 20000173 PARAMETER Experiment Name: At_42deg_Heat_P Parameter: Organism Value: A. thaliana
  misc_feature: MA Experiment 20000173 PARAMETER Experiment Name: At_42deg_Heat_P Parameter: Plant Line Value: WS
  misc_feature: MA Experiment 20000173 PARAMETER Experiment Name: At_42deg_Heat_P Parameter: Temperature (deg C) Value: 42 vs. 22
  misc_feature: MA Experiment 20000173 PARAMETER Experiment Name: At_42deg_Heat_P Parameter: Timepoint (hr) Value: 6
  misc_feature: MA Experiment 20000173 PARAMETER Experiment Name: At_42deg_Heat_P Parameter: Tissue Value: Aerial
  misc_feature: MA Experiment ID: 20000180 Result: Down-regulated in Transcription
  misc_feature: MA Experiment 20000180 PARAMETER Experiment Name: At_Germinating_Seeds_P Parameter: Age (hr) Value: 24 vs. 0
  misc_feature: MA Experiment 20000180 PARAMETER Experiment Name: At_Germinating_Seeds_P Parameter: Tissue Value: Germinating Seeds
  misc_feature: MA Experiment ID: 20000184 Result: Down-regulated in Transcription
  misc_feature: MA Experiment 20000184 PARAMETER Experiment Name: At_Shoots__P Parameter: Age (day) Value: 7
  misc_feature: MA Experiment 20000184 PARAMETER Experiment Name: At_Shoots__P Parameter: Tissue Value: Shoots vs. Whole Plant
  misc_feature: MA Experiment ID: 20000227 Result: Down-regulated in Transcription
  misc_feature: MA Experiment 20000227 PARAMETER Experiment Name: At_Root-Tips-vs-Tops_P Parameter: Tissue Value: Root Tips vs. Root Tops
  misc_feature: MA Experiment ID: 20000234 Result: Down-regulated in Transcription
  misc_feature: MA Experiment 20000234 PARAMETER Experiment Name: At_Siliques_P Parameter: Age (day) Value: 21
  misc_feature: MA Experiment 20000234 PARAMETER Experiment Name: At_Siliques_P Parameter: Organism Value: A. thaliana
  misc_feature: MA Experiment 20000234 PARAMETER Experiment Name: At_Siliques_P Parameter: Plant Line Value: WS
  misc_feature: MA Experiment 20000234 PARAMETER Experiment Name: At_Siliques_P Parameter: Tissue Value: Less Than 5mm Siliques vs. Whole Plant
  misc_feature: MA Experiment ID: 20000235 Result: Down-regulated in Transcription
  misc_feature: MA Experiment 20000235 PARAMETER Experiment Name: At_Siliques_P Parameter: Age (day) Value: 21
  misc_feature: MA Experiment 20000235 PARAMETER Experiment Name: At_Siliques_P Parameter: Organism Value: A. thaliana
  misc_feature: MA Experiment 20000235 PARAMETER Experiment Name: At_Siliques_P Parameter: Plant Line Value: WS
  misc_feature: MA Experiment 20000235 PARAMETER Experiment Name: At_Siliques_P Parameter: Tissue Value: 5-10mm Siliques vs. Whole Plant
  misc_feature: MA Experiment ID: 20000438 Result: Down-regulated in Transcription
  misc_feature: MA Experiment 20000438 PARAMETER Experiment Name: At_Shoots__P Parameter: Age (day) Value: 14
  misc_feature: MA Experiment 20000438 PARAMETER Experiment Name: At_Shoots__P Parameter: Tissue Value: Shoots vs. Whole Plant
  misc_feature: MA Experiment ID: 20000451 Result: Down-regulated in Transcription
  misc_feature: MA Experiment 20000451 PARAMETER Experiment Name: At_CS6879_Shoots-Roots_P Parameter: Age (day) Value: 14
  misc_feature: MA Experiment 20000451 PARAMETER Experiment Name: At_CS6879_Shoots-Roots_P Parameter: Organism Value: A. thaliana
  misc_feature: MA Experiment 20000451 PARAMETER Experiment Name: At_CS6879_Shoots-Roots_P Parameter: Plant Line Value: CS6879 vs. WS
  misc_feature: MA Experiment 20000451 PARAMETER Experiment Name: At_CS6879_Shoots-Roots_P Parameter: Tissue Value: Roots
  misc_feature: MA Experiment ID: 20000495 Result: Down-regulated in Transcription
  misc_feature: MA Experiment 20000495 PARAMETER Experiment Name: At_Guard_Cells_P Parameter: Harvest Date Value: 8/2/2002
  misc_feature: MA Experiment 20000495 PARAMETER Experiment Name: At_Guard_Cells_P Parameter: Organism Value: A. thaliana
  misc_feature: MA Experiment 20000495 PARAMETER Experiment Name: At_Guard_Cells_P Parameter: Tissue Value: Guard Cells vs. Leaves
  misc_feature: MA Experiment ID: 20001247 Result: Down-regulated in Transcription
  misc_feature: MA Experiment 20001247 PARAMETER Experiment Name: At_Far-red-induction_P Parameter: Age (day) Value: 7
  misc_feature: MA Experiment 20001247 PARAMETER Experiment Name: At_Far-red-induction_P Parameter: Light Value: Far-red vs. White
  misc_feature: MA Experiment 20001247 PARAMETER Experiment Name: At_Far-red-induction_P Parameter: Organism Value: A. thaliana
  misc_feature: MA Experiment 20001247 PARAMETER Experiment Name: At_Far-red-induction_P Parameter: Plant Line Value: Columbia
  misc_feature: MA Experiment 20001247 PARAMETER Experiment Name: At_Far-red-induction_P Parameter: Timepoint (hr) Value: 1
  misc_feature: MA Experiment 20001247 PARAMETER Experiment Name: At_Far-red-induction_P Parameter: Tissue Value: Whole Plant
  misc_feature: MA Experiment ID: 20001451 Result: Down-regulated in Transcription
  misc_feature: MA Experiment 20001451 PARAMETER Experiment Name: At_Far-red-induction_P Parameter: Age (day) Value: 7
  misc_feature: MA Experiment 20001451 PARAMETER Experiment Name: At_Far-red-induction_P Parameter: Light Value: Far-red vs. White
  misc_feature: MA Experiment 20001451 PARAMETER Experiment Name: At_Far-red-induction_P Parameter: Organism Value: A. thaliana
  misc_feature: MA Experiment 20001451 PARAMETER Experiment Name: At_Far-red-induction_P Parameter: Plant Line Value: Columbia
  misc_feature: MA Experiment 20001451 PARAMETER Experiment Name: At_Far-red-induction_P Parameter: Timepoint (hr) Value: 24
  misc_feature: MA Experiment 20001451 PARAMETER Experiment Name: At_Far-red-induction_P Parameter: Tissue Value: Whole Plant
  misc_feature: MA Experiment ID: 20001557 Result: Down-regulated in Transcription
  misc_feature: MA Experiment 20001557 PARAMETER Experiment Name: At_Drought_Soil_Dry_P Parameter: Age (day) Value: 27
  misc_feature: MA Experiment 20001557 PARAMETER Experiment Name: At_Drought_Soil_Dry_P Parameter: Organism Value: A. thaliana
  misc_feature: MA Experiment 20001557 PARAMETER Experiment Name: At_Drought_Soil_Dry_P Parameter: Plant Line Value: WS
  misc_feature: MA Experiment 20001557 PARAMETER Experiment Name: At_Drought_Soil_Dry_P Parameter: Post Timepoint (hr) Value: 3
  misc_feature: MA Experiment 20001557 PARAMETER Experiment Name: At_Drought_Soil_Dry_P Parameter: Post-Treatment Value: Re-Water vs. No Drought
  misc_feature: MA Experiment 20001557 PARAMETER Experiment Name: At_Drought_Soil_Dry_P Parameter: Timepoint (day) Value: 13
  misc_feature: MA Experiment 20001557 PARAMETER Experiment Name: At_Drought_Soil_Dry_P Parameter: Treatment Value: Drought vs. No Drought
  misc_feature: MA Experiment ID: 20001558 Result: Down-regulated in Transcription
  misc_feature: MA Experiment 20001558 PARAMETER Experiment Name: At_Drought_Soil_Dry_P Parameter: Age (day) Value: 27
  misc_feature: MA Experiment 20001558 PARAMETER Experiment Name: At_Drought_Soil_Dry_P Parameter: Organism Value: A. thaliana
  misc_feature: MA Experiment 20001558 PARAMETER Experiment Name: At_Drought_Soil_Dry_P Parameter: Plant Line Value: WS
  misc_feature: MA Experiment 20001558 PARAMETER Experiment Name: At_Drought_Soil_Dry_P Parameter: Post Timepoint (hr) Value: 6
  misc_feature: MA Experiment 20001558 PARAMETER Experiment Name: At_Drought_Soil_Dry_P Parameter: Post-Treatment Value: Re-Water vs. No Drought
  misc_feature: MA Experiment 20001558 PARAMETER Experiment Name: At_Drought_Soil_Dry_P Parameter: Timepoint (day) Value: 13
  misc_feature: MA Experiment 20001558 PARAMETER Experiment Name: At_Drought_Soil_Dry_P Parameter: Treatment Value: Drought vs. No Drought
  misc_feature: MA Experiment ID: 20001560 Result: Down-regulated in Transcription
  misc_feature: MA Experiment 20001560 PARAMETER Experiment Name: At_Drought_Soil_Dry_P Parameter: Age (day) Value: 28
  misc_feature: MA Experiment 20001560 PARAMETER Experiment Name: At_Drought_Soil_Dry_P Parameter: Organism Value: A. thaliana
  misc_feature: MA Experiment 20001560 PARAMETER Experiment Name: At_Drought_Soil_Dry_P Parameter: Plant Line Value: WS
  misc_feature: MA Experiment 20001560 PARAMETER Experiment Name: At_Drought_Soil_Dry_P Parameter: Post Timepoint (hr) Value: None
  misc_feature: MA Experiment 20001560 PARAMETER Experiment Name: At_Drought_Soil_Dry_P Parameter: Post-Treatment Value: None
  misc_feature: MA Experiment 20001560 PARAMETER Experiment Name: At_Drought_Soil_Dry_P Parameter: Timepoint (day) Value: 14
  misc_feature: MA Experiment 20001560 PARAMETER Experiment Name: At_Drought_Soil_Dry_P Parameter: Treatment Value: Drought vs. No Drought

SEQ ID NO: 33282 - protein, 172 aa, Arabidopsis thaliana; identical to SEQ ID NO: 24529
  peptide (1)..(172): Ceres Seq. ID no. 12332059
  misc_feature (31)..(171): Pfam Name: Core histone H2A/H2B/H3/H4 Pfam Description: Core histone H2A/H2B/H3/H4
  misc_feature (31)..(171): Pfam Name: Core histone H2A/H2B/H3/H4 Pfam Description: Core histone H2A/H2B/H3/H4
  misc_feature (22)..(172): Homolog of NCBI NO: 7387727 NR Description: Histone H2B (CaH2B)
  misc_feature (29)..(172): Homolog of NCBI NO: 7439754 NR Description: histone H2B-3 - tomato (fragment)
  misc_feature (22)..(172): Homolog of NCBI NO: 15231313 NR Description: histone H2B -like protein
  misc_feature (22)..(172): Homolog of NCBI NO: 21617908 NR Description: histone H2B [Arabidopsis thaliana]
  misc_feature (22)..(172): Homolog of NCBI NO: 15223016 NR Description: histone H2B
  misc_feature (22)..(172): Homolog of NCBI NO: 7387727 NR Description: Histone H2B (CaH2B)
  misc_feature (22)..(172): Homolog of NCBI NO: 15231313 NR Description: histone H2B -like protein
  misc_feature (22)..(172): Homolog of NCBI NO: 15223016 NR Description: histone H2B
  misc_feature (22)..(172): Homolog of NCBI NO: 15226943 NR Description: putative histone H2B
  misc_feature (22)..(172): Homolog of NCBI NO: 15238563 NR Description: histone H2B - like protein
  misc_feature (22)..(172): Homolog of NCBI NO: 21554180 NR Description: histone H2B-like protein [Arabidopsis thaliana]
  misc_feature (22)..(172): Homolog of NCBI NO: 15231304 NR Description: histone H2B; protein id: At3g45980.1, supported
  misc_feature (22)..(172): Homolog of NCBI NO: 7387726 NR Description: Histone H2B
  misc_feature (22)..(172): Homolog of NCBI NO: 21617908 NR Description: histone H2B [Arabidopsis thaliana]
  misc_feature (29)..(172): Homolog of NCBI NO: 7439754 NR Description: histone H2B-3 - tomato (fragment)
  misc_feature (22)..(172): Homolog of NCBI NO: 7387726 NR Description: Histone H2B
  misc_feature (22)..(172): Homolog of NCBI NO: 15231304 NR Description: histone H2B; protein id: At3g45980.1, supported
  misc_feature (22)..(172): Homolog of NCBI NO: 21554180 NR Description: histone H2B-like protein [Arabidopsis thaliana]
  misc_feature (22)..(172): Homolog of NCBI NO: 15238563 NR Description: histone H2B - like protein
  misc_feature (22)..(172): Homolog of NCBI NO: 15226943 NR Description: putative histone H2B

SEQ ID NO: 33283 - protein, 151 aa, Arabidopsis thaliana; identical to SEQ ID NO: 24530
  peptide (1)..(151): Ceres Seq. ID no. 12332060
  misc_feature (10)..(150): Pfam Name: Core histone H2A/H2B/H3/H4 Pfam Description: Core histone H2A/H2B/H3/H4
  misc_feature (10)..(150): Pfam Name: Core histone H2A/H2B/H3/H4 Pfam Description: Core histone H2A/H2B/H3/H4
  misc_feature (1)..(151): Homolog of NCBI NO: 7387727 NR Description: Histone H2B (CaH2B)
  misc_feature (8)..(151): Homolog of NCBI NO: 7439754 NR Description: histone H2B-3 - tomato (fragment)
  misc_feature (1)..(151): Homolog of NCBI NO: 15231313 NR Description: histone H2B -like protein
  misc_feature (1)..(151): Homolog of NCBI NO: 21617908 NR Description: histone H2B [Arabidopsis thaliana]
  misc_feature (1)..(151): Homolog of NCBI NO: 15223016 NR Description: histone H2B
  misc_feature (1)..(151): Homolog of NCBI NO: 7387727 NR Description: Histone H2B (CaH2B)
  misc_feature (1)..(151): Homolog of NCBI NO: 15231313 NR Description: histone H2B -like protein
  misc_feature (1)..(151): Homolog of NCBI NO: 15223016 NR Description: histone H2B
  misc_feature (1)..(151): Homolog of NCBI NO: 15226943 NR Description: putative histone H2B
  misc_feature (1)..(151): Homolog of NCBI NO: 15238563 NR Description: histone H2B - like protein
  misc_feature (1)..(151): Homolog of NCBI NO: 21554180 NR Description: histone H2B-like protein [Arabidopsis thaliana]
  misc_feature (1)..(151): Homolog of NCBI NO: 15231304 NR Description: histone H2B; protein id: At3g45980.1, supported
  misc_feature (1)..(151): Homolog of NCBI NO: 7387726 NR Description: Histone H2B
  misc_feature (1)..(151): Homolog of NCBI NO: 21617908 NR Description: histone H2B [Arabidopsis thaliana]
  misc_feature (8)..(151): Homolog of NCBI NO: 7439754 NR Description: histone H2B-3 - tomato (fragment)
  misc_feature (1)..(151): Homolog of NCBI NO: 7387726 NR Description: Histone H2B
  misc_feature (1)..(151): Homolog of NCBI NO: 15231304 NR Description: histone H2B; protein id: At3g45980.1, supported
  misc_feature (1)..(151): Homolog of NCBI NO: 21554180 NR Description: histone H2B-like protein [Arabidopsis thaliana]
  misc_feature (1)..(151): Homolog of NCBI NO: 15238563 NR Description: histone H2B - like protein
  misc_feature (1)..(151): Homolog of NCBI NO: 15226943 NR Description: putative histone H2B

SEQ ID NO: 33284 - DNA, 812 bp, Arabidopsis thaliana; identical to SEQ ID NO: 29694
  misc_feature (1)..(812): Ceres Seq. ID no. 12321339
  misc_feature: MA Experiment ID: 108595 Result: Down-regulated in Transcription
  misc_feature: MA Experiment 108595 PARAMETER Experiment Name: At_Ler-pi_Ovule_cDNA_P Parameter: Plant Line Value: null

SEQ ID NO: 33285 - protein, 218 aa, Arabidopsis thaliana; identical to SEQ ID NO: 29695
  peptide (1)..(218): Ceres Seq. ID no. 12321340
  misc_feature (86)..(218): Homolog of NCBI NO: 27376428 NR Description: peroxiredoxin [Bradyrhizobium japonicum]
  misc_feature (85)..(218): Homolog of NCBI NO: 13476239 NR Description: peroxiredoxin-like protein [Mesorhizobium loti]
  misc_feature (83)..(218): Homolog of NCBI NO: 16127624 NR Description: AhpC/TSA family protein [Caulobacter crescentus
  misc_feature (62)..(218): Homolog of NCBI NO: 15888122 NR Description: AGR_C_1423p [Agrobacterium tumefaciens]
  misc_feature (86)..(218): Homolog of NCBI NO: 23501379 NR Description: ahpC/TSA family protein [Brucella suis 1330]
  misc_feature (86)..(218): Homolog of NCBI NO: 17987739 NR Description: THIOL PEROXIDASE [Brucella melitensis]
  misc_feature (18)..(218): Homolog of NCBI NO: 34903114 NR Description: unnamed protein product [Oryza sativa (japonica
  misc_feature (20)..(218): Homolog of NCBI NO: 7658343 NR Description: unknown protein; 13384-11892 [Arabidopsis
  misc_feature (18)..(218): Homolog of NCBI NO: 21553531 NR Description: unknown [Arabidopsis thaliana]
  misc_feature (18)..(218): Homolog of NCBI NO: 18397457 NR Description: expressed protein

SEQ ID NO: 33286 - protein, 201 aa, Arabidopsis thaliana; identical to SEQ ID NO: 29696
  peptide (1)..(201): Ceres Seq. ID no. 12321341
  misc_feature (69)..(201): Homolog of NCBI NO: 27376428 NR Description: peroxiredoxin [Bradyrhizobium japonicum]
  misc_feature (68)..(201): Homolog of NCBI NO: 13476239 NR Description: peroxiredoxin-like protein [Mesorhizobium loti]
  misc_feature (66)..(201): Homolog of NCBI NO: 16127624 NR Description: AhpC/TSA family protein [Caulobacter crescentus
  misc_feature (45)..(201): Homolog of NCBI NO: 15888122 NR Description: AGR_C_1423p [Agrobacterium tumefaciens]
  misc_feature (69)..(201): Homolog of NCBI NO: 23501379 NR Description: ahpC/TSA family protein [Brucella suis 1330]
  misc_feature (69)..(201): Homolog of NCBI NO: 17987739 NR Description: THIOL PEROXIDASE [Brucella melitensis]
  misc_feature (1)..(201): Homolog of NCBI NO: 34903114 NR Description: unnamed protein product [Oryza sativa (japonica
  misc_feature (3)..(201): Homolog of NCBI NO: 7658343 NR Description: unknown protein; 13384-11892 [Arabidopsis
  misc_feature (1)..(201): Homolog of NCBI NO: 21553531 NR Description: unknown [Arabidopsis thaliana]
  misc_feature (1)..(201): Homolog of NCBI NO: 18397457 NR Description: expressed protein

SEQ ID NO: 33287 - protein, 199 aa, Arabidopsis thaliana; identical to SEQ ID NO: 29697
  peptide (1)..(199): Ceres Seq. ID no. 12321342
  misc_feature (67)..(199): Homolog of NCBI NO: 27376428 NR Description: peroxiredoxin [Bradyrhizobium japonicum]
  misc_feature (66)..(199): Homolog of NCBI NO: 13476239 NR Description: peroxiredoxin-like protein [Mesorhizobium loti]
  misc_feature (64)..(199): Homolog of NCBI NO: 16127624 NR Description: AhpC/TSA family protein [Caulobacter crescentus
  misc_feature (43)..(199): Homolog of NCBI NO: 15888122 NR Description: AGR_C_1423p [Agrobacterium tumefaciens]
  misc_feature (67)..(199): Homolog of NCBI NO: 23501379 NR Description: ahpC/TSA family protein [Brucella suis 1330]
  misc_feature (67)..(199): Homolog of NCBI NO: 17987739 NR Description: THIOL PEROXIDASE [Brucella melitensis]
  misc_feature (1)..(199): Homolog of NCBI NO: 34903114 NR Description: unnamed protein product [Oryza sativa (japonica
  misc_feature (1)..(199): Homolog of NCBI NO: 7658343 NR Description: unknown protein; 13384-11892 [Arabidopsis
  misc_feature (1)..(199): Homolog of NCBI NO: 21553531 NR Description: unknown [Arabidopsis thaliana]
  misc_feature (1)..(199): Homolog of NCBI NO: 18397457 NR Description: expressed protein

SEQ ID NO: 33288 - DNA, 1112 bp, Arabidopsis thaliana; identical to SEQ ID NO: 29698
  misc_feature (1)..(1112): Ceres Seq. ID no. 12421015
  misc_feature: MA Experiment ID: 108462 Result: Up-regulated in Transcription
  misc_feature: MA Experiment 108462 PARAMETER Experiment Name: At_Germinating_Seeds_cDNA_P Parameter: Age (day) Value: 2 vs. 0
  misc_feature: MA Experiment 108462 PARAMETER Experiment Name: At_Germinating_Seeds_cDNA_P Parameter: Tissue Value: Germinating Seeds
  misc_feature: MA Experiment ID: 108463 Result: Up-regulated in Transcription
  misc_feature: MA Experiment 108463 PARAMETER Experiment Name: At_Germinating_Seeds_cDNA_P Parameter: Age (day) Value: 3 vs. 0
  misc_feature: MA Experiment 108463 PARAMETER Experiment Name: At_Germinating_Seeds_cDNA_P Parameter: Tissue Value: Germinating Seeds
  misc_feature: MA Experiment ID: 108488 Result: Down-regulated in Transcription
  misc_feature: MA Experiment ID: 108579 Result: Down-regulated in Transcription
  misc_feature: MA Experiment 108579 PARAMETER Experiment Name: At_4deg_Cold_cDNA_P Parameter: Temperature (deg C) Value: 4 vs. 22
  misc_feature: MA Experiment 108579 PARAMETER Experiment Name: At_4deg_Cold_cDNA_P Parameter: Timepoint (hr) Value: 6
  misc_feature: MA Experiment 108579 PARAMETER Experiment Name: At_4deg_Cold_cDNA_P Parameter: Tissue Value: Aerial
  misc_feature: MA Experiment ID: 20000111 Result: Up-regulated in Transcription
  misc_feature: MA Experiment 20000111 PARAMETER Experiment Name: At_42deg_Heat_cDNA_P Parameter: Temperature (deg C) Value: 42 vs. 22
  misc_feature: MA Experiment 20000111 PARAMETER Experiment Name: At_42deg_Heat_cDNA_P Parameter: Timepoint (hr) Value: 6
  misc_feature: MA Experiment 20000111 PARAMETER Experiment Name: At_42deg_Heat_cDNA_P Parameter: Tissue Value: Aerial
  misc_feature: MA Experiment ID: 20000573 Result: Up-regulated in Transcription
  misc_feature: MA Experiment 20000573 PARAMETER Experiment Name: At_100uM_ABA_Mutants__P Parameter: Organism Value: A. thaliana
  misc_feature: MA Experiment 20000573 PARAMETER Experiment Name: At_100uM_ABA_Mutants__P Parameter: Plant Line Value: CS22 vs. Ler wt
  misc_feature: MA Experiment 20000573 PARAMETER Experiment Name: At_100uM_ABA_Mutants__P Parameter: Timepoint (hr) Value: N/A
  misc_feature: MA Experiment 20000573 PARAMETER Experiment Name: At_100uM_ABA_Mutants__P Parameter: Tissue Value: Whole Plant
  misc_feature: MA Experiment 20000573 PARAMETER Experiment Name: At_100uM_ABA_Mutants__P Parameter: Treatment Value: None
  misc_feature: MA Experiment ID: 20000574 Result: Up-regulated in Transcription
  misc_feature: MA Experiment 20000574 PARAMETER Experiment Name: At_100uM_ABA_Mutants__P Parameter: Organism Value: A. thaliana
  misc_feature: MA Experiment 20000574 PARAMETER Experiment Name: At_100uM_ABA_Mutants__P Parameter: Plant Line Value: CS23 vs. Ler wt
  misc_feature: MA Experiment 20000574 PARAMETER Experiment Name: At_100uM_ABA_Mutants__P Parameter: Timepoint (hr) Value: N/A
  misc_feature: MA Experiment 20000574 PARAMETER Experiment Name: At_100uM_ABA_Mutants__P Parameter: Tissue Value: Whole Plant
  misc_feature: MA Experiment 20000574 PARAMETER Experiment Name: At_100uM_ABA_Mutants__P Parameter: Treatment Value: None
  misc_feature: MA Experiment ID: 20000794 Result: Up-regulated in Transcription
  misc_feature: MA Experiment 20000794 PARAMETER Experiment Name: At_Petals_P Parameter: Age (day) Value: 23-25 days
  misc_feature: MA Experiment 20000794 PARAMETER Experiment Name: At_Petals_P Parameter: Plant Line Value: WS
  misc_feature: MA Experiment 20000794 PARAMETER Experiment Name: At_Petals_P Parameter: Tissue Value: Petals vs. Whole plant

SEQ ID NO: 33289 - protein, 331 aa, Arabidopsis thaliana; identical to SEQ ID NO: 29699
  peptide (1)..(331): Ceres Seq. ID no. 12421016
  misc_feature (41)..(290): Homolog of NCBI NO: 15964328 NR Description: RIBITOL TYPE DEHYDROGENASE PROTEIN [Sinorhizobium
  misc_feature (9)..(328): Homolog of NCBI NO: 21356301 NR Description: CG10425-PA [Drosophila melanogaster]
  misc_feature (13)..(309): Homolog of NCBI NO: 39583655 NR Description: Hypothetical protein CBG08294 [Caenorhabditis
  misc_feature (14)..(325): Homolog of NCBI NO: 34878781 NR Description: similar to 6330410P18Rik protein [Rattus
  misc_feature (13)..(328): Homolog of NCBI NO: 30585239 NR Description: Homo sapiens follicular lymphoma variant
  misc_feature (13)..(328): Homolog of NCBI NO: 4503817 NR Description: follicular lymphoma variant translocation 1 [Homo
  misc_feature (9)..(309): Homolog of NCBI NO: 27882572 NR Description: Similar to follicular lymphoma variant
  misc_feature (3)..(324): Homolog of NCBI NO: 30679701 NR Description: short-chain dehydrogenase/reductase family
  misc_feature (3)..(324): Homolog of NCBI NO: 7658344 NR Description: unknown protein; 15741-13972 [Arabidopsis
  misc_feature (3)..(331): Homolog of NCBI NO: 15239681 NR Description: FVT1 - like protein; protein id: At5g19200.1

SEQ ID NO: 33290 - protein, 329 aa, Arabidopsis thaliana; identical to SEQ ID NO: 29700
  peptide (1)..(329): Ceres Seq. ID no. 12421017
  misc_feature (39)..(288): Homolog of NCBI NO: 15964328 NR Description: RIBITOL TYPE DEHYDROGENASE PROTEIN [Sinorhizobium
  misc_feature (7)..(326): Homolog of NCBI NO: 21356301 NR Description: CG10425-PA [Drosophila melanogaster]
  misc_feature (11)..(307): Homolog of NCBI NO: 39583655 NR Description: Hypothetical protein CBG08294 [Caenorhabditis
  misc_feature (12)..(323): Homolog of NCBI NO: 34878781 NR Description: similar to 6330410P18Rik protein [Rattus
  misc_feature (11)..(326): Homolog of NCBI NO: 30585239 NR Description: Homo sapiens follicular lymphoma variant
  misc_feature (11)..(326): Homolog of NCBI NO: 4503817 NR Description: follicular lymphoma variant translocation 1 [Homo
  misc_feature (7)..(307): Homolog of NCBI NO: 27882572 NR Description: Similar to follicular lymphoma variant
  misc_feature (1)..(322): Homolog of NCBI NO: 30679701 NR Description: short-chain dehydrogenase/reductase family
  misc_feature (1)..(322): Homolog of NCBI NO: 7658344 NR Description: unknown protein; 15741-13972 [Arabidopsis
  misc_feature (1)..(329): Homolog of NCBI NO: 15239681 NR Description: FVT1 - like protein; protein id: At5g19200.1

SEQ ID NO: 33291 - protein, 192 aa, Arabidopsis thaliana; identical to SEQ ID NO: 29701
  peptide (1)..(192): Ceres Seq. ID no. 12421018
  misc_feature (1)..(151): Homolog of NCBI NO: 15964328 NR Description: RIBITOL TYPE DEHYDROGENASE PROTEIN [Sinorhizobium
  misc_feature (1)..(189): Homolog of NCBI NO: 21356301 NR Description: CG10425-PA [Drosophila melanogaster]
  misc_feature (1)..(170): Homolog of NCBI NO: 39583655 NR Description: Hypothetical protein CBG08294 [Caenorhabditis
  misc_feature (1)..(186): Homolog of NCBI NO: 34878781 NR Description: similar to 6330410P18Rik protein [Rattus
  misc_feature (1)..(189): Homolog of NCBI NO: 30585239 NR Description: Homo sapiens follicular lymphoma variant
  misc_feature (1)..(189): Homolog of NCBI NO: 4503817 NR Description: follicular lymphoma variant translocation 1 [Homo
  misc_feature (1)..(170): Homolog of NCBI NO: 27882572 NR Description: Similar to follicular lymphoma variant
  misc_feature (1)..(185): Homolog of NCBI NO: 30679701 NR Description: short-chain dehydrogenase/reductase family
  misc_feature (1)..(185): Homolog of NCBI NO: 7658344 NR Description: unknown protein; 15741-13972 [Arabidopsis
  misc_feature (1)..(192): Homolog of NCBI NO: 15239681 NR Description: FVT1 - like protein; protein id: At5g19200.1

SEQ ID NO: 33292 - DNA, 772 bp, Arabidopsis thaliana; identical to SEQ ID NO: 29702
  misc_feature (1)..(772): Ceres Seq. ID no. 12332756
  misc_feature: MA Experiment ID: 108573 Result: Up-regulated in Transcription
  misc_feature: MA Experiment 108573 PARAMETER Experiment Name: At_Drought_cDNA_P Parameter: Timepoint (hr) Value: 6
  misc_feature: MA Experiment 108573 PARAMETER Experiment Name: At_Drought_cDNA_P Parameter: Tissue Value: Aerial
  misc_feature: MA Experiment 108573 PARAMETER Experiment Name: At_Drought_cDNA_P Parameter: Treatment Value: Drought vs. No Drought
  misc_feature: MA Experiment ID: 108579 Result: Up-regulated in Transcription
  misc_feature: MA Experiment 108579 PARAMETER Experiment Name: At_4deg_Cold_cDNA_P Parameter: Temperature (deg C) Value: 4 vs. 22
  misc_feature: MA Experiment 108579 PARAMETER Experiment Name: At_4deg_Cold_cDNA_P Parameter: Timepoint (hr) Value: 6
  misc_feature: MA Experiment 108579 PARAMETER Experiment Name: At_4deg_Cold_cDNA_P Parameter: Tissue Value: Aerial
  misc_feature: MA Experiment ID: 20000171 Result: Down-regulated in Transcription
  misc_feature: MA Experiment 20000171 PARAMETER Experiment Name: At_42deg_Heat_P Parameter: Age (day) Value: 14
  misc_feature: MA Experiment 20000171 PARAMETER Experiment Name: At_42deg_Heat_P Parameter: Organism Value: A. thaliana
  misc_feature: MA Experiment 20000171 PARAMETER Experiment Name: At_42deg_Heat_P Parameter: Plant Line Value: WS
  misc_feature: MA Experiment 20000171 PARAMETER Experiment Name: At_42deg_Heat_P Parameter: Temperature (deg C) Value: 42 vs. 22
  misc_feature: MA Experiment 20000171 PARAMETER Experiment Name: At_42deg_Heat_P Parameter: Timepoint (hr) Value: 1
  misc_feature: MA Experiment 20000171 PARAMETER Experiment Name: At_42deg_Heat_P Parameter: Tissue Value: Aerial
  misc_feature: MA Experiment ID: 20000184 Result: Up-regulated in Transcription
  misc_feature: MA Experiment 20000184 PARAMETER Experiment Name: At_Shoots__P Parameter: Age (day) Value: 7
  misc_feature: MA Experiment 20000184 PARAMETER Experiment Name: At_Shoots__P Parameter: Tissue Value: Shoots vs. Whole Plant
  misc_feature: MA Experiment ID: 20000185 Result: Down-regulated in Transcription
  misc_feature: MA Experiment 20000185 PARAMETER Experiment Name: At_Roots__P Parameter: Age (day) Value: 7 vs. 21
  misc_feature: MA Experiment 20000185 PARAMETER Experiment Name: At_Roots__P Parameter: Organism Value: A. thaliana
  misc_feature: MA Experiment 20000185 PARAMETER Experiment Name: At_Roots__P Parameter: Tissue Value: Roots vs. Whole Plant
  misc_feature: MA Experiment ID: 20000234 Result: Up-regulated in Transcription
  misc_feature: MA Experiment 20000234 PARAMETER Experiment Name: At_Siliques_P Parameter: Age (day) Value: 21
  misc_feature: MA Experiment 20000234 PARAMETER Experiment Name: At_Siliques_P Parameter: Organism Value: A. thaliana
  misc_feature: MA Experiment 20000234 PARAMETER Experiment Name: At_Siliques_P Parameter: Plant Line Value: WS
  misc_feature: MA Experiment 20000234 PARAMETER Experiment Name: At_Siliques_P Parameter: Tissue Value: Less Than 5mm Siliques vs. Whole Plant
  misc_feature: MA Experiment ID: 20000436 Result: Up-regulated in Transcription
  misc_feature: MA Experiment 20000436 PARAMETER Experiment Name: At_Drought_P Parameter: Age (day) Value: 7
  misc_feature: MA Experiment 20000436 PARAMETER Experiment Name: At_Drought_P Parameter: Organism Value: A. thaliana
  misc_feature: MA Experiment 20000436 PARAMETER Experiment Name: At_Drought_P Parameter: Plant Line Value: WS
  misc_feature: MA Experiment 20000436 PARAMETER Experiment Name: At_Drought_P Parameter: Timepoint (hr) Value: 12
  misc_feature: MA Experiment 20000436 PARAMETER Experiment Name: At_Drought_P Parameter: Tissue Value: Whole Plant
  misc_feature: MA Experiment 20000436 PARAMETER Experiment Name: At_Drought_P Parameter: Treatment Value: Drought vs. No Drought
  misc_feature: MA Experiment ID: 20000438 Result: Up-regulated in Transcription
  misc_feature: MA Experiment 20000438 PARAMETER Experiment Name: At_Shoots__P Parameter: Age (day) Value: 14
  misc_feature: MA Experiment 20000438 PARAMETER Experiment Name: At_Shoots__P Parameter: Tissue Value: Shoots vs. Whole Plant
  misc_feature: MA Experiment ID: 20000439 Result: Down-regulated in Transcription
  misc_feature: MA Experiment 20000439 PARAMETER Experiment Name: At_Roots__P Parameter: Age (day) Value: 14 vs. 21
  misc_feature: MA Experiment 20000439 PARAMETER Experiment Name: At_Roots__P Parameter: Organism Value: A. thaliana
  misc_feature: MA Experiment 20000439 PARAMETER Experiment Name: At_Roots__P Parameter: Tissue Value: Roots vs. Whole Plant
  misc_feature: MA Experiment ID: 20000451 Result: Up-regulated in Transcription
  misc_feature: MA Experiment 20000451 PARAMETER Experiment Name: At_CS6879_Shoots-Roots_P Parameter: Age (day) Value: 14
  misc_feature: MA Experiment 20000451 PARAMETER Experiment Name: At_CS6879_Shoots-Roots_P Parameter: Organism Value: A. thaliana
  misc_feature: MA Experiment 20000451 PARAMETER Experiment Name: At_CS6879_Shoots-Roots_P Parameter: Plant Line Value: CS6879 vs. WS
  misc_feature: MA Experiment 20000451 PARAMETER Experiment Name: At_CS6879_Shoots-Roots_P Parameter: Tissue Value: Roots
  misc_feature: MA Experiment ID: 20000573 Result: Down-regulated in Transcription
  misc_feature: MA Experiment 20000573 PARAMETER Experiment Name: At_100uM_ABA_Mutants__P Parameter: Organism Value: A. thaliana
  misc_feature: MA Experiment 20000573 PARAMETER Experiment Name: At_100uM_ABA_Mutants__P Parameter: Plant Line Value: CS22 vs. Ler wt
  misc_feature: MA Experiment 20000573 PARAMETER Experiment Name: At_100uM_ABA_Mutants__P Parameter: Timepoint (hr) Value: N/A
  misc_feature: MA Experiment 20000573 PARAMETER Experiment Name: At_100uM_ABA_Mutants__P Parameter: Tissue Value: Whole Plant
  misc_feature: MA Experiment 20000573 PARAMETER Experiment Name: At_100uM_ABA_Mutants__P Parameter: Treatment Value: None
  misc_feature: MA Experiment ID: 20001248 Result: Down-regulated in Transcription
  misc_feature: MA Experiment 20001248 PARAMETER Experiment Name: At_Far-red-induction_P Parameter: Age (day) Value: 7
  misc_feature: MA Experiment 20001248 PARAMETER Experiment Name: At_Far-red-induction_P Parameter: Light Value: Far-red vs. White
  misc_feature: MA Experiment 20001248 PARAMETER Experiment Name: At_Far-red-induction_P Parameter: Organism Value: A. thaliana
  misc_feature: MA Experiment 20001248 PARAMETER Experiment Name: At_Far-red-induction_P Parameter: Plant Line Value: Columbia
  misc_feature: MA Experiment 20001248 PARAMETER Experiment Name: At_Far-red-induction_P Parameter: Timepoint (hr) Value: 4
  misc_feature: MA Experiment 20001248 PARAMETER Experiment Name: At_Far-red-induction_P Parameter: Tissue Value: Whole Plant
  misc_feature: MA Experiment ID: 20001557 Result: Up-regulated in Transcription
  misc_feature: MA Experiment 20001557 PARAMETER Experiment Name: At_Drought_Soil_Dry_P Parameter: Age (day) Value: 27
  misc_feature: MA Experiment 20001557 PARAMETER Experiment Name: At_Drought_Soil_Dry_P Parameter: Organism Value: A. thaliana
  misc_feature: MA Experiment 20001557 PARAMETER Experiment Name: At_Drought_Soil_Dry_P Parameter: Plant Line Value: WS
  misc_feature: MA Experiment 20001557 PARAMETER Experiment Name: At_Drought_Soil_Dry_P Parameter: Post Timepoint (hr) Value: 3
  misc_feature: MA Experiment 20001557 PARAMETER Experiment Name: At_Drought_Soil_Dry_P Parameter: Post-Treatment Value: Re-Water vs. No Drought
  misc_feature: MA Experiment 20001557 PARAMETER Experiment Name: At_Drought_Soil_Dry_P Parameter: Timepoint (day) Value: 13
  misc_feature: MA Experiment 20001557 PARAMETER Experiment Name: At_Drought_Soil_Dry_P Parameter: Treatment Value: Drought vs. No Drought
  misc_feature: MA Experiment ID: 20001558 Result: Up-regulated in Transcription
  misc_feature: MA Experiment 20001558 PARAMETER Experiment Name: At_Drought_Soil_Dry_P Parameter: Age (day) Value: 27
  misc_feature: MA Experiment 20001558 PARAMETER Experiment Name: At_Drought_Soil_Dry_P Parameter: Organism Value: A. thaliana
  misc_feature: MA Experiment 20001558 PARAMETER Experiment Name: At_Drought_Soil_Dry_P Parameter: Plant Line Value: WS
  misc_feature: MA Experiment 20001558 PARAMETER Experiment Name: At_Drought_Soil_Dry_P Parameter: Post Timepoint (hr) Value: 6
  misc_feature: MA Experiment 20001558 PARAMETER Experiment Name: At_Drought_Soil_Dry_P Parameter: Post-Treatment Value: Re-Water vs. No Drought
  misc_feature: MA Experiment 20001558 PARAMETER Experiment Name: At_Drought_Soil_Dry_P Parameter: Timepoint (day) Value: 13
  misc_feature: MA Experiment 20001558 PARAMETER Experiment Name: At_Drought_Soil_Dry_P Parameter: Treatment Value: Drought vs. No Drought
  misc_feature: MA Experiment ID: 20001560 Result: Up-regulated in Transcription
  misc_feature: MA Experiment 20001560 PARAMETER Experiment Name: At_Drought_Soil_Dry_P Parameter: Age (day) Value: 28
  misc_feature: MA Experiment 20001560 PARAMETER Experiment Name: At_Drought_Soil_Dry_P Parameter: Organism Value: A. thaliana
  misc_feature: MA Experiment 20001560 PARAMETER Experiment Name: At_Drought_Soil_Dry_P Parameter: Plant Line Value: WS
  misc_feature: MA Experiment 20001560 PARAMETER Experiment Name: At_Drought_Soil_Dry_P Parameter: Post Timepoint (hr) Value: None
  misc_feature: MA Experiment 20001560 PARAMETER Experiment Name: At_Drought_Soil_Dry_P Parameter: Post-Treatment Value: None
  misc_feature: MA Experiment 20001560 PARAMETER Experiment Name: At_Drought_Soil_Dry_P Parameter: Timepoint (day) Value: 14
  misc_feature: MA Experiment 20001560 PARAMETER Experiment Name: At_Drought_Soil_Dry_P Parameter: Treatment Value: Drought vs. No Drought
  misc_feature: MA Experiment ID: 20001904 Result: Up-regulated in Transcription
  misc_feature: MA Experiment 20001904 PARAMETER Experiment Name: At_Drought_Reproduction_P Parameter: Age (day) Value: 37
  misc_feature: MA Experiment 20001904 PARAMETER Experiment Name: At_Drought_Reproduction_P Parameter: Organism Value: A. thaliana
  misc_feature: MA Experiment 20001904 PARAMETER Experiment Name: At_Drought_Reproduction_P Parameter: Plant Line Value: WS
  misc_feature: MA Experiment 20001904 PARAMETER Experiment Name: At_Drought_Reproduction_P Parameter: Timepoint (day) Value: 7
  misc_feature: MA Experiment 20001904 PARAMETER Experiment Name: At_Drought_Reproduction_P Parameter: Tissue Value: Rosettes
  misc_feature: MA Experiment 20001904 PARAMETER Experiment Name: At_Drought_Reproduction_P Parameter: Treatment Value: Drought vs. No Drought

SEQ ID NO: 33293 - protein, 205 aa, Arabidopsis thaliana; identical to SEQ ID NO: 29703
  peptide (1)..(205): Ceres Seq. ID no. 12332757
  misc_feature (47)..(128): Pfam Name: Protease inhibitor/seed storage/LTP family Pfam Description: Protease inhibitor/seed storage/LTP family
  misc_feature (20)..(196): Homolog of NCBI NO: 38344972 NR Description: OSJNBa0072F16.17 [Oryza sativa (japonica
  misc_feature (16)..(174): Homolog of NCBI NO: 28269449 NR Description: putative protease inhibitor
  misc_feature (23)..(193): Homolog of NCBI NO: 25553595 NR Description: OJ1656_E11.26 [Oryza sativa (japonica
  misc_feature (25)..(194): Homolog of NCBI NO: 25553602 NR Description: OJ1656_E11.34 [Oryza sativa (japonica
  misc_feature (17)..(182): Homolog of NCBI NO: 34394084 NR Description: lipid transfer protein-like
  misc_feature (12)..(195): Homolog of NCBI NO: 25553588 NR Description: OJ1656_E11.14 [Oryza sativa (japonica
  misc_feature (16)..(173): Homolog of NCBI NO: 15224863 NR Description: unknown protein; protein id: At2g44300.1
  misc_feature (23)..(178): Homolog of NCBI NO: 15224862 NR Description: unknown protein; protein id: At2g44290.1
  misc_feature (13)..(205): Homolog of NCBI NO: 21553541 NR Description: lipid transfer protein, putative [Arabidopsis
  misc_feature (13)..(205): Homolog of NCBI NO: 15217777 NR Description: lipid transfer protein, putative

SEQ ID NO: 33294 - protein, 193 aa, Arabidopsis thaliana; identical to SEQ ID NO: 29704
  peptide (1)..(193): Ceres Seq. ID no. 12332758
  misc_feature (35)..(116): Pfam Name: Protease inhibitor/seed storage/LTP family Pfam Description: Protease inhibitor/seed storage/LTP family
  misc_feature (8)..(184): Homolog of NCBI NO: 38344972 NR Description: OSJNBa0072F16.17 [Oryza sativa (japonica
  misc_feature (4)..(162): Homolog of NCBI NO: 28269449 NR Description: putative protease inhibitor
  misc_feature (11)..(181): Homolog of NCBI NO: 25553595 NR Description: OJ1656_E11.26 [Oryza sativa (japonica
  misc_feature (13)..(182): Homolog of NCBI NO: 25553602 NR Description: OJ1656_E11.34 [Oryza sativa (japonica
  misc_feature (5)..(170): Homolog of NCBI NO: 34394084 NR Description: lipid transfer protein-like
  misc_feature (1)..(183): Homolog of NCBI NO: 25553588 NR Description: OJ1656_E11.14 [Oryza sativa (japonica
  misc_feature (4)..(161): Homolog of NCBI NO: 15224863 NR Description: unknown protein; protein id: At2g44300.1
  misc_feature (11)..(166): Homolog of NCBI NO: 15224862 NR Description: unknown protein; protein id: At2g44290.1
  misc_feature (1)..(193): Homolog of NCBI NO: 21553541 NR Description: lipid transfer protein, putative [Arabidopsis
  misc_feature (1)..(193): Homolog of NCBI NO: 15217777 NR Description: lipid transfer protein, putative

SEQ ID NO: 33295 - protein, 181 aa, Arabidopsis thaliana; identical to SEQ ID NO: 29705
  peptide (1)..(181): Ceres Seq. ID no. 12332759
  misc_feature (23)..(104): Pfam Name: Protease inhibitor/seed storage/LTP family Pfam Description: Protease inhibitor/seed storage/LTP family
  misc_feature (1)..(172): Homolog of NCBI NO: 38344972 NR Description: OSJNBa0072F16.17 [Oryza sativa (japonica
  misc_feature (1)..(150): Homolog of NCBI NO: 28269449 NR Description: putative protease inhibitor
  misc_feature (1)..(169): Homolog of NCBI NO: 25553595 NR Description: OJ1656_E11.26 [Oryza sativa (japonica
  misc_feature (1)..(170): Homolog of NCBI NO: 25553602 NR Description: OJ1656_E11.34 [Oryza sativa (japonica
  misc_feature (1)..(158): Homolog of NCBI NO: 34394084 NR Description: lipid transfer protein-like
  misc_feature (1)..(171): Homolog of NCBI NO: 25553588 NR Description: OJ1656_E11.14 [Oryza sativa (japonica
  misc_feature (1)..(149): Homolog of NCBI NO: 15224863 NR Description: unknown protein; protein id: At2g44300.1
  misc_feature (1)..(154): Homolog of NCBI NO: 15224862 NR Description: unknown protein; protein id: At2g44290.1
  misc_feature (1)..(181): Homolog of NCBI NO: 21553541 NR Description: lipid transfer protein, putative [Arabidopsis
  misc_feature (1)..(181): Homolog of NCBI NO: 15217777 NR Description: lipid transfer protein, putative

SEQ ID NO: 33296 - DNA, 748 bp, Arabidopsis thaliana; identical to SEQ ID NO: 29706
  misc_feature (1)..(748): Ceres Seq. ID no. 13486683
  misc_feature: MA Experiment ID: 108462 Result: Up-regulated in Transcription
  misc_feature: MA Experiment 108462 PARAMETER Experiment Name: At_Germinating_Seeds_cDNA_P Parameter: Age (day) Value: 2 vs. 0
  misc_feature: MA Experiment 108462 PARAMETER Experiment Name: At_Germinating_Seeds_cDNA_P Parameter: Tissue Value: Germinating Seeds
  misc_feature: MA Experiment ID: 108464 Result: Up-regulated in Transcription
  misc_feature: MA Experiment 108464 PARAMETER Experiment Name: At_Germinating_Seeds_cDNA_P Parameter: Age (day) Value: 4 vs. 0
  misc_feature: MA Experiment 108464 PARAMETER Experiment Name: At_Germinating_Seeds_cDNA_P Parameter: Tissue Value: Germinating Seeds
  misc_feature: MA Experiment ID: 108474 Result: Down-regulated in Transcription
  misc_feature: MA Experiment 108474 PARAMETER Experiment Name: At_Drought_Flowers_cDNA_P Parameter: Timepoint (hr) Value: null
  misc_feature: MA Experiment 108474 PARAMETER Experiment Name: At_Drought_Flowers_cDNA_P Parameter: Treatment Value: Drought vs. No Drought
  misc_feature: MA Experiment ID: 108573 Result: Down-regulated in Transcription
  misc_feature: MA Experiment 108573 PARAMETER Experiment Name: At_Drought_cDNA_P Parameter: Timepoint (hr) Value: 6
  misc_feature: MA Experiment 108573 PARAMETER Experiment Name: At_Drought_cDNA_P Parameter: Tissue Value: Aerial
  misc_feature: MA Experiment 108573 PARAMETER Experiment Name: At_Drought_cDNA_P Parameter: Treatment Value: Drought vs. No Drought
  misc_feature: MA Experiment ID: 108577 Result: Down-regulated in Transcription
  misc_feature: MA Experiment 108577 PARAMETER Experiment Name: At_42deg_Heat_cDNA_P Parameter: Temperature (deg C) Value: 42 vs. 22
  misc_feature: MA Experiment 108577 PARAMETER Experiment Name: At_42deg_Heat_cDNA_P Parameter: Timepoint (hr) Value: 6
  misc_feature: MA Experiment 108577 PARAMETER Experiment Name: At_42deg_Heat_cDNA_P Parameter: Tissue Value: Aerial
  misc_feature: MA Experiment ID: 20000179 Result: Up-regulated in Transcription
  misc_feature: MA Experiment 20000179 PARAMETER Experiment Name: At_Germinating_Seeds_P Parameter: Age (hr) Value: 6 vs. 0
  misc_feature: MA Experiment 20000179 PARAMETER Experiment Name: At_Germinating_Seeds_P Parameter: Tissue Value: Germinating Seeds
  misc_feature: MA Experiment ID: 20000180 Result: Up-regulated in Transcription
  misc_feature: MA Experiment 20000180 PARAMETER Experiment Name: At_Germinating_Seeds_P Parameter: Age (hr) Value: 24 vs. 0
  misc_feature: MA Experiment 20000180 PARAMETER Experiment Name: At_Germinating_Seeds_P Parameter: Tissue Value: Germinating Seeds
  misc_feature: MA Experiment ID: 20000184 Result: Up-regulated in Transcription
  misc_feature: MA Experiment 20000184 PARAMETER Experiment Name: At_Shoots__P Parameter: Age (day) Value: 7
  misc_feature: MA Experiment 20000184 PARAMETER Experiment Name: At_Shoots__P Parameter: Tissue Value: Shoots vs. Whole Plant
  misc_feature: MA Experiment ID: 20000185 Result: Up-regulated in Transcription
  misc_feature: MA Experiment 20000185 PARAMETER Experiment Name: At_Roots__P Parameter: Age (day) Value: 7 vs. 21
  misc_feature: MA Experiment 20000185 PARAMETER Experiment Name: At_Roots__P Parameter: Organism Value: A. thaliana
  misc_feature: MA Experiment 20000185 PARAMETER Experiment Name: At_Roots__P Parameter: Tissue Value: Roots vs. Whole Plant
  misc_feature: MA Experiment ID: 20000227 Result: Up-regulated in Transcription
  misc_feature: MA Experiment 20000227 PARAMETER Experiment Name: At_Root-Tips-vs-Tops_P Parameter: Tissue Value: Root Tips vs. Root Tops
  misc_feature: MA Experiment ID: 20000234 Result: Up-regulated in Transcription
  misc_feature: MA Experiment 20000234 PARAMETER Experiment Name: At_Siliques_P Parameter: Age (day) Value: 21
  misc_feature: MA Experiment 20000234 PARAMETER Experiment Name: At_Siliques_P Parameter: Organism Value: A. thaliana
  misc_feature: MA Experiment 20000234 PARAMETER Experiment Name: At_Siliques_P Parameter: Plant Line Value: WS
  misc_feature: MA Experiment 20000234 PARAMETER Experiment Name: At_Siliques_P Parameter: Tissue Value: Less Than 5mm Siliques vs. Whole Plant
  misc_feature: MA Experiment ID: 20000235 Result: Up-regulated in Transcription
  misc_feature: MA Experiment 20000235 PARAMETER Experiment Name: At_Siliques_P Parameter: Age (day) Value: 21
  misc_feature: MA Experiment 20000235 PARAMETER Experiment Name: At_Siliques_P Parameter: Organism Value: A. thaliana
  misc_feature: MA Experiment 20000235 PARAMETER Experiment Name: At_Siliques_P Parameter: Plant Line Value: WS
  misc_feature: MA Experiment 20000235 PARAMETER Experiment Name: At_Siliques_P Parameter: Tissue Value: 5-10mm Siliques vs. Whole Plant
  misc_feature: MA Experiment ID: 20000438 Result: Up-regulated in Transcription
  misc_feature: MA Experiment 20000438 PARAMETER Experiment Name: At_Shoots__P Parameter: Age (day) Value: 14
  misc_feature: MA Experiment 20000438 PARAMETER Experiment Name: At_Shoots__P Parameter: Tissue Value: Shoots vs. Whole Plant
  misc_feature: MA Experiment ID: 20000439 Result: Up-regulated in Transcription
  misc_feature: MA Experiment 20000439 PARAMETER Experiment Name: At_Roots__P Parameter: Age (day) Value: 14 vs. 21
  misc_feature: MA Experiment 20000439 PARAMETER Experiment Name: At_Roots__P Parameter: Organism Value: A. thaliana
  misc_feature: MA Experiment 20000439 PARAMETER Experiment Name: At_Roots__P Parameter: Tissue Value: Roots vs. Whole Plant
  misc_feature: MA Experiment ID: 20000495 Result: Up-regulated in Transcription
  misc_feature: MA Experiment 20000495 PARAMETER Experiment Name: At_Guard_Cells_P Parameter: Harvest Date Value: 8/2/2002
  misc_feature: MA Experiment 20000495 PARAMETER Experiment Name: At_Guard_Cells_P Parameter: Organism Value: A. thaliana
  misc_feature: MA Experiment 20000495 PARAMETER Experiment Name: At_Guard_Cells_P Parameter: Tissue Value: Guard Cells vs. Leaves
  misc_feature: MA Experiment ID: 20000527 Result: Down-regulated in Transcription
  misc_feature: MA Experiment 20000527 PARAMETER Experiment Name: At_10percent_PEG_P Parameter: Age (day) Value: 20
  misc_feature: MA Experiment 20000527 PARAMETER Experiment Name: At_10percent_PEG_P Parameter: Organism Value: A. thaliana
  misc_feature: MA Experiment 20000527 PARAMETER Experiment Name: At_10percent_PEG_P Parameter: Plant Line Value: WS
  misc_feature: MA Experiment 20000527 PARAMETER Experiment Name: At_10percent_PEG_P Parameter: Timepoint (day) Value: 20
  misc_feature: MA Experiment 20000527 PARAMETER Experiment Name: At_10percent_PEG_P Parameter: Tissue Value: Whole Plant
  misc_feature: MA Experiment 20000527 PARAMETER Experiment Name: At_10percent_PEG_P Parameter: Treatment Value: 10percent PEG vs. No Treatment
  misc_feature: MA Experiment ID: 20000794 Result: Down-regulated in Transcription
  misc_feature: MA Experiment 20000794 PARAMETER Experiment Name: At_Petals_P Parameter: Age (day) Value: 23-25 days
  misc_feature: MA Experiment 20000794 PARAMETER Experiment Name: At_Petals_P Parameter: Plant Line Value: WS
  misc_feature: MA Experiment 20000794 PARAMETER Experiment Name: At_Petals_P Parameter: Tissue Value: Petals vs. Whole plant
  misc_feature: MA Experiment ID: 20001451 Result: Up-regulated in Transcription
  misc_feature: MA Experiment 20001451 PARAMETER Experiment Name: At_Far-red-induction_P Parameter: Age (day) Value: 7
  misc_feature: MA Experiment 20001451 PARAMETER Experiment Name: At_Far-red-induction_P Parameter: Light Value: Far-red vs. White
  misc_feature: MA Experiment 20001451 PARAMETER Experiment Name: At_Far-red-induction_P Parameter: Organism Value: A. thaliana
  misc_feature: MA Experiment 20001451 PARAMETER Experiment Name: At_Far-red-induction_P Parameter: Plant Line Value: Columbia
  misc_feature: MA Experiment 20001451 PARAMETER Experiment Name: At_Far-red-induction_P Parameter: Timepoint (hr) Value: 24
  misc_feature: MA Experiment 20001451 PARAMETER Experiment Name: At_Far-red-induction_P Parameter: Tissue Value: Whole Plant
  misc_feature: MA Experiment ID: 20001555 Result: Down-regulated in Transcription
  misc_feature: MA Experiment 20001555 PARAMETER Experiment Name: At_Drought_Soil_Dry_P Parameter: Age (day) Value: 24
  misc_feature: MA Experiment 20001555 PARAMETER Experiment Name: At_Drought_Soil_Dry_P Parameter: Organism Value: A. thaliana
  misc_feature: MA Experiment 20001555 PARAMETER Experiment Name: At_Drought_Soil_Dry_P Parameter: Plant Line Value: WS
  misc_feature: MA Experiment 20001555 PARAMETER Experiment Name: At_Drought_Soil_Dry_P Parameter: Post Timepoint (hr) Value: None
  misc_feature: MA Experiment 20001555 PARAMETER Experiment Name: At_Drought_Soil_Dry_P Parameter: Post-Treatment Value: None
  misc_feature: MA Experiment 20001555 PARAMETER Experiment Name: At_Drought_Soil_Dry_P Parameter: Timepoint (day) Value: 10
  misc_feature: MA Experiment 20001555 PARAMETER Experiment Name: At_Drought_Soil_Dry_P Parameter: Treatment Value: Drought vs. No Drought
  misc_feature: MA Experiment ID: 20001560 Result: Up-regulated in Transcription
  misc_feature: MA Experiment 20001560 PARAMETER Experiment Name: At_Drought_Soil_Dry_P Parameter: Age (day) Value: 28
  misc_feature: MA Experiment 20001560 PARAMETER Experiment Name: At_Drought_Soil_Dry_P Parameter: Organism Value: A. thaliana
  misc_feature: MA Experiment 20001560 PARAMETER Experiment Name: At_Drought_Soil_Dry_P Parameter: Plant Line Value: WS
  misc_feature: MA Experiment 20001560 PARAMETER Experiment Name: At_Drought_Soil_Dry_P Parameter: Post Timepoint (hr) Value: None
  misc_feature: MA Experiment 20001560 PARAMETER Experiment Name: At_Drought_Soil_Dry_P Parameter: Post-Treatment Value: None
  misc_feature: MA Experiment 20001560 PARAMETER Experiment Name: At_Drought_Soil_Dry_P Parameter: Timepoint (day) Value: 14
  misc_feature: MA Experiment 20001560 PARAMETER Experiment Name: At_Drought_Soil_Dry_P Parameter: Treatment Value: Drought vs. No Drought
  misc_feature: MA Experiment ID: 20001911 Result: Down-regulated in Transcription
  misc_feature: MA Experiment 20001911 PARAMETER Experiment Name: At_Drought_Reproduction_P Parameter: Age (day) Value: 40
  misc_feature: MA Experiment 20001911 PARAMETER Experiment Name: At_Drought_Reproduction_P Parameter: Organism Value: A. thaliana
  misc_feature: MA Experiment 20001911 PARAMETER Experiment Name: At_Drought_Reproduction_P Parameter: Plant Line Value: WS
  misc_feature: MA Experiment 20001911 PARAMETER Experiment Name: At_Drought_Reproduction_P Parameter: Timepoint (day) Value: 10
  misc_feature: MA Experiment 20001911 PARAMETER Experiment Name: At_Drought_Reproduction_P Parameter: Tissue Value: Flowers
  misc_feature: MA Experiment 20001911 PARAMETER Experiment Name: At_Drought_Reproduction_P Parameter: Treatment Value: Drought vs. No Drought

SEQ ID NO: 33297 - protein, 183 aa, Arabidopsis thaliana; identical to SEQ ID NO: 29707
  peptide (1)..(183): Ceres Seq. ID no. 13486684
  misc_feature (31)..(155): Pfam Name: PLAT/LH2 domain Pfam Description: PLAT/LH2 domain
  misc_feature (31)..(160): Homolog of NCBI NO: 21740887 NR Description: OSJNBa0036B21.1 [Oryza sativa (japonica
  misc_feature (10)..(160): Homolog of NCBI NO: 10241929 NR Description: elicitor inducible protein [Nicotiana tabacum]
  misc_feature (26)..(163): Homolog of NCBI NO: 32492139 NR Description: OSJNBa0036B21.2 [Oryza sativa (japonica
  misc_feature (12)..(160): Homolog of NCBI NO: 7542598 NR Description: TMV-induced protein I [Capsicum annuum]
  misc_feature (21)..(160): Homolog of NCBI NO: 32492140 NR Description: OSJNBa0036B21.4 [Oryza sativa (japonica
  misc_feature (2)..(128): Homolog of NCBI NO: 15982879 NR Description: AT4g39730/T19P19_120 [Arabidopsis thaliana]
  misc_feature (2)..(183): Homolog of NCBI NO: 15236014 NR Description: expressed protein [Arabidopsis thaliana]
  misc_feature (10)..(183): Homolog of NCBI NO: 12667247 NR Description: dehydration stress-induced protein [Brassica
  misc_feature (2)..(183): Homolog of NCBI NO: 21553555 NR Description: dehydration stress-induced protein [Arabidopsis
  misc_feature (1)..(183): Homolog of NCBI NO: 18399899 NR Description: expressed protein [Arabidopsis thaliana]

SEQ ID NO: 33298 - protein, 182 aa, Arabidopsis thaliana; identical to SEQ ID NO: 29708
  peptide (1)..(182): Ceres Seq. ID no. 13486685
  misc_feature (30)..(154): Pfam Name: PLAT/LH2 domain Pfam Description: PLAT/LH2 domain
  misc_feature (30)..(159): Homolog of NCBI NO: 21740887 NR Description: OSJNBa0036B21.1 [Oryza sativa (japonica
  misc_feature (9)..(159): Homolog of NCBI NO: 10241929 NR Description: elicitor inducible protein [Nicotiana tabacum]
  misc_feature (25)..(162): Homolog of NCBI NO: 32492139 NR Description: OSJNBa0036B21.2 [Oryza sativa (japonica
  misc_feature (11)..(159): Homolog of NCBI NO: 7542598 NR Description: TMV-induced protein I [Capsicum annuum]
  misc_feature (20)..(159): Homolog of NCBI NO: 32492140 NR Description: OSJNBa0036B21.4 [Oryza sativa (japonica
  misc_feature (1)..(127): Homolog of NCBI NO: 15982879 NR Description: AT4g39730/T19P19_120 [Arabidopsis thaliana]
  misc_feature (1)..(182): Homolog of NCBI NO: 15236014 NR Description: expressed protein [Arabidopsis thaliana]
  misc_feature (9)..(182): Homolog of NCBI NO: 12667247 NR Description: dehydration stress-induced protein [Brassica
  misc_feature (1)..(182): Homolog of NCBI NO: 21553555 NR Description: dehydration stress-induced protein [Arabidopsis
  misc_feature (1)..(182): Homolog of NCBI NO: 18399899 NR Description: expressed protein [Arabidopsis thaliana]

SEQ ID NO: 33299 - protein, 109 aa, Arabidopsis thaliana; identical to SEQ ID NO: 29709
  peptide (1)..(109): Ceres Seq. ID no. 13486686
  misc_feature (1)..(81): Pfam Name: PLAT/LH2 domain Pfam Description: PLAT/LH2 domain
  misc_feature (1)..(86): Homolog of NCBI NO: 21740887 NR Description: OSJNBa0036B21.1 [Oryza sativa (japonica
  misc_feature (1)..(86): Homolog of NCBI NO: 10241929 NR Description: elicitor inducible protein [Nicotiana tabacum]
  misc_feature (1)..(89): Homolog of NCBI NO: 32492139 NR Description: OSJNBa0036B21.2 [Oryza sativa (japonica
  misc_feature (1)..(86): Homolog of NCBI NO: 7542598 NR Description: TMV-induced protein I [Capsicum annuum]
  misc_feature (1)..(86): Homolog of NCBI NO: 32492140 NR Description: OSJNBa0036B21.4 [Oryza sativa (japonica
  misc_feature (1)..(54): Homolog of NCBI NO: 15982879 NR Description: AT4g39730/T19P19_120 [Arabidopsis thaliana]
  misc_feature (1)..(109): Homolog of NCBI NO: 15236014 NR Description: expressed protein [Arabidopsis thaliana]
  misc_feature (1)..(109): Homolog of NCBI NO: 12667247 NR Description: dehydration stress-induced protein [Brassica
  misc_feature (1)..(109): Homolog of NCBI NO: 21553555 NR Description: dehydration stress-induced protein [Arabidopsis
  misc_feature (1)..(109): Homolog of NCBI NO: 18399899 NR Description: expressed protein [Arabidopsis thaliana]

SEQ ID NO: 33300 - DNA, 1417 bp, Arabidopsis thaliana; identical to SEQ ID NO: 29710
  misc_feature (1)..(1417): Ceres Seq. ID no. 12336041
  misc_feature: MA Experiment ID: 108462 Result: Down-regulated in Transcription
  misc_feature: MA Experiment 108462 PARAMETER Experiment Name: At_Germinating_Seeds_cDNA_P Parameter: Age (day) Value: 2 vs. 0
  misc_feature: MA Experiment 108462 PARAMETER Experiment Name: At_Germinating_Seeds_cDNA_P Parameter: Tissue Value: Germinating Seeds
  misc_feature: MA Experiment ID: 108463 Result: Down-regulated in Transcription
  misc_feature: MA Experiment 108463 PARAMETER Experiment Name: At_Germinating_Seeds_cDNA_P Parameter: Age (day) Value: 3 vs. 0
  misc_feature: MA Experiment 108463 PARAMETER Experiment Name: At_Germinating_Seeds_cDNA_P Parameter: Tissue Value: Germinating Seeds
  misc_feature: MA Experiment ID: 108569 Result: Up-regulated in Transcription
  misc_feature: MA Experiment 108569 PARAMETER Experiment Name: At_0.001%_MeJA__cDNA_P Parameter: Timepoint (hr) Value: 6
  misc_feature: MA Experiment 108569 PARAMETER Experiment Name: At_0.001%_MeJA__cDNA_P Parameter: Tissue Value: Aerial
  misc_feature: MA Experiment 108569 PARAMETER Experiment Name: At_0.001%_MeJA__cDNA_P Parameter: Treatment Value: 0.001% MeJA vs. No Treatment
  misc_feature: MA Experiment ID: 20000087 Result: Down-regulated in Transcription
  misc_feature: MA Experiment 20000087 PARAMETER Experiment Name: At_100uM_ABA_Mutants_cDNA_P Parameter: Plant Line Value: WS
  misc_feature: MA Experiment 20000087 PARAMETER Experiment Name: At_100uM_ABA_Mutants_cDNA_P Parameter: Timepoint (hr) Value: 6
  misc_feature: MA Experiment 20000087 PARAMETER Experiment Name: At_100uM_ABA_Mutants_cDNA_P Parameter: Tissue Value: Aerial
  misc_feature: MA Experiment 20000087 PARAMETER Experiment Name: At_100uM_ABA_Mutants_cDNA_P Parameter: Treatment Value: 100uM ABA vs. No Treatment
  misc_feature: MA Experiment ID: 20000184 Result: Up-regulated in Transcription
  misc_feature: MA Experiment 20000184 PARAMETER Experiment Name: At_Shoots__P Parameter: Age (day) Value: 7
  misc_feature: MA Experiment 20000184 PARAMETER Experiment Name: At_Shoots__P Parameter: Tissue Value: Shoots vs. Whole Plant
  misc_feature: MA Experiment ID: 20000185 Result: Up-regulated in Transcription
  misc_feature: MA Experiment 20000185 PARAMETER Experiment Name: At_Roots__P Parameter: Age (day) Value: 7 vs. 21
  misc_feature: MA Experiment 20000185 PARAMETER Experiment Name: At_Roots__P Parameter: Organism Value: A. thaliana
  misc_feature: MA Experiment 20000185 PARAMETER Experiment Name: At_Roots__P Parameter: Tissue Value: Roots vs. Whole Plant
  misc_feature: MA Experiment ID: 20000286 Result: Up-regulated in Transcription
  misc_feature: MA Experiment 20000286 PARAMETER Experiment Name: At_Open_Flower_P Parameter: Age (day) Value: 21
  misc_feature: MA Experiment 20000286 PARAMETER Experiment Name: At_Open_Flower_P Parameter: Plant Line Value: WS
  misc_feature: MA Experiment 20000286 PARAMETER Experiment Name: At_Open_Flower_P Parameter: Tissue Value: Half Open vs. Whole Plant
  misc_feature: MA Experiment ID: 20000439 Result: Up-regulated in Transcription
  misc_feature: MA Experiment 20000439 PARAMETER Experiment Name: At_Roots__P Parameter: Age (day) Value: 14 vs. 21
  misc_feature: MA Experiment 20000439 PARAMETER Experiment Name: At_Roots__P Parameter: Organism Value: A. thaliana
  misc_feature: MA Experiment 20000439 PARAMETER Experiment Name: At_Roots__P Parameter: Tissue Value: Roots vs. Whole Plant
  misc_feature: MA Experiment ID: 20001557 Result: Up-regulated in Transcription
  misc_feature: MA Experiment 20001557 PARAMETER Experiment Name: At_Drought_Soil_Dry_P Parameter: Age (day) Value: 27
  misc_feature: MA Experiment 20001557 PARAMETER Experiment Name: At_Drought_Soil_Dry_P Parameter: Organism Value: A. thaliana
  misc_feature: MA Experiment 20001557 PARAMETER Experiment Name: At_Drought_Soil_Dry_P Parameter: Plant Line Value: WS
  misc_feature: MA Experiment 20001557 PARAMETER Experiment Name: At_Drought_Soil_Dry_P Parameter: Post Timepoint (hr) Value: 3
  misc_feature: MA Experiment 20001557 PARAMETER Experiment Name: At_Drought_Soil_Dry_P Parameter: Post-Treatment Value: Re-Water vs. No Drought
  misc_feature: MA Experiment 20001557 PARAMETER Experiment Name: At_Drought_Soil_Dry_P Parameter: Timepoint (day) Value: 13
  misc_feature: MA Experiment 20001557 PARAMETER Experiment Name: At_Drought_Soil_Dry_P Parameter: Treatment Value: Drought vs. No Drought
  misc_feature: MA Experiment ID: 20001558 Result: Up-regulated in Transcription
  misc_feature: MA Experiment 20001558 PARAMETER Experiment Name: At_Drought_Soil_Dry_P Parameter: Age (day) Value: 27
  misc_feature: MA Experiment 20001558 PARAMETER Experiment Name: At_Drought_Soil_Dry_P Parameter: Organism Value: A. thaliana
  misc_feature: MA Experiment 20001558 PARAMETER Experiment Name: At_Drought_Soil_Dry_P Parameter: Plant Line Value: WS
  misc_feature: MA Experiment 20001558 PARAMETER Experiment Name: At_Drought_Soil_Dry_P Parameter: Post Timepoint (hr) Value: 6
  misc_feature: MA Experiment 20001558 PARAMETER Experiment Name: At_Drought_Soil_Dry_P Parameter: Post-Treatment Value: Re-Water vs. No Drought
  misc_feature: MA Experiment 20001558 PARAMETER Experiment Name: At_Drought_Soil_Dry_P Parameter: Timepoint (day) Value: 13
  misc_feature: MA Experiment 20001558 PARAMETER Experiment Name: At_Drought_Soil_Dry_P Parameter: Treatment Value: Drought vs. No Drought

SEQ ID NO: 33301 - protein, 381 aa, Arabidopsis thaliana; identical to SEQ ID NO: 29711
  peptide (1)..(381): Ceres Seq. ID no. 12336042
  misc_feature (157)..(343): Homolog of NCBI NO: 33862611 NR Description: marine cyanobacterial conserved hypothetical
  misc_feature (121)..(381): Homolog of NCBI NO: 21397272 NR Description: Hypothetical protein [Oryza sativa (japonica
  misc_feature (110)..(381): Homolog of NCBI NO: 34897966 NR Description: hypothetical protein~similar to Arabidopsis
  misc_feature (17)..(381): Homolog of NCBI NO: 21592431 NR Description: unknown [Arabidopsis thaliana]
  misc_feature (17)..(381): Homolog of NCBI NO: 15724154 NR Description: At2g16800/T24I21.21 [Arabidopsis thaliana]
  misc_feature (17)..(381): Homolog of NCBI NO: 18398217 NR Description: expressed protein
  misc_feature (118)..(381): Homolog of NCBI NO: 7486794 NR Description: hypothetical protein M4E13.135 - Arabidopsis
  misc_feature (17)..(381): Homolog of NCBI NO: 18418571 NR Description: putative protein

SEQ ID NO: 33302 - protein, 365 aa, Arabidopsis thaliana; identical to SEQ ID NO: 29712
  peptide (1)..(365): Ceres Seq. ID no. 12336043
  misc_feature (141)..(327): Homolog of NCBI NO: 33862611 NR Description: marine cyanobacterial conserved hypothetical
  misc_feature (105)..(365): Homolog of NCBI NO: 21397272 NR Description: Hypothetical protein [Oryza sativa (japonica
  misc_feature (94)..(365): Homolog of NCBI NO: 34897966 NR Description: hypothetical protein~similar to Arabidopsis
  misc_feature (1)..(365): Homolog of NCBI NO: 21592431 NR Description: unknown [Arabidopsis thaliana]
  misc_feature (1)..(365): Homolog of NCBI NO: 15724154 NR Description: At2g16800/T24I21.21 [Arabidopsis thaliana]
  misc_feature (1)..(365): Homolog of NCBI NO: 18398217 NR Description: expressed protein
  misc_feature (102)..(365): Homolog of NCBI NO: 7486794 NR Description: hypothetical protein M4E13.135 - Arabidopsis
  misc_feature (1)..(365): Homolog of NCBI NO: 18418571 NR Description: putative protein

SEQ ID NO: 33303 - protein, 191 aa, Arabidopsis thaliana; identical to SEQ ID NO: 29713
  peptide (1)..(191): Ceres Seq. ID no. 12336044
  misc_feature (1)..(153): Homolog of NCBI NO: 33862611 NR Description: marine cyanobacterial conserved hypothetical
  misc_feature (1)..(191): Homolog of NCBI NO: 21397272 NR Description: Hypothetical protein [Oryza sativa (japonica
  misc_feature (1)..(191): Homolog of NCBI NO: 34897966 NR Description: hypothetical protein~similar to Arabidopsis
  misc_feature (1)..(191): Homolog of NCBI NO: 21592431 NR Description: unknown [Arabidopsis thaliana]
  misc_feature (1)..(191): Homolog of NCBI NO: 15724154 NR Description: At2g16800/T24I21.21 [Arabidopsis thaliana]
  misc_feature (1)..(191): Homolog of NCBI NO: 18398217 NR Description: expressed protein
  misc_feature (1)..(191): Homolog of NCBI NO: 7486794 NR Description: hypothetical protein M4E13.135 - Arabidopsis
  misc_feature (1)..(191): Homolog of NCBI NO: 18418571 NR Description: putative protein

SEQ ID NO: 33304 - DNA, 832 bp, Arabidopsis thaliana; identical to SEQ ID NO: 29714
  misc_feature (1)..(832): Ceres Seq. ID no. 13491488
  misc_feature: MA Experiment ID: 108561 Result: Up-regulated in Transcription
  misc_feature: MA Experiment 108561 PARAMETER Experiment Name: At_100uM_ABA_cDNA_P Parameter: Timepoint (hr) Value: 6
  misc_feature: MA Experiment 108561 PARAMETER Experiment Name: At_100uM_ABA_cDNA_P Parameter: Tissue Value: Aerial
  misc_feature: MA Experiment 108561 PARAMETER Experiment Name: At_100uM_ABA_cDNA_P Parameter: Treatment Value: 100uM ABA vs. No Treatment
  misc_feature: MA Experiment ID: 108569 Result: Up-regulated in Transcription
  misc_feature: MA Experiment 108569 PARAMETER Experiment Name: At_0.001%_MeJA__cDNA_P Parameter: Timepoint (hr) Value: 6
  misc_feature: MA Experiment 108569 PARAMETER Experiment Name: At_0.001%_MeJA__cDNA_P Parameter: Tissue Value: Aerial
  misc_feature: MA Experiment 108569 PARAMETER Experiment Name: At_0.001%_MeJA__cDNA_P Parameter: Treatment Value: 0.001% MeJA vs. No Treatment
  misc_feature: MA Experiment ID: 108577 Result: Down-regulated in Transcription
  misc_feature: MA Experiment 108577 PARAMETER Experiment Name: At_42deg_Heat_cDNA_P Parameter: Temperature (deg C) Value: 42 vs. 22
  misc_feature: MA Experiment 108577 PARAMETER Experiment Name: At_42deg_Heat_cDNA_P Parameter: Timepoint (hr) Value: 6
  misc_feature: MA Experiment 108577 PARAMETER Experiment Name: At_42deg_Heat_cDNA_P Parameter: Tissue Value: Aerial
  misc_feature: MA Experiment ID: 108594 Result: Down-regulated in Transcription
  misc_feature: MA Experiment 108594 PARAMETER Experiment Name: At_Ler-rhl_Root_cDNA_P Parameter: Plant Line Value: null
  misc_feature: MA Experiment ID: 108595 Result: Up-regulated in Transcription
  misc_feature: MA Experiment 108595 PARAMETER Experiment Name: At_Ler-pi_Ovule_cDNA_P Parameter: Plant Line Value: null
  misc_feature: MA Experiment ID: 20000169 Result: Up-regulated in Transcription
  misc_feature: MA Experiment 20000169 PARAMETER Experiment Name: At_100uM_ABA_P Parameter: Age (day) Value: 14
  misc_feature: MA Experiment 20000169 PARAMETER Experiment Name: At_100uM_ABA_P Parameter: Organism Value: A. thaliana
  misc_feature: MA Experiment 20000169 PARAMETER Experiment Name: At_100uM_ABA_P Parameter: Plant Line Value: WS
  misc_feature: MA Experiment 20000169 PARAMETER Experiment Name: At_100uM_ABA_P Parameter: Timepoint (hr) Value: 6
  misc_feature: MA Experiment 20000169 PARAMETER Experiment Name: At_100uM_ABA_P Parameter: Tissue Value: Aerial
  misc_feature: MA Experiment 20000169 PARAMETER Experiment Name: At_100uM_ABA_P Parameter: Treatment Value: 100uM ABA vs. No Treatment
  misc_feature: MA Experiment ID: 20000180 Result: Up-regulated in Transcription
  misc_feature: MA Experiment 20000180 PARAMETER Experiment Name: At_Germinating_Seeds_P Parameter: Age (hr) Value: 24 vs. 0
  misc_feature: MA Experiment 20000180 PARAMETER Experiment Name: At_Germinating_Seeds_P Parameter: Tissue Value: Germinating Seeds
  misc_feature: MA Experiment ID: 20000211 Result: Up-regulated in Transcription
  misc_feature: MA Experiment 20000211 PARAMETER Experiment Name: At_0.001percent_MeJA__P Parameter: Age (day) Value: 14
  misc_feature: MA Experiment 20000211 PARAMETER Experiment Name: At_0.001percent_MeJA__P Parameter: Organism Value: A. thaliana
  misc_feature: MA Experiment 20000211 PARAMETER Experiment Name: At_0.001percent_MeJA__P Parameter: Plant Line Value: WS
  misc_feature: MA Experiment 20000211 PARAMETER Experiment Name: At_0.001percent_MeJA__P Parameter: Timepoint (hr) Value: 1
  misc_feature: MA Experiment 20000211 PARAMETER Experiment Name: At_0.001percent_MeJA__P Parameter: Tissue Value: Aerial
  misc_feature: MA Experiment 20000211 PARAMETER Experiment Name: At_0.001percent_MeJA__P Parameter: Treatment Value: 0.001percent MeJA vs. No Treatment
  misc_feature: MA Experiment ID: 20000227 Result: Down-regulated in Transcription
  misc_feature: MA Experiment 20000227 PARAMETER Experiment Name: At_Root-Tips-vs-Tops_P Parameter: Tissue Value: Root Tips vs. Root Tops
  misc_feature: MA Experiment ID: 20000265 Result: Up-regulated in Transcription
  misc_feature: MA Experiment 20000265 PARAMETER Experiment Name: At_Open_Flower_P Parameter: Age (day) Value: 21
  misc_feature: MA Experiment 20000265 PARAMETER Experiment Name: At_Open_Flower_P Parameter: Plant Line Value: WS
  misc_feature: MA Experiment 20000265 PARAMETER Experiment Name: At_Open_Flower_P Parameter: Tissue Value: Closed Flower vs. Whole Plant
  misc_feature: MA Experiment ID: 20000436 Result: Up-regulated in Transcription
  misc_feature: MA Experiment 20000436 PARAMETER Experiment Name: At_Drought_P Parameter: Age (day) Value: 7
  misc_feature: MA Experiment 20000436 PARAMETER Experiment Name: At_Drought_P Parameter: Organism Value: A. thaliana
  misc_feature: MA Experiment 20000436 PARAMETER Experiment Name: At_Drought_P Parameter: Plant Line Value: WS
  misc_feature: MA Experiment 20000436 PARAMETER Experiment Name: At_Drought_P Parameter: Timepoint (hr) Value: 12
  misc_feature: MA Experiment 20000436 PARAMETER Experiment Name: At_Drought_P Parameter: Tissue Value: Whole Plant
  misc_feature: MA Experiment 20000436 PARAMETER Experiment Name: At_Drought_P Parameter: Treatment Value: Drought vs. No Drought
  misc_feature: MA Experiment ID: 20000451 Result: Down-regulated in Transcription
  misc_feature: MA Experiment 20000451 PARAMETER Experiment Name: At_CS6879_Shoots-Roots_P Parameter: Age (day) Value: 14
  misc_feature: MA Experiment 20000451 PARAMETER Experiment Name: At_CS6879_Shoots-Roots_P Parameter: Organism Value: A. thaliana
  misc_feature: MA Experiment 20000451 PARAMETER Experiment Name: At_CS6879_Shoots-Roots_P Parameter: Plant Line Value: CS6879 vs. WS
  misc_feature: MA Experiment 20000451 PARAMETER Experiment Name: At_CS6879_Shoots-Roots_P Parameter: Tissue Value: Roots
  misc_feature: MA Experiment ID: 20000453 Result: Up-regulated in Transcription
  misc_feature: MA Experiment 20000453 PARAMETER Experiment Name: At_100uM_ABA_P Parameter: Age (day) Value: 15
  misc_feature: MA Experiment 20000453 PARAMETER Experiment Name: At_100uM_ABA_P Parameter: Organism Value: A. thaliana
  misc_feature: MA Experiment 20000453 PARAMETER Experiment Name: At_100uM_ABA_P Parameter: Plant Line Value: WS
  misc_feature: MA Experiment 20000453 PARAMETER Experiment Name: At_100uM_ABA_P Parameter: Timepoint (hr) Value: 24
  misc_feature: MA Experiment 20000453 PARAMETER Experiment Name: At_100uM_ABA_P Parameter: Tissue Value: Aerial
  misc_feature: MA Experiment 20000453 PARAMETER Experiment Name: At_100uM_ABA_P Parameter: Treatment Value: 100uM ABA vs. No Treatment
  misc_feature: MA Experiment ID: 20001451 Result: Down-regulated in Transcription
  misc_feature: MA Experiment 20001451 PARAMETER Experiment Name: At_Far-red-induction_P Parameter: Age (day) Value: 7
  misc_feature: MA Experiment 20001451 PARAMETER Experiment Name: At_Far-red-induction_P Parameter: Light Value: Far-red vs. White
  misc_feature: MA Experiment 20001451 PARAMETER Experiment Name: At_Far-red-induction_P Parameter: Organism Value: A. thaliana
  misc_feature: MA Experiment 20001451 PARAMETER Experiment Name: At_Far-red-induction_P Parameter: Plant Line Value: Columbia
  misc_feature: MA Experiment 20001451 PARAMETER Experiment Name: At_Far-red-induction_P Parameter: Timepoint (hr) Value: 24
  misc_feature: MA Experiment 20001451 PARAMETER Experiment Name: At_Far-red-induction_P Parameter: Tissue Value: Whole Plant
  misc_feature: MA Experiment ID: 20001554 Result: Up-regulated in Transcription
  misc_feature: MA Experiment 20001554 PARAMETER Experiment Name: At_Drought_Soil_Dry_P Parameter: Age (day) Value: 21
  misc_feature: MA Experiment 20001554 PARAMETER Experiment Name: At_Drought_Soil_Dry_P Parameter: Organism Value: A. thaliana
  misc_feature: MA Experiment 20001554 PARAMETER Experiment Name: At_Drought_Soil_Dry_P Parameter: Plant Line Value: WS
  misc_feature: MA Experiment 20001554 PARAMETER Experiment Name: At_Drought_Soil_Dry_P Parameter: Post Timepoint (hr) Value: None
  misc_feature: MA Experiment 20001554 PARAMETER Experiment Name: At_Drought_Soil_Dry_P Parameter: Post-Treatment Value: None
  misc_feature: MA Experiment 20001554 PARAMETER Experiment Name: At_Drought_Soil_Dry_P Parameter: Timepoint (day) Value: 7
  misc_feature: MA Experiment 20001554 PARAMETER Experiment Name: At_Drought_Soil_Dry_P Parameter: Treatment Value: Drought vs. No Drought
  misc_feature: MA Experiment ID: 20001555 Result: Up-regulated in Transcription
  misc_feature: MA Experiment 20001555 PARAMETER Experiment Name: At_Drought_Soil_Dry_P Parameter: Age (day) Value: 24
  misc_feature: MA Experiment 20001555 PARAMETER Experiment Name: At_Drought_Soil_Dry_P Parameter: Organism Value: A. thaliana
  misc_feature: MA Experiment 20001555 PARAMETER Experiment Name: At_Drought_Soil_Dry_P Parameter: Plant Line Value: WS
  misc_feature: MA Experiment 20001555 PARAMETER Experiment Name: At_Drought_Soil_Dry_P Parameter: Post Timepoint (hr) Value: None
  misc_feature: MA Experiment 20001555 PARAMETER Experiment Name: At_Drought_Soil_Dry_P Parameter: Post-Treatment Value: None
  misc_feature: MA Experiment 20001555 PARAMETER Experiment Name: At_Drought_Soil_Dry_P Parameter: Timepoint (day) Value: 10
  misc_feature: MA Experiment 20001555 PARAMETER Experiment Name: At_Drought_Soil_Dry_P Parameter: Treatment Value: Drought vs. No Drought
  misc_feature: MA Experiment ID: 20001558 Result: Down-regulated in Transcription
  misc_feature: MA Experiment 20001558 PARAMETER Experiment Name: At_Drought_Soil_Dry_P Parameter: Age (day) Value: 27
  misc_feature: MA Experiment 20001558 PARAMETER Experiment Name: At_Drought_Soil_Dry_P Parameter: Organism Value: A. thaliana
  misc_feature: MA Experiment 20001558 PARAMETER Experiment Name: At_Drought_Soil_Dry_P Parameter: Plant Line Value: WS
  misc_feature: MA Experiment 20001558 PARAMETER Experiment Name: At_Drought_Soil_Dry_P Parameter: Post Timepoint (hr) Value: 6
  misc_feature: MA Experiment 20001558 PARAMETER Experiment Name: At_Drought_Soil_Dry_P Parameter: Post-Treatment Value: Re-Water vs. No Drought
  misc_feature: MA Experiment 20001558 PARAMETER Experiment Name: At_Drought_Soil_Dry_P Parameter: Timepoint (day) Value: 13
  misc_feature: MA Experiment 20001558 PARAMETER Experiment Name: At_Drought_Soil_Dry_P Parameter: Treatment Value: Drought vs. No Drought
  misc_feature: MA Experiment ID: 20001559 Result: Up-regulated in Transcription
  misc_feature: MA Experiment 20001559 PARAMETER Experiment Name: At_Drought_Soil_Dry_P Parameter: Age (day) Value: 28
  misc_feature: MA Experiment 20001559 PARAMETER Experiment Name: At_Drought_Soil_Dry_P Parameter: Organism Value: A. thaliana
  misc_feature: MA Experiment 20001559 PARAMETER Experiment Name: At_Drought_Soil_Dry_P Parameter: Plant Line Value: WS
  misc_feature: MA Experiment 20001559 PARAMETER Experiment Name: At_Drought_Soil_Dry_P Parameter: Post Timepoint (hr) Value: 29
  misc_feature: MA Experiment 20001559 PARAMETER Experiment Name: At_Drought_Soil_Dry_P Parameter: Post-Treatment Value: Re-Water vs. No Drought
  misc_feature: MA Experiment 20001559 PARAMETER Experiment Name: At_Drought_Soil_Dry_P Parameter: Timepoint (day) Value: 14
  misc_feature: MA Experiment 20001559 PARAMETER Experiment Name: At_Drought_Soil_Dry_P Parameter: Treatment Value: Drought vs. No Drought

SEQ ID NO: 33305 - protein, 227 aa, Arabidopsis thaliana; identical to SEQ ID NO: 29715
  peptide (1)..(227): Ceres Seq. ID no. 13491489
  misc_feature (133)..(205): Pfam Name: Glutathione S-transferase, C-terminal domain Pfam Description: Glutathione S-transferase, C-terminal domain
  misc_feature (142)..(227): Homolog of NCBI NO: 15223575 NR Description: dehydroascorbate reductase, putative [Arabidopsis
  misc_feature (15)..(226): Homolog of NCBI NO: 6939839 NR Description: GSH-dependent dehydroascorbate reductase 1
  misc_feature (18)..(227): Homolog of NCBI NO: 28192421 NR Description: dehydroascorbate reductase [Triticum aestivum]
  misc_feature (15)..(226): Homolog of NCBI NO: 28192425 NR Description: dehydroascorbate reductase [Oryza sativa]
  misc_feature (15)..(226): Homolog of NCBI NO: 15239354 NR Description: dehydroascorbate reductase, putative [Arabidopsis
  misc_feature (15)..(227): Homolog of NCBI NO: 28192427 NR Description: dehydroascorbate reductase [Nicotiana tabacum]
  misc_feature (15)..(226): Homolog of NCBI NO: 15222163 NR Description: dehydroascorbate reductase, putative [Arabidopsis
  misc_feature (15)..(226): Homolog of NCBI NO: 21593056 NR Description: GSH-dependent dehydroascorbate reductase 1,
  misc_feature (15)..(215): Homolog of NCBI NO: 25402899 NR Description: protein F18O14.33 [imported] - Arabidopsis
  misc_feature (15)..(227): Homolog of NCBI NO: 15223576 NR Description: dehydroascorbate reductase, putative [Arabidopsis

SEQ ID NO: 33306 - protein, 213 aa, Arabidopsis thaliana; identical to SEQ ID NO: 29716
  peptide (1)..(213): Ceres Seq. ID no. 13491490
  misc_feature (119)..(191): Pfam Name: Glutathione S-transferase, C-terminal domain Pfam Description: Glutathione S-transferase, C-terminal domain
  misc_feature (128)..(213): Homolog of NCBI NO: 15223575 NR Description: dehydroascorbate reductase, putative [Arabidopsis
  misc_feature (1)..(212): Homolog of NCBI NO: 6939839 NR Description: GSH-dependent dehydroascorbate reductase 1
  misc_feature (4)..(213): Homolog of NCBI NO: 28192421 NR Description: dehydroascorbate reductase [Triticum aestivum]
  misc_feature (1)..(212): Homolog of NCBI NO: 28192425 NR Description: dehydroascorbate reductase [Oryza sativa]
  misc_feature (1)..(212): Homolog of NCBI NO: 15239354 NR Description: dehydroascorbate reductase, putative [Arabidopsis
  misc_feature (1)..(213): Homolog of NCBI NO: 28192427 NR Description: dehydroascorbate reductase [Nicotiana tabacum]
  misc_feature (1)..(212): Homolog of NCBI NO: 15222163 NR Description: dehydroascorbate reductase, putative [Arabidopsis
  misc_feature (1)..(212): Homolog of NCBI NO: 21593056 NR Description: GSH-dependent dehydroascorbate reductase 1,
  misc_feature (1)..(201): Homolog of NCBI NO: 25402899 NR Description: protein F18O14.33 [imported] - Arabidopsis
  misc_feature (1)..(213): Homolog of NCBI NO: 15223576 NR Description: dehydroascorbate reductase, putative [Arabidopsis

SEQ ID NO: 33307 - DNA, 720 bp, Arabidopsis thaliana; identical to SEQ ID NO: 29717
  misc_feature (1)..(720): Ceres Seq. ID no. 12329948
  misc_feature: MA Experiment ID: 108461 Result: Down-regulated in Transcription
  misc_feature: MA Experiment 108461 PARAMETER Experiment Name: At_Germinating_Seeds_cDNA_P Parameter: Age (day) Value: 1 vs. 0
  misc_feature: MA Experiment 108461 PARAMETER Experiment Name: At_Germinating_Seeds_cDNA_P Parameter: Tissue Value: Germinating Seeds
  misc_feature: MA Experiment ID: 108462 Result: Down-regulated in Transcription
  misc_feature: MA Experiment 108462 PARAMETER Experiment Name: At_Germinating_Seeds_cDNA_P Parameter: Age (day) Value: 2 vs. 0
  misc_feature: MA Experiment 108462 PARAMETER Experiment Name: At_Germinating_Seeds_cDNA_P Parameter: Tissue Value: Germinating Seeds
  misc_feature: MA Experiment ID: 108463 Result: Down-regulated in Transcription
  misc_feature: MA Experiment 108463 PARAMETER Experiment Name: At_Germinating_Seeds_cDNA_P Parameter: Age (day) Value: 3 vs. 0
  misc_feature: MA Experiment 108463 PARAMETER Experiment Name: At_Germinating_Seeds_cDNA_P Parameter: Tissue Value: Germinating Seeds
  misc_feature: MA Experiment ID: 108464 Result: Down-regulated in Transcription
  misc_feature: MA Experiment 108464 PARAMETER Experiment Name: At_Germinating_Seeds_cDNA_P Parameter: Age (day) Value: 4 vs. 0
  misc_feature: MA Experiment 108464 PARAMETER Experiment Name: At_Germinating_Seeds_cDNA_P Parameter: Tissue Value: Germinating Seeds
  misc_feature: MA Experiment ID: 108609 Result: Up-regulated in Transcription
  misc_feature: MA Experiment 108609 PARAMETER Experiment Name: At_100uM_ABA_cDNA_P Parameter: Timepoint (hr) Value: 24
  misc_feature: MA Experiment 108609 PARAMETER Experiment Name: At_100uM_ABA_cDNA_P Parameter: Tissue Value: Aerial
  misc_feature: MA Experiment 108609 PARAMETER Experiment Name: At_100uM_ABA_cDNA_P Parameter: Treatment Value: 100uM ABA vs. No Treatment
  misc_feature: MA Experiment ID: 20000113 Result: Up-regulated in Transcription
  misc_feature: MA Experiment 20000113 PARAMETER Experiment Name: At_42deg_Heat_cDNA_P Parameter: Temperature (deg C) Value: 42 vs. 22
  misc_feature: MA Experiment 20000113 PARAMETER Experiment Name: At_42deg_Heat_cDNA_P Parameter: Timepoint (hr) Value: 8
  misc_feature: MA Experiment 20000113 PARAMETER Experiment Name: At_42deg_Heat_cDNA_P Parameter: Tissue Value: Aerial
  misc_feature: MA Experiment ID: 20000227 Result: Down-regulated in Transcription
  misc_feature: MA Experiment 20000227 PARAMETER Experiment Name: At_Root-Tips-vs-Tops_P Parameter: Tissue Value: Root Tips vs. Root Tops
  misc_feature: MA Experiment ID: 20001555 Result: Up-regulated in Transcription
  misc_feature: MA Experiment 20001555 PARAMETER Experiment Name: At_Drought_Soil_Dry_P Parameter: Age (day) Value: 24
  misc_feature: MA Experiment 20001555 PARAMETER Experiment Name: At_Drought_Soil_Dry_P Parameter: Organism Value: A. thaliana
  misc_feature: MA Experiment 20001555 PARAMETER Experiment Name: At_Drought_Soil_Dry_P Parameter: Plant Line Value: WS
  misc_feature: MA Experiment 20001555 PARAMETER Experiment Name: At_Drought_Soil_Dry_P Parameter: Post Timepoint (hr) Value: None
  misc_feature: MA Experiment 20001555 PARAMETER Experiment Name: At_Drought_Soil_Dry_P Parameter: Post-Treatment Value: None
  misc_feature: MA Experiment 20001555 PARAMETER Experiment Name: At_Drought_Soil_Dry_P Parameter: Timepoint (day) Value: 10
  misc_feature: MA Experiment 20001555 PARAMETER Experiment Name: At_Drought_Soil_Dry_P Parameter: Treatment Value: Drought vs. No Drought

SEQ ID NO: 33308 - protein, 196 aa, Arabidopsis thaliana; identical to SEQ ID NO: 29718
  peptide (1)..(196): Ceres Seq. ID no. 12329949
  misc_feature (52)..(181): Pfam Name: Domain of unknown function (DUF588) Pfam Description: Domain of unknown function (DUF588)
  misc_feature (47)..(153): Homolog of NCBI NO: 7939530 NR Description: gb|AAD20689.1~gene_id:K14B15.11~similar to
  misc_feature (70)..(195): Homolog of NCBI NO: 11357817 NR Description: hypothetical protein F5K20.150 - Arabidopsis
  misc_feature (47)..(193): Homolog of NCBI NO: 22330130 NR Description: hypothetical protein; protein id: At1g49405.1
  misc_feature (47)..(193): Homolog of NCBI NO: 15241672 NR Description: putative protein; protein id: At5g02060.1
  misc_feature (47)..(195): Homolog of NCBI NO: 18409932 NR Description: putative protein
  misc_feature (47)..(195): Homolog of NCBI NO: 30686969 NR Description: expressed protein [Arabidopsis thaliana]
  misc_feature (53)..(179): Homolog of NCBI NO: 26006486 NR Description: Unknown protein [Oryza sativa (japonica
  misc_feature (18)..(195): Homolog of NCBI NO: 18401722 NR Description: expressed protein
  misc_feature (18)..(196): Homolog of NCBI NO: 25408537 NR Description: hypothetical protein At2g37200 [imported] -
  misc_feature (17)..(196): Homolog of NCBI NO: 30687069 NR Description: expressed protein [Arabidopsis thaliana]

SEQ ID NO: 33309 - protein, 180 aa, Arabidopsis thaliana; identical to SEQ ID NO: 29719
  peptide (1)..(180): Ceres Seq. ID no. 12329950
  misc_feature (36)..(165): Pfam Name: Domain of unknown function (DUF588) Pfam Description: Domain of unknown function (DUF588)
  misc_feature (31)..(137): Homolog of NCBI NO: 7939530 NR Description: gb|AAD20689.1~gene_id:K14B15.11~similar to
  misc_feature (54)..(179): Homolog of NCBI NO: 11357817 NR Description: hypothetical protein F5K20.150 - Arabidopsis
  misc_feature (31)..(177): Homolog of NCBI NO: 22330130 NR Description: hypothetical protein; protein id: At1g49405.1
  misc_feature (31)..(177): Homolog of NCBI NO: 15241672 NR Description: putative protein; protein id: At5g02060.1
  misc_feature (31)..(179): Homolog of NCBI NO: 18409932 NR Description: putative protein
  misc_feature (31)..(179): Homolog of NCBI NO: 30686969 NR Description: expressed protein [Arabidopsis thaliana]
  misc_feature (37)..(163): Homolog of NCBI NO: 26006486 NR Description: Unknown protein [Oryza sativa (japonica
  misc_feature (2)..(179): Homolog of NCBI NO: 18401722 NR Description: expressed protein
  misc_feature (2)..(180): Homolog of NCBI NO: 25408537 NR Description: hypothetical protein At2g37200 [imported] -
  misc_feature (1)..(180): Homolog of NCBI NO: 30687069 NR Description: expressed protein [Arabidopsis thaliana]

SEQ ID NO: 33310 - protein, 179 aa, Arabidopsis thaliana; identical to SEQ ID NO: 29720
  peptide (1)..(179): Ceres Seq. ID no. 12329951
  misc_feature (35)..(164): Pfam Name: Domain of unknown function (DUF588) Pfam Description: Domain of unknown function (DUF588)
  misc_feature (30)..(136): Homolog of NCBI NO: 7939530 NR Description: gb|AAD20689.1~gene_id:K14B15.11~similar to
  misc_feature (53)..(178): Homolog of NCBI NO: 11357817 NR Description: hypothetical protein F5K20.150 - Arabidopsis
  misc_feature (30)..(176): Homolog of NCBI NO: 22330130 NR Description: hypothetical protein; protein id: At1g49405.1
  misc_feature (30)..(176): Homolog of NCBI NO: 15241672 NR Description: putative protein; protein id: At5g02060.1
  misc_feature (30)..(178): Homolog of NCBI NO: 18409932 NR Description: putative protein
  misc_feature (30)..(178): Homolog of NCBI NO: 30686969 NR Description: expressed protein [Arabidopsis thaliana]
  misc_feature (36)..(162): Homolog of NCBI NO: 26006486 NR Description: Unknown protein [Oryza sativa (japonica
  misc_feature (1)..(178): Homolog of NCBI NO: 18401722 NR Description: expressed protein
  misc_feature (1)..(179): Homolog of NCBI NO: 25408537 NR Description: hypothetical protein At2g37200 [imported] -
  misc_feature (1)..(179): Homolog of NCBI NO: 30687069 NR Description: expressed protein [Arabidopsis thaliana]

SEQ ID NO: 33311 - DNA, 812 bp, Arabidopsis thaliana; identical to SEQ ID NO: 29721
  misc_feature (1)..(812): Ceres Seq. ID no. 12332051
  misc_feature: MA Experiment ID: 108577 Result: Down-regulated in Transcription
  misc_feature: MA Experiment 108577 PARAMETER Experiment Name: At_42deg_Heat_cDNA_P Parameter: Temperature (deg C) Value: 42 vs. 22
  misc_feature: MA Experiment 108577 PARAMETER Experiment Name: At_42deg_Heat_cDNA_P Parameter: Timepoint (hr) Value: 6
  misc_feature: MA Experiment 108577 PARAMETER Experiment Name: At_42deg_Heat_cDNA_P Parameter: Tissue Value: Aerial
  misc_feature: MA Experiment ID: 20000179 Result: Up-regulated in Transcription
  misc_feature: MA Experiment 20000179 PARAMETER Experiment Name: At_Germinating_Seeds_P Parameter: Age (hr) Value: 6 vs. 0
  misc_feature: MA Experiment 20000179 PARAMETER Experiment Name: At_Germinating_Seeds_P Parameter: Tissue Value: Germinating Seeds
  misc_feature: MA Experiment ID: 20000180 Result: Up-regulated in Transcription
  misc_feature: MA Experiment 20000180 PARAMETER Experiment Name: At_Germinating_Seeds_P Parameter: Age (hr) Value: 24 vs. 0
  misc_feature: MA Experiment 20000180 PARAMETER Experiment Name: At_Germinating_Seeds_P Parameter: Tissue Value: Germinating Seeds
  misc_feature: MA Experiment ID: 20000184 Result: Down-regulated in Transcription
  misc_feature: MA Experiment 20000184 PARAMETER Experiment Name: At_Shoots__P Parameter: Age (day) Value: 7
  misc_feature: MA Experiment 20000184 PARAMETER Experiment Name: At_Shoots__P Parameter: Tissue Value: Shoots vs. Whole Plant
  misc_feature: MA Experiment ID: 20000234 Result: Up-regulated in Transcription
  misc_feature: MA Experiment 20000234 PARAMETER Experiment Name: At_Siliques_P Parameter: Age (day) Value: 21
  misc_feature: MA Experiment 20000234 PARAMETER Experiment Name: At_Siliques_P Parameter: Organism Value: A. thaliana
  misc_feature: MA Experiment 20000234 PARAMETER Experiment Name: At_Siliques_P Parameter: Plant Line Value: WS
  misc_feature: MA Experiment 20000234 PARAMETER Experiment Name: At_Siliques_P Parameter: Tissue Value: Less Than 5mm Siliques vs. Whole Plant
  misc_feature: MA Experiment ID: 20000265 Result: Up-regulated in Transcription
  misc_feature: MA Experiment 20000265 PARAMETER Experiment Name: At_Open_Flower_P Parameter: Age (day) Value: 21
  misc_feature: MA Experiment 20000265 PARAMETER Experiment Name: At_Open_Flower_P Parameter: Plant Line Value: WS
  misc_feature: MA Experiment 20000265 PARAMETER Experiment Name: At_Open_Flower_P Parameter: Tissue Value: Closed Flower vs. Whole Plant
  misc_feature: MA Experiment ID: 20000495 Result: Up-regulated in Transcription
  misc_feature: MA Experiment 20000495 PARAMETER Experiment Name: At_Guard_Cells_P Parameter: Harvest Date Value: 8/2/2002
  misc_feature: MA Experiment 20000495 PARAMETER Experiment Name: At_Guard_Cells_P Parameter: Organism Value: A. thaliana
  misc_feature: MA Experiment 20000495 PARAMETER Experiment Name: At_Guard_Cells_P Parameter: Tissue Value: Guard Cells vs. Leaves
  misc_feature: MA Experiment ID: 20001911 Result: Down-regulated in Transcription
  misc_feature: MA Experiment 20001911 PARAMETER Experiment Name: At_Drought_Reproduction_P Parameter: Age (day) Value: 40
  misc_feature: MA Experiment 20001911 PARAMETER Experiment Name: At_Drought_Reproduction_P Parameter: Organism Value: A. thaliana
  misc_feature: MA Experiment 20001911 PARAMETER Experiment Name: At_Drought_Reproduction_P Parameter: Plant Line Value: WS
  misc_feature: MA Experiment 20001911 PARAMETER Experiment Name: At_Drought_Reproduction_P Parameter: Timepoint (day) Value: 10
  misc_feature: MA Experiment 20001911 PARAMETER Experiment Name: At_Drought_Reproduction_P Parameter: Tissue Value: Flowers
  misc_feature: MA Experiment 20001911 PARAMETER Experiment Name: At_Drought_Reproduction_P Parameter: Treatment Value: Drought vs. No Drought

SEQ ID NO: 33312 - protein, 167 aa, Arabidopsis thaliana; identical to SEQ ID NO: 29722
  peptide (1)..(167): Ceres Seq. ID no. 12332052
  misc_feature (1)..(167): Pfam Name: Signal peptidase subunit Pfam Description: Signal peptidase subunit
  misc_feature (1)..(148): Homolog of NCBI NO: 39587410 NR Description: Hypothetical protein CBG22979 [Caenorhabditis
  misc_feature (1)..(148): Homolog of NCBI NO: 27708196 NR Description: similar to RIKEN cDNA 6530401D17
  misc_feature (1)..(148): Homolog of NCBI NO: 26390287 NR Description: unnamed protein product [Mus musculus]
  misc_feature (1)..(148): Homolog of NCBI NO: 11345462 NR Description: hypothetical protein FLJ22649 similar to signal
  misc_feature (1)..(148): Homolog of NCBI NO: 134791 NR Description: Microsomal signal peptidase 23 kDa subunit (SPase
  misc_feature (1)..(166): Homolog of NCBI NO: 34895578 NR Description: unnamed protein product [Oryza sativa (japonica
  misc_feature (1)..(167): Homolog of NCBI NO: 28558783 NR Description: signal peptidase protein-like protein [Cucumis
  misc_feature (1)..(167): Homolog of NCBI NO: 15240934 NR Description: signal peptidase
  misc_feature (1)..(167): Homolog of NCBI NO: 18397160 NR Description: expressed protein

SEQ ID NO: 33313 - DNA, 1127 bp, Arabidopsis thaliana; identical to SEQ ID NO: 29723
  misc_feature (1)..(1127): Ceres Seq. ID no. 12348491
  misc_feature: MA Experiment ID: 108461 Result: Up-regulated in Transcription
  misc_feature: MA Experiment 108461 PARAMETER Experiment Name: At_Germinating_Seeds_cDNA_P Parameter: Age (day) Value: 1 vs. 0
  misc_feature: MA Experiment 108461 PARAMETER Experiment Name: At_Germinating_Seeds_cDNA_P Parameter: Tissue Value: Germinating Seeds
  misc_feature: MA Experiment ID: 108462 Result: Up-regulated in Transcription
  misc_feature: MA Experiment 108462 PARAMETER Experiment Name: At_Germinating_Seeds_cDNA_P Parameter: Age (day) Value: 2 vs. 0
  misc_feature: MA Experiment 108462 PARAMETER Experiment Name: At_Germinating_Seeds_cDNA_P Parameter: Tissue Value: Germinating Seeds
  misc_feature: MA Experiment ID: 108463 Result: Up-regulated in Transcription
  misc_feature: MA Experiment 108463 PARAMETER Experiment Name: At_Germinating_Seeds_cDNA_P Parameter: Age (day) Value: 3 vs. 0
  misc_feature: MA Experiment 108463 PARAMETER Experiment Name: At_Germinating_Seeds_cDNA_P Parameter: Tissue Value: Germinating Seeds
  misc_feature: MA Experiment ID: 20000112 Result: Down-regulated in Transcription
  misc_feature: MA Experiment 20000112 PARAMETER Experiment Name: At_42deg_Heat_cDNA_P Parameter: Temperature (deg C) Value: 42 vs. 22
  misc_feature: MA Experiment 20000112 PARAMETER Experiment Name: At_42deg_Heat_cDNA_P Parameter: Timepoint (hr) Value: 2
  misc_feature: MA Experiment 20000112 PARAMETER Experiment Name: At_42deg_Heat_cDNA_P Parameter: Tissue Value: Aerial
  misc_feature: MA Experiment ID: 20000113 Result: Down-regulated in Transcription
  misc_feature: MA Experiment 20000113 PARAMETER Experiment Name: At_42deg_Heat_cDNA_P Parameter: Temperature (deg C) Value: 42 vs. 22
  misc_feature: MA Experiment 20000113 PARAMETER Experiment Name: At_42deg_Heat_cDNA_P Parameter: Timepoint (hr) Value: 8
  misc_feature: MA Experiment 20000113 PARAMETER Experiment Name: At_42deg_Heat_cDNA_P Parameter: Tissue Value: Aerial
  misc_feature: MA Experiment ID: 20000171 Result: Down-regulated in Transcription
  misc_feature: MA Experiment 20000171 PARAMETER Experiment Name: At_42deg_Heat_P Parameter: Age (day) Value: 14
  misc_feature: MA Experiment 20000171 PARAMETER Experiment Name: At_42deg_Heat_P Parameter: Organism Value: A. thaliana
  misc_feature: MA Experiment 20000171 PARAMETER Experiment Name: At_42deg_Heat_P Parameter: Plant Line Value: WS
  misc_feature: MA Experiment 20000171 PARAMETER Experiment Name: At_42deg_Heat_P Parameter: Temperature (deg C) Value: 42 vs. 22
  misc_feature: MA Experiment 20000171 PARAMETER Experiment Name: At_42deg_Heat_P Parameter: Timepoint (hr) Value: 1
  misc_feature: MA Experiment 20000171 PARAMETER Experiment Name: At_42deg_Heat_P Parameter: Tissue Value: Aerial
  misc_feature: MA Experiment ID: 20000173 Result: Down-regulated in Transcription
  misc_feature: MA Experiment 20000173 PARAMETER Experiment Name: At_42deg_Heat_P Parameter: Age (day) Value: 14
  misc_feature: MA Experiment 20000173 PARAMETER Experiment Name: At_42deg_Heat_P Parameter: Organism Value: A. thaliana
  misc_feature: MA Experiment 20000173 PARAMETER Experiment Name: At_42deg_Heat_P Parameter: Plant Line Value: WS
  misc_feature: MA Experiment 20000173 PARAMETER Experiment Name: At_42deg_Heat_P Parameter: Temperature (deg C) Value: 42 vs. 22
  misc_feature: MA Experiment 20000173 PARAMETER Experiment Name: At_42deg_Heat_P Parameter: Timepoint (hr) Value: 6
  misc_feature: MA Experiment 20000173 PARAMETER Experiment Name: At_42deg_Heat_P Parameter: Tissue Value: Aerial
  misc_feature: MA Experiment ID: 20000179 Result: Up-regulated in Transcription
  misc_feature: MA Experiment 20000179 PARAMETER Experiment Name: At_Germinating_Seeds_P Parameter: Age (hr) Value: 6 vs. 0
  misc_feature: MA Experiment 20000179 PARAMETER Experiment Name: At_Germinating_Seeds_P Parameter: Tissue Value: Germinating Seeds
  misc_feature: MA Experiment ID: 20000180 Result: Up-regulated in Transcription
  misc_feature: MA Experiment 20000180 PARAMETER Experiment Name: At_Germinating_Seeds_P Parameter: Age (hr) Value: 24 vs. 0
  misc_feature: MA Experiment 20000180 PARAMETER Experiment Name: At_Germinating_Seeds_P Parameter: Tissue Value: Germinating Seeds
  misc_feature: MA Experiment ID: 20000211 Result: Up-regulated in Transcription
  misc_feature: MA Experiment 20000211 PARAMETER Experiment Name: At_0.001percent_MeJA__P Parameter: Age (day) Value: 14
  misc_feature: MA Experiment 20000211 PARAMETER Experiment Name: At_0.001percent_MeJA__P Parameter: Organism Value: A. thaliana
  misc_feature: MA Experiment 20000211 PARAMETER Experiment Name: At_0.001percent_MeJA__P Parameter: Plant Line Value: WS
  misc_feature: MA Experiment 20000211 PARAMETER Experiment Name: At_0.001percent_MeJA__P Parameter: Timepoint (hr) Value: 1
  misc_feature: MA Experiment 20000211 PARAMETER Experiment Name: At_0.001percent_MeJA__P Parameter: Tissue Value: Aerial
  misc_feature: MA Experiment 20000211 PARAMETER Experiment Name: At_0.001percent_MeJA__P Parameter: Treatment Value: 0.001percent MeJA vs. No Treatment
  misc_feature: MA Experiment ID: 20000224 Result: Down-regulated in Transcription
  misc_feature: MA Experiment ID: 20000227 Result: Down-regulated in Transcription
  misc_feature: MA Experiment 20000227 PARAMETER Experiment Name: At_Root-Tips-vs-Tops_P Parameter: Tissue Value: Root Tips vs. Root Tops
  misc_feature: MA Experiment ID: 20000234 Result: Down-regulated in Transcription
  misc_feature: MA Experiment 20000234 PARAMETER Experiment Name: At_Siliques_P Parameter: Age (day) Value: 21
  misc_feature: MA Experiment 20000234 PARAMETER Experiment Name: At_Siliques_P Parameter: Organism Value: A. thaliana
  misc_feature: MA Experiment 20000234 PARAMETER Experiment Name: At_Siliques_P Parameter: Plant Line Value: WS
  misc_feature: MA Experiment 20000234 PARAMETER Experiment Name: At_Siliques_P Parameter: Tissue Value: Less Than 5mm Siliques vs. Whole Plant
  misc_feature: MA Experiment ID: 20001556 Result: Down-regulated in Transcription
  misc_feature: MA Experiment 20001556 PARAMETER Experiment Name: At_Drought_Soil_Dry_P Parameter: Age (day) Value: 26
  misc_feature: MA Experiment 20001556 PARAMETER Experiment Name: At_Drought_Soil_Dry_P Parameter: Organism Value: A. thaliana
  misc_feature: MA Experiment 20001556 PARAMETER Experiment Name: At_Drought_Soil_Dry_P Parameter: Plant Line Value: WS
  misc_feature: MA Experiment 20001556 PARAMETER Experiment Name: At_Drought_Soil_Dry_P Parameter: Post Timepoint (hr) Value: None
  misc_feature: MA Experiment 20001556 PARAMETER Experiment Name: At_Drought_Soil_Dry_P Parameter: Post-Treatment Value: None
  misc_feature: MA Experiment 20001556 PARAMETER Experiment Name: At_Drought_Soil_Dry_P Parameter: Timepoint (day) Value: 12
  misc_feature: MA Experiment 20001556 PARAMETER Experiment Name: At_Drought_Soil_Dry_P Parameter: Treatment Value: Drought vs. No Drought
  misc_feature: MA Experiment ID: 20001557 Result: Down-regulated in Transcription
  misc_feature: MA Experiment 20001557 PARAMETER Experiment Name: At_Drought_Soil_Dry_P Parameter: Age (day) Value: 27
  misc_feature: MA Experiment 20001557 PARAMETER Experiment Name: At_Drought_Soil_Dry_P Parameter: Organism Value: A. thaliana
  misc_feature: MA Experiment 20001557 PARAMETER Experiment Name: At_Drought_Soil_Dry_P Parameter: Plant Line Value: WS
  misc_feature: MA Experiment 20001557 PARAMETER Experiment Name: At_Drought_Soil_Dry_P Parameter: Post Timepoint (hr) Value: 3
  misc_feature: MA Experiment 20001557 PARAMETER Experiment Name: At_Drought_Soil_Dry_P Parameter: Post-Treatment Value: Re-Water vs. No Drought
  misc_feature: MA Experiment 20001557 PARAMETER Experiment Name: At_Drought_Soil_Dry_P Parameter: Timepoint (day) Value: 13
  misc_feature: MA Experiment 20001557 PARAMETER Experiment Name: At_Drought_Soil_Dry_P Parameter: Treatment Value: Drought vs. No Drought
  misc_feature: MA Experiment ID: 20001559 Result: Down-regulated in Transcription
  misc_feature: MA Experiment 20001559 PARAMETER Experiment Name: At_Drought_Soil_Dry_P Parameter: Age (day) Value: 28
  misc_feature: MA Experiment 20001559 PARAMETER Experiment Name: At_Drought_Soil_Dry_P Parameter: Organism Value: A. thaliana
  misc_feature: MA Experiment 20001559 PARAMETER Experiment Name: At_Drought_Soil_Dry_P Parameter: Plant Line Value: WS
  misc_feature: MA Experiment 20001559 PARAMETER Experiment Name: At_Drought_Soil_Dry_P Parameter: Post Timepoint (hr) Value: 29
  misc_feature: MA Experiment 20001559 PARAMETER Experiment Name: At_Drought_Soil_Dry_P Parameter: Post-Treatment Value: Re-Water vs. No Drought
  misc_feature: MA Experiment 20001559 PARAMETER Experiment Name: At_Drought_Soil_Dry_P Parameter: Timepoint (day) Value: 14
  misc_feature: MA Experiment 20001559 PARAMETER Experiment Name: At_Drought_Soil_Dry_P Parameter: Treatment Value: Drought vs. No Drought

SEQ ID NO: 33314 - protein, 247 aa, Arabidopsis thaliana; identical to SEQ ID NO: 29724
  peptide (1)..(247): Ceres Seq. ID no. 12348492
  misc_feature (12)..(247): Homolog of NCBI NO: 15237093 NR Description: putative protein
  misc_feature (4)..(245): Homolog of NCBI NO: 15238125 NR Description: putative protein
  misc_feature (23)..(247): Homolog of NCBI NO: 15236556 NR Description: putative protein
  misc_feature (14)..(246): Homolog of NCBI NO: 18406991 NR Description: expressed protein
  misc_feature (44)..(245): Homolog of NCBI NO: 34904202 NR Description: P0492F05.25 [Oryza sativa (japonica
  misc_feature (4)..(245): Homolog of NCBI NO: 34909318 NR Description: OSJNBb0021A09.5 [Oryza sativa (japonica
  misc_feature (1)..(247): Homolog of NCBI NO: 34899590 NR Description: hypothetical protein~similar to Oryza sativa
  misc_feature (4)..(247): Homolog of NCBI NO: 34897094 NR Description: unknown protein [Oryza sativa (japonica
  misc_feature (1)..(247): Homolog of NCBI NO: 18398810 NR Description: expressed protein
  misc_feature (1)..(247): Homolog of NCBI NO: 30681227 NR Description: expressed protein [Arabidopsis thaliana]

SEQ ID NO: 33315 - protein, 170 aa, Arabidopsis thaliana; identical to SEQ ID NO: 29725
  peptide (1)..(170): Ceres Seq. ID no. 12348493
  misc_feature (1)..(170): Homolog of NCBI NO: 15237093 NR Description: putative protein
  misc_feature (1)..(168): Homolog of NCBI NO: 15238125 NR Description: putative protein
  misc_feature (1)..(170): Homolog of NCBI NO: 15236556 NR Description: putative protein
  misc_feature (1)..(169): Homolog of NCBI NO: 18406991 NR Description: expressed protein
  misc_feature (1)..(168): Homolog of NCBI NO: 34904202 NR Description: P0492F05.25 [Oryza sativa (japonica
  misc_feature (1)..(168): Homolog of NCBI NO: 34909318 NR Description: OSJNBb0021A09.5 [Oryza sativa (japonica
  misc_feature (1)..(170): Homolog of NCBI NO: 34899590 NR Description: hypothetical protein~similar to Oryza sativa
  misc_feature (1)..(170): Homolog of NCBI NO: 34897094 NR Description: unknown protein [Oryza sativa (japonica
  misc_feature (1)..(170): Homolog of NCBI NO: 18398810 NR Description: expressed protein
  misc_feature (1)..(170): Homolog of NCBI NO: 30681227 NR Description: expressed protein [Arabidopsis thaliana]

SEQ ID NO: 33316 - protein, 142 aa, Arabidopsis thaliana; identical to SEQ ID NO: 29726
  peptide (1)..(142): Ceres Seq. ID no. 12348494
  misc_feature (1)..(142): Homolog of NCBI NO: 15237093 NR Description: putative protein
  misc_feature (1)..(140): Homolog of NCBI NO: 15238125 NR Description: putative protein
  misc_feature (1)..(142): Homolog of NCBI NO: 15236556 NR Description: putative protein
  misc_feature (1)..(141): Homolog of NCBI NO: 18406991 NR Description: expressed protein
  misc_feature (1)..(140): Homolog of NCBI NO: 34904202 NR Description: P0492F05.25 [Oryza sativa (japonica
  misc_feature (1)..(140): Homolog of NCBI NO: 34909318 NR Description: OSJNBb0021A09.5 [Oryza sativa (japonica
  misc_feature (1)..(142): Homolog of NCBI NO: 34899590 NR Description: hypothetical protein~similar to Oryza sativa
  misc_feature (1)..(142): Homolog of NCBI NO: 34897094 NR Description: unknown protein [Oryza sativa (japonica
  misc_feature (1)..(142): Homolog of NCBI NO: 18398810 NR Description: expressed protein
  misc_feature (1)..(142): Homolog of NCBI NO: 30681227 NR Description: expressed protein [Arabidopsis thaliana]

SEQ ID NO: 33317 - DNA, 1076 bp, Arabidopsis thaliana; identical to SEQ ID NO: 22642
  misc_feature (1)..(1076): Ceres Seq. ID no. 13588829
  misc_feature: MA Experiment ID: 20000794 Result: Down-regulated in Transcription
  misc_feature: MA Experiment 20000794 PARAMETER Experiment Name: At_Petals_P Parameter: Age (day) Value: 23-25 days
  misc_feature: MA Experiment 20000794 PARAMETER Experiment Name: At_Petals_P Parameter: Plant Line Value: WS
  misc_feature: MA Experiment 20000794 PARAMETER Experiment Name: At_Petals_P Parameter: Tissue Value: Petals vs. Whole plant
  misc_feature: MA Experiment ID: 20001451 Result: Down-regulated in Transcription
  misc_feature: MA Experiment 20001451 PARAMETER Experiment Name: At_Far-red-induction_P Parameter: Age (day) Value: 7
  misc_feature: MA Experiment 20001451 PARAMETER Experiment Name: At_Far-red-induction_P Parameter: Light Value: Far-red vs. White
  misc_feature: MA Experiment 20001451 PARAMETER Experiment Name: At_Far-red-induction_P Parameter: Organism Value: A. thaliana
  misc_feature: MA Experiment 20001451 PARAMETER Experiment Name: At_Far-red-induction_P Parameter: Plant Line Value: Columbia
  misc_feature: MA Experiment 20001451 PARAMETER Experiment Name: At_Far-red-induction_P Parameter: Timepoint (hr) Value: 24
  misc_feature: MA Experiment 20001451 PARAMETER Experiment Name: At_Far-red-induction_P Parameter: Tissue Value: Whole Plant
  misc_feature: MA Experiment ID: 20001557 Result: Up-regulated in Transcription
  misc_feature: MA Experiment 20001557 PARAMETER Experiment Name: At_Drought_Soil_Dry_P Parameter: Age (day) Value: 27
  misc_feature: MA Experiment 20001557 PARAMETER Experiment Name: At_Drought_Soil_Dry_P Parameter: Organism Value: A. thaliana
  misc_feature: MA Experiment 20001557 PARAMETER Experiment Name: At_Drought_Soil_Dry_P Parameter: Plant Line Value: WS
  misc_feature: MA Experiment 20001557 PARAMETER Experiment Name: At_Drought_Soil_Dry_P Parameter: Post Timepoint (hr) Value: 3
  misc_feature: MA Experiment 20001557 PARAMETER Experiment Name: At_Drought_Soil_Dry_P Parameter: Post-Treatment Value: Re-Water vs. No Drought
  misc_feature: MA Experiment 20001557 PARAMETER Experiment Name: At_Drought_Soil_Dry_P Parameter: Timepoint (day) Value: 13
  misc_feature: MA Experiment 20001557 PARAMETER Experiment Name: At_Drought_Soil_Dry_P Parameter: Treatment Value: Drought vs. No Drought
  misc_feature: MA Experiment ID: 20001558 Result: Up-regulated in Transcription
  misc_feature: MA Experiment 20001558 PARAMETER Experiment Name: At_Drought_Soil_Dry_P Parameter: Age (day) Value: 27
  misc_feature: MA Experiment 20001558 PARAMETER Experiment Name: At_Drought_Soil_Dry_P Parameter: Organism Value: A. thaliana
  misc_feature: MA Experiment 20001558 PARAMETER Experiment Name: At_Drought_Soil_Dry_P Parameter: Plant Line Value: WS
  misc_feature: MA Experiment 20001558 PARAMETER Experiment Name: At_Drought_Soil_Dry_P Parameter: Post Timepoint (hr) Value: 6
  misc_feature: MA Experiment 20001558 PARAMETER Experiment Name: At_Drought_Soil_Dry_P Parameter: Post-Treatment Value: Re-Water vs. No Drought
  misc_feature: MA Experiment 20001558 PARAMETER Experiment Name: At_Drought_Soil_Dry_P Parameter: Timepoint (day) Value: 13
  misc_feature: MA Experiment 20001558 PARAMETER Experiment Name: At_Drought_Soil_Dry_P Parameter: Treatment Value: Drought vs. No Drought
  misc_feature: MA Experiment ID: 20001757 Result: Up-regulated in Transcription
  misc_feature: MA Experiment 20001757 PARAMETER Experiment Name: At_50mM_NH4NO3_L-to-H_P Parameter: Timepoint (hr) Value: 6
  misc_feature: MA Experiment 20001757 PARAMETER Experiment Name: At_50mM_NH4NO3_L-to-H_P Parameter: Tissue Value: Leaf
  misc_feature: MA Experiment 20001757 PARAMETER Experiment Name: At_50mM_NH4NO3_L-to-H_P Parameter: Treatment Value: 50mM NH4NO3 vs 100mM Mannitol

SEQ ID NO: 33318 - protein, 250 aa, Arabidopsis thaliana [sequence omitted]

SEQ ID NO: 33319 - protein, 207 aa, Arabidopsis thaliana; identical to SEQ ID NO: 22644
  peptide (1)..(207): Ceres Seq. ID no. 15220913
  misc_feature (61)..(145): Pfam Name: Ribosomal protein S3, C-terminal domain Pfam Description: Ribosomal protein S3, C-terminal domain
  misc_feature (61)..(145): Pfam Name: Ribosomal protein S3, C-terminal domain Pfam Description: Ribosomal protein S3, C-terminal domain
  misc_feature (61)..(145): Pfam Name: Ribosomal protein S3, C-terminal domain Pfam Description: Ribosomal protein S3, C-terminal domain
  misc_feature (1)..(179): Homolog of NCBI NO: 27735393 NR Description: Similar to ribosomal protein S3 [Xenopus laevis]
  misc_feature (1)..(206): Homolog of NCBI NO: 2500399 NR Description: 40S ribosomal protein S3
  misc_feature (1)..(179): Homolog of NCBI NO: 15718687 NR Description: ribosomal protein S3; 40S ribosomal protein S3
  misc_feature (1)..(179): Homolog of NCBI NO: 12847921 NR Description: unnamed protein product [Mus musculus]
  misc_feature (1)..(185): Homolog of NCBI NO: 133940 NR Description: 40S ribosomal protein S3A (S1A)
  misc_feature (1)..(179): Homolog of NCBI NO: 27735393 NR Description: Similar to ribosomal protein S3 [Xenopus laevis]
  misc_feature (1)..(179): Homolog of NCBI NO: 15718687 NR Description: ribosomal protein S3; 40S ribosomal protein S3
  misc_feature (1)..(185): Homolog of NCBI NO: 133940 NR Description: 40S ribosomal protein S3A (S1A)
  misc_feature (1)..(179): Homolog of NCBI NO: 12847921 NR Description: unnamed protein product [Mus musculus]
  misc_feature (1)..(179): Homolog of NCBI NO: 15718687 NR Description: ribosomal protein S3; 40S ribosomal protein S3
  misc_feature (1)..(206): Homolog of NCBI NO: 2500399 NR Description: 40S ribosomal protein S3
  misc_feature (1)..(179): Homolog of NCBI NO: 27735393 NR Description: Similar to ribosomal protein S3 [Xenopus laevis]
  misc_feature (1)..(207): Homolog of NCBI NO: 15225107 NR Description: 40S ribosomal protein S3 (RPS3A) [Arabidopsis
  misc_feature (1)..(204): Homolog of NCBI NO: 15232352 NR Description: 40S ribosomal protein S3 (RPS3B) [Arabidopsis
  misc_feature (1)..(207): Homolog of NCBI NO: 15238533 NR Description: 40S ribosomal protein S3 (RPS3C) [Arabidopsis
  misc_feature (1)..(186): Homolog of NCBI NO: 14192875 NR Description: Putative 40S ribosomal protein; contains
  misc_feature (1)..(180): Homolog of NCBI NO: 22204124 NR Description: putative 40S ribosomal protein S3 [Triticum
  misc_feature (1)..(207): Homolog of NCBI NO: 15225107 NR Description: 40S ribosomal protein S3 (RPS3A) [Arabidopsis
  misc_feature (1)..(204): Homolog of NCBI NO: 15232352 NR Description: 40S ribosomal protein S3 (RPS3B) [Arabidopsis
  misc_feature (1)..(207): Homolog of NCBI NO: 15238533 NR Description: 40S ribosomal protein S3 (RPS3C) [Arabidopsis
  misc_feature (1)..(186): Homolog of NCBI NO: 14192875 NR Description: Putative 40S ribosomal protein; contains
  misc_feature (1)..(180): Homolog of NCBI NO: 22204124 NR Description: putative 40S ribosomal protein S3 [Triticum
  misc_feature (1)..(185): Homolog of NCBI NO: 133940 NR Description: 40S ribosomal protein S3A (S1A)
  misc_feature (1)..(179): Homolog of NCBI NO: 12847921 NR Description: unnamed protein product [Mus musculus]
  misc_feature (1)..(206): Homolog of NCBI NO: 2500399 NR Description: 40S ribosomal protein S3
  misc_feature (1)..(180): Homolog of NCBI NO: 22204124 NR Description: putative 40S ribosomal protein S3 [Triticum
  misc_feature (1)..(186): Homolog of NCBI NO: 14192875 NR Description: Putative 40S ribosomal protein; contains
  misc_feature (1)..(207): Homolog of NCBI NO: 15238533 NR Description: 40S ribosomal protein S3 (RPS3C) [Arabidopsis
  misc_feature (1)..(204): Homolog of NCBI NO: 15232352 NR Description: 40S ribosomal protein S3 (RPS3B) [Arabidopsis
  misc_feature (1)..(207): Homolog of NCBI NO: 15225107 NR Description: 40S ribosomal protein S3 (RPS3A) [Arabidopsis

SEQ ID NO: 33320 - DNA, 873 bp, Arabidopsis thaliana; identical to SEQ ID NO: 29730
  misc_feature (1)..(873): Ceres Seq. ID no. 12369966
  misc_feature: MA Experiment ID: 20000179 Result: Up-regulated in Transcription
  misc_feature: MA Experiment 20000179 PARAMETER Experiment Name: At_Germinating_Seeds_P Parameter: Age (hr) Value: 6 vs. 0
  misc_feature: MA Experiment 20000179 PARAMETER Experiment Name: At_Germinating_Seeds_P Parameter: Tissue Value: Germinating Seeds
  misc_feature: MA Experiment ID: 20000180 Result: Up-regulated in Transcription
  misc_feature: MA Experiment 20000180 PARAMETER Experiment Name: At_Germinating_Seeds_P Parameter: Age (hr) Value: 24 vs. 0
  misc_feature: MA Experiment 20000180 PARAMETER Experiment Name: At_Germinating_Seeds_P Parameter: Tissue Value: Germinating Seeds

SEQ ID NO: 33321 - protein, 192 aa, Arabidopsis thaliana; identical to SEQ ID NO: 29731
  peptide (1)..(192): Ceres Seq. ID no. 12369967
  misc_feature (1)..(56): Homolog of NCBI NO: 15233420 NR Description: hypothetical protein; protein id: At4g04200.1
  misc_feature (109)..(192): Homolog of NCBI NO: 15233420 NR Description: hypothetical protein; protein id: At4g04200.1
  misc_feature (14)..(190): Homolog of NCBI NO: 38344552 NR Description: OSJNBa0027P08.20 [Oryza sativa (japonica
  misc_feature (1)..(107): Homolog of NCBI NO: 25408649 NR Description: hypothetical protein At2g39960 [imported] -
  misc_feature (1)..(192): Homolog of NCBI NO: 34365647 NR Description: At4g04200 [Arabidopsis thaliana]
  misc_feature (1)..(192): Homolog of NCBI NO: 30688096 NR Description: expressed protein [Arabidopsis thaliana]

SEQ ID NO: 33322 - DNA, 1347 bp, Arabidopsis thaliana; identical to SEQ ID NO: 29732
  misc_feature (1)..(1347): Ceres Seq. ID no. 12371997
  misc_feature: MA Experiment ID: 108461 Result: Up-regulated in Transcription
  misc_feature: MA Experiment 108461 PARAMETER Experiment Name: At_Germinating_Seeds_cDNA_P Parameter: Age (day) Value: 1 vs. 0
  misc_feature: MA Experiment 108461 PARAMETER Experiment Name: At_Germinating_Seeds_cDNA_P Parameter: Tissue Value: Germinating Seeds
  misc_feature: MA Experiment ID: 108462 Result: Up-regulated in Transcription
  misc_feature: MA Experiment 108462 PARAMETER Experiment Name: At_Germinating_Seeds_cDNA_P Parameter: Age (day) Value: 2 vs. 0
  misc_feature: MA Experiment 108462 PARAMETER Experiment Name: At_Germinating_Seeds_cDNA_P Parameter: Tissue Value: Germinating Seeds
  misc_feature: MA Experiment ID: 108463 Result: Up-regulated in Transcription
  misc_feature: MA Experiment 108463 PARAMETER Experiment Name: At_Germinating_Seeds_cDNA_P Parameter: Age (day) Value: 3 vs. 0
  misc_feature: MA Experiment 108463 PARAMETER Experiment Name: At_Germinating_Seeds_cDNA_P Parameter: Tissue Value: Germinating Seeds
  misc_feature: MA Experiment ID: 108464 Result: Up-regulated in Transcription
  misc_feature: MA Experiment 108464 PARAMETER Experiment Name: At_Germinating_Seeds_cDNA_P Parameter: Age (day) Value: 4 vs. 0
  misc_feature: MA Experiment 108464 PARAMETER Experiment Name: At_Germinating_Seeds_cDNA_P Parameter: Tissue Value: Germinating Seeds
  misc_feature: MA Experiment ID: 108474 Result: Down-regulated in Transcription
  misc_feature: MA Experiment 108474 PARAMETER Experiment Name: At_Drought_Flowers_cDNA_P Parameter: Timepoint (hr) Value: null
  misc_feature: MA Experiment 108474 PARAMETER Experiment Name: At_Drought_Flowers_cDNA_P Parameter: Treatment Value: Drought vs. No Drought
  misc_feature: MA Experiment ID: 108594 Result: Down-regulated in Transcription
  misc_feature: MA Experiment 108594 PARAMETER Experiment Name: At_Ler-rhl_Root_cDNA_P Parameter: Plant Line Value: null
  misc_feature: MA Experiment ID: 108595 Result: Up-regulated in Transcription
  misc_feature: MA Experiment 108595 PARAMETER Experiment Name: At_Ler-pi_Ovule_cDNA_P Parameter: Plant Line Value: null
  misc_feature: MA Experiment ID: 20000171 Result: Up-regulated in Transcription
  misc_feature: MA Experiment 20000171 PARAMETER Experiment Name: At_42deg_Heat_P Parameter: Age (day) Value: 14
  misc_feature: MA Experiment 20000171 PARAMETER Experiment Name: At_42deg_Heat_P Parameter: Organism Value: A. thaliana
  misc_feature: MA Experiment 20000171 PARAMETER Experiment Name: At_42deg_Heat_P Parameter: Plant Line Value: WS
  misc_feature: MA Experiment 20000171 PARAMETER Experiment Name: At_42deg_Heat_P Parameter: Temperature (deg C) Value: 42 vs. 22
  misc_feature: MA Experiment 20000171 PARAMETER Experiment Name: At_42deg_Heat_P Parameter: Timepoint (hr) Value: 1
  misc_feature: MA Experiment 20000171 PARAMETER Experiment Name: At_42deg_Heat_P Parameter: Tissue Value: Aerial
  misc_feature: MA Experiment ID: 20000184 Result: Up-regulated in Transcription
  misc_feature: MA Experiment 20000184 PARAMETER Experiment Name: At_Shoots__P Parameter: Age (day) Value: 7
  misc_feature: MA Experiment 20000184 PARAMETER Experiment Name: At_Shoots__P Parameter: Tissue Value: Shoots vs. Whole Plant
  misc_feature: MA Experiment ID: 20000185 Result: Up-regulated in Transcription
  misc_feature: MA Experiment 20000185 PARAMETER Experiment Name: At_Roots__P Parameter: Age (day) Value: 7 vs. 21
  misc_feature: MA Experiment 20000185 PARAMETER Experiment Name: At_Roots__P Parameter: Organism Value: A. thaliana
  misc_feature: MA Experiment 20000185 PARAMETER Experiment Name: At_Roots__P Parameter: Tissue Value: Roots vs. Whole Plant
  misc_feature: MA Experiment ID: 20000227 Result: Down-regulated in Transcription
  misc_feature: MA Experiment 20000227 PARAMETER Experiment Name: At_Root-Tips-vs-Tops_P Parameter: Tissue Value: Root Tips vs. Root Tops
  misc_feature: MA Experiment ID: 20000439 Result: Up-regulated in Transcription
  misc_feature: MA Experiment 20000439 PARAMETER Experiment Name: At_Roots__P Parameter: Age (day) Value: 14 vs. 21
  misc_feature: MA Experiment 20000439 PARAMETER Experiment Name: At_Roots__P Parameter: Organism Value: A. thaliana
  misc_feature: MA Experiment 20000439 PARAMETER Experiment Name: At_Roots__P Parameter: Tissue Value: Roots vs. Whole Plant
  misc_feature: MA Experiment ID: 20000527 Result: Down-regulated in Transcription
  misc_feature: MA Experiment 20000527 PARAMETER Experiment Name: At_10percent_PEG_P Parameter: Age (day) Value: 20
  misc_feature: MA Experiment 20000527 PARAMETER Experiment Name: At_10percent_PEG_P Parameter: Organism Value: A. thaliana
  misc_feature: MA Experiment 20000527 PARAMETER Experiment Name: At_10percent_PEG_P Parameter: Plant Line Value: WS
  misc_feature: MA Experiment 20000527 PARAMETER Experiment Name: At_10percent_PEG_P Parameter: Timepoint (day) Value: 20
  misc_feature: MA Experiment 20000527 PARAMETER Experiment Name: At_10percent_PEG_P Parameter: Tissue Value: Whole Plant
  misc_feature: MA Experiment 20000527 PARAMETER Experiment Name: At_10percent_PEG_P Parameter: Treatment Value: 10percent PEG vs. No Treatment
  misc_feature: MA Experiment ID: 20001911 Result: Down-regulated in Transcription
  misc_feature: MA Experiment 20001911 PARAMETER Experiment Name: At_Drought_Reproduction_P Parameter: Age (day) Value: 40
  misc_feature: MA Experiment 20001911 PARAMETER Experiment Name: At_Drought_Reproduction_P Parameter: Organism Value: A. thaliana
  misc_feature: MA Experiment 20001911 PARAMETER Experiment Name: At_Drought_Reproduction_P Parameter: Plant Line Value: WS
  misc_feature: MA Experiment 20001911 PARAMETER Experiment Name: At_Drought_Reproduction_P Parameter: Timepoint (day) Value: 10
  misc_feature: MA Experiment 20001911 PARAMETER Experiment Name: At_Drought_Reproduction_P Parameter: Tissue Value: Flowers
  misc_feature: MA Experiment 20001911 PARAMETER Experiment Name: At_Drought_Reproduction_P Parameter: Treatment Value: Drought vs. No Drought

SEQ ID NO: 33323 - protein, 383 aa, Arabidopsis thaliana; identical to SEQ ID NO: 29733
  peptide (1)..(383): Ceres Seq. ID no. 12371998
  misc_feature (104)..(359): Pfam Name: O-methyltransferase Pfam Description: O-methyltransferase
  misc_feature (25)..(368): Homolog of NCBI NO: 33286372 NR Description: (R,S)-reticuline 7-O-methyltransferase [Papaver
  misc_feature (26)..(381): Homolog of NCBI NO: 2282586 NR Description: methyltransferase [Prunus armeniaca]
  misc_feature (25)..(381): Homolog of NCBI NO: 4574324 NR Description: caffeic acid ortho-methyltransferase [Pinus
  misc_feature (25)..(381): Homolog of NCBI NO: 7447883 NR Description: catechol O-methyltransferase homolog - Monterey
  misc_feature (25)..(381): Homolog of NCBI NO: 1777386 NR Description: caffeic acid O-methyltransferase
  misc_feature (24)..(381): Homolog of NCBI NO: 32440935 NR Description: caffeic acid O-methyltransferase [Rosa chinensis
  misc_feature (225)..(382): Homolog of NCBI NO: 33285922 NR Description: O-methyltransferase-like protein [Brassica rapa
  misc_feature (16)..(132): Homolog of NCBI NO: 15236280 NR Description: O-methyltransferase, family 2 family; protein id:
  misc_feature (167)..(383): Homolog of NCBI NO: 15236280 NR Description: O-methyltransferase, family 2 family; protein id:
  misc_feature (2)..(383): Homolog of NCBI NO: 15236282 NR Description: O-methyltransferase, family 2 family

SEQ ID NO: 33324 - protein, 382 aa, Arabidopsis thaliana; identical to SEQ ID NO: 29734
  peptide (1)..(382): Ceres Seq. ID no. 12371999
  misc_feature (103)..(358): Pfam Name: O-methyltransferase Pfam Description: O-methyltransferase
  misc_feature (24)..(367): Homolog of NCBI NO: 33286372 NR Description: (R,S)-reticuline 7-O-methyltransferase [Papaver
  misc_feature (25)..(380): Homolog of NCBI NO: 2282586 NR Description: methyltransferase [Prunus armeniaca]
  misc_feature (24)..(380): Homolog of NCBI NO: 4574324 NR Description: caffeic acid ortho-methyltransferase [Pinus
  misc_feature (24)..(380): Homolog of NCBI NO: 7447883 NR Description: catechol O-methyltransferase homolog - Monterey
  misc_feature (24)..(380): Homolog of NCBI NO: 1777386 NR Description: caffeic acid O-methyltransferase
  misc_feature (23)..(380): Homolog of NCBI NO: 32440935 NR Description: caffeic acid O-methyltransferase [Rosa chinensis
  misc_feature (224)..(381): Homolog of NCBI NO: 33285922 NR Description: O-methyltransferase-like protein [Brassica rapa
  misc_feature (15)..(131): Homolog of NCBI NO: 15236280 NR Description: O-methyltransferase, family 2 family; protein id:
  misc_feature (166)..(382): Homolog of NCBI NO: 15236280 NR Description: O-methyltransferase, family 2 family; protein id:
  misc_feature (1)..(382): Homolog of NCBI NO: 15236282 NR Description: O-methyltransferase, family 2 family

SEQ ID NO: 33325 - protein, 368 aa, Arabidopsis thaliana; identical to SEQ ID NO: 29735
  peptide (1)..(368): Ceres Seq. ID no. 12372000
  misc_feature (89)..(344): Pfam Name: O-methyltransferase Pfam Description: O-methyltransferase
  misc_feature (10)..(353): Homolog of NCBI NO: 33286372 NR Description: (R,S)-reticuline 7-O-methyltransferase [Papaver
  misc_feature (11)..(366): Homolog of NCBI NO: 2282586 NR Description: methyltransferase [Prunus armeniaca]
  misc_feature (10)..(366): Homolog of NCBI NO: 4574324 NR Description: caffeic acid ortho-methyltransferase [Pinus
  misc_feature (10)..(366): Homolog of NCBI NO: 7447883 NR Description: catechol O-methyltransferase homolog - Monterey
  misc_feature (10)..(366): Homolog of NCBI NO: 1777386 NR Description: caffeic acid O-methyltransferase
  misc_feature (9)..(366): Homolog of NCBI NO: 32440935 NR Description: caffeic acid O-methyltransferase [Rosa chinensis
  misc_feature (210)..(367): Homolog of NCBI NO: 33285922 NR Description: O-methyltransferase-like protein [Brassica rapa
  misc_feature (1)..(117): Homolog of NCBI NO: 15236280 NR Description: O-methyltransferase, family 2 family; protein id:
  misc_feature (152)..(368): Homolog of NCBI NO: 15236280 NR Description: O-methyltransferase, family 2 family; protein id:
  misc_feature (1)..(368): Homolog of NCBI NO: 15236282 NR Description: O-methyltransferase, family 2 family

SEQ ID NO: 33326 - DNA, 1059 bp, Arabidopsis thaliana; identical to SEQ ID NO: 29736
  misc_feature (1)..(1059): Ceres Seq. ID no. 12396829
  misc_feature: MA Experiment ID: 20000180 Result: Down-regulated in Transcription
  misc_feature: MA Experiment 20000180 PARAMETER Experiment Name: At_Germinating_Seeds_P Parameter: Age (hr) Value: 24 vs. 0
  misc_feature: MA Experiment 20000180 PARAMETER Experiment Name: At_Germinating_Seeds_P Parameter: Tissue Value: Germinating Seeds
  misc_feature: MA Experiment ID: 20001557 Result: Up-regulated in Transcription
  misc_feature: MA Experiment 20001557 PARAMETER Experiment Name: At_Drought_Soil_Dry_P Parameter: Age (day) Value: 27
  misc_feature: MA Experiment 20001557 PARAMETER Experiment Name: At_Drought_Soil_Dry_P Parameter: Organism Value: A. thaliana
  misc_feature: MA Experiment 20001557 PARAMETER Experiment Name: At_Drought_Soil_Dry_P Parameter: Plant Line Value: WS
  misc_feature: MA Experiment 20001557 PARAMETER Experiment Name: At_Drought_Soil_Dry_P Parameter: Post Timepoint (hr) Value: 3
  misc_feature: MA Experiment 20001557 PARAMETER Experiment Name: At_Drought_Soil_Dry_P Parameter: Post-Treatment Value: Re-Water vs. No Drought
  misc_feature: MA Experiment 20001557 PARAMETER Experiment Name: At_Drought_Soil_Dry_P Parameter: Timepoint (day) Value: 13
  misc_feature: MA Experiment 20001557 PARAMETER Experiment Name: At_Drought_Soil_Dry_P Parameter: Treatment Value: Drought vs. No Drought
  misc_feature: MA Experiment ID: 20001558 Result: Up-regulated in Transcription
  misc_feature: MA Experiment 20001558 PARAMETER Experiment Name: At_Drought_Soil_Dry_P Parameter: Age (day) Value: 27
  misc_feature: MA Experiment 20001558 PARAMETER Experiment Name: At_Drought_Soil_Dry_P Parameter: Organism Value: A. thaliana
  misc_feature: MA Experiment 20001558 PARAMETER Experiment Name: At_Drought_Soil_Dry_P Parameter: Plant Line Value: WS
  misc_feature: MA Experiment 20001558 PARAMETER Experiment Name: At_Drought_Soil_Dry_P Parameter: Post Timepoint (hr) Value: 6
  misc_feature: MA Experiment 20001558 PARAMETER Experiment Name: At_Drought_Soil_Dry_P Parameter: Post-Treatment Value: Re-Water vs. No Drought
  misc_feature: MA Experiment 20001558 PARAMETER Experiment Name: At_Drought_Soil_Dry_P Parameter: Timepoint (day) Value: 13
  misc_feature: MA Experiment 20001558 PARAMETER Experiment Name: At_Drought_Soil_Dry_P Parameter: Treatment Value: Drought vs. No Drought

SEQ ID NO: 33327 - protein, 281 aa, Arabidopsis thaliana; identical to SEQ ID NO: 29737
  peptide (1)..(281): Ceres Seq. ID no. 12396830
  misc_feature (22)..(258): Pfam Name: Ribosomal protein S8e Pfam Description: Ribosomal protein S8e
  misc_feature (21)..(281): Homolog of NCBI NO: 31224644 NR Description: ENSANGP00000023534 [Anopheles gambiae]
  misc_feature (22)..(281): Homolog of NCBI NO: 9438133 NR Description: unknown [Ochlerotatus triseriatus]
  misc_feature (22)..(281): Homolog of NCBI NO: 12856931 NR Description: unnamed protein product [Mus musculus]
  misc_feature (22)..(281): Homolog of NCBI NO: 34924868 NR Description: TGF beta-inducible nuclear protein 1 (CDK105
  misc_feature (22)..(281): Homolog of NCBI NO: 28278483 NR Description: Similar to RIKEN cDNA 5730427N09 gene [Danio
  misc_feature (22)..(281): Homolog of NCBI NO: 34925411 NR Description: TGF beta-inducible nuclear protein 1 (L-name
  misc_feature (22)..(281): Homolog of NCBI NO: 7662677 NR Description: hypothetical protein YR-29
  misc_feature (22)..(281): Homolog of NCBI NO: 33146852 NR Description: putative TGF(transfoming growth factor) beta
  misc_feature (22)..(281): Homolog of NCBI NO: 21553587 NR Description: unknown [Arabidopsis thaliana]
  misc_feature (22)..(281): Homolog of NCBI NO: 15240023 NR Description: putative protein

SEQ ID NO: 33328 - protein, 260 aa, Arabidopsis thaliana; identical to SEQ ID NO: 29738
  peptide (1)..(260): Ceres Seq. ID no. 12396831
  misc_feature (1)..(237): Pfam Name: Ribosomal protein S8e Pfam Description: Ribosomal protein S8e
  misc_feature (1)..(260): Homolog of NCBI NO: 31224644 NR Description: ENSANGP00000023534 [Anopheles gambiae]
  misc_feature (1)..(260): Homolog of NCBI NO: 9438133 NR Description: unknown [Ochlerotatus triseriatus]
  misc_feature (1)..(260): Homolog of NCBI NO: 12856931 NR Description: unnamed protein product [Mus musculus]
  misc_feature (1)..(260): Homolog of NCBI NO: 34924868 NR Description: TGF beta-inducible nuclear protein 1 (CDK105
  misc_feature (1)..(260): Homolog of NCBI NO: 28278483 NR Description: Similar to RIKEN cDNA 5730427N09 gene [Danio
  misc_feature (1)..(260): Homolog of NCBI NO: 34925411 NR Description: TGF beta-inducible nuclear protein 1 (L-name
  misc_feature (1)..(260): Homolog of NCBI NO: 7662677 NR Description: hypothetical protein YR-29
  misc_feature (1)..(260): Homolog of NCBI NO: 33146852 NR Description: putative TGF(transfoming growth factor) beta
  misc_feature (1)..(260): Homolog of NCBI NO: 21553587 NR Description: unknown [Arabidopsis thaliana]
  misc_feature (1)..(260): Homolog of NCBI NO: 15240023 NR Description: putative protein

SEQ ID NO: 33329 - protein, 223 aa, Arabidopsis thaliana; identical to SEQ ID NO: 29739
  peptide (1)..(223): Ceres Seq. ID no. 12396832
  misc_feature (1)..(200): Pfam Name: Ribosomal protein S8e Pfam Description: Ribosomal protein S8e
  misc_feature (1)..(223): Homolog of NCBI NO: 31224644 NR Description: ENSANGP00000023534 [Anopheles gambiae]
  misc_feature (1)..(223): Homolog of NCBI NO: 9438133 NR Description: unknown [Ochlerotatus triseriatus]
  misc_feature (1)..(223): Homolog of NCBI NO: 12856931 NR Description: unnamed protein product [Mus musculus]
  misc_feature (1)..(223): Homolog of NCBI NO: 34924868 NR Description: TGF beta-inducible nuclear protein 1 (CDK105
  misc_feature (1)..(223): Homolog of NCBI NO: 28278483 NR Description: Similar to RIKEN cDNA 5730427N09 gene [Danio
  misc_feature (1)..(223): Homolog of NCBI NO: 34925411 NR Description: TGF beta-inducible nuclear protein 1 (L-name
  misc_feature (1)..(223): Homolog of NCBI NO: 7662677 NR Description: hypothetical protein YR-29
  misc_feature (1)..(223): Homolog of NCBI NO: 33146852 NR Description: putative TGF(transfoming growth factor) beta
  misc_feature (1)..(223): Homolog of NCBI NO: 21553587 NR Description: unknown [Arabidopsis thaliana]
  misc_feature (1)..(223): Homolog of NCBI NO: 15240023 NR Description: putative protein

SEQ ID NO: 33330 - DNA, 976 bp, Arabidopsis thaliana; identical to SEQ ID NO: 29740
  misc_feature (1)..(976): Ceres Seq. ID no. 12322294
  misc_feature: MA Experiment ID: 108473 Result: Down-regulated in Transcription
  misc_feature: MA Experiment 108473 PARAMETER Experiment Name: At_Drought_Flowers_cDNA_P Parameter: Timepoint (hr) Value: 7 d
  misc_feature: MA Experiment 108473 PARAMETER Experiment Name: At_Drought_Flowers_cDNA_P Parameter: Tissue Value: Flower
  misc_feature: MA Experiment 108473 PARAMETER Experiment Name: At_Drought_Flowers_cDNA_P Parameter: Treatment Value: Drought vs. No Drought
  misc_feature: MA Experiment ID: 108595 Result: Up-regulated in Transcription
  misc_feature: MA Experiment 108595 PARAMETER Experiment Name: At_Ler-pi_Ovule_cDNA_P Parameter: Plant Line Value: null
  misc_feature: MA Experiment ID: 108668 Result: Down-regulated in Transcription
  misc_feature: MA Experiment 108668 PARAMETER Experiment Name: At_2mM_SA_cDNA_P Parameter: Plant Line Value: WS
  misc_feature: MA Experiment 108668 PARAMETER Experiment Name: At_2mM_SA_cDNA_P Parameter: Timepoint (hr) Value: 6
  misc_feature: MA Experiment 108668 PARAMETER Experiment Name: At_2mM_SA_cDNA_P Parameter: Treatment Value: 2mM SA vs. No Treatment
  misc_feature: MA Experiment ID: 20000069 Result: Down-regulated in Transcription
  misc_feature: MA Experiment 20000069 PARAMETER Experiment Name: At_100uM_ABA_Mutants_cDNA_P Parameter: Plant Line Value: CS23
  misc_feature: MA Experiment 20000069 PARAMETER Experiment Name: At_100uM_ABA_Mutants_cDNA_P Parameter: Timepoint (hr) Value: 6
  misc_feature: MA Experiment 20000069 PARAMETER Experiment Name: At_100uM_ABA_Mutants_cDNA_P Parameter: Tissue Value: Aerial
  misc_feature: MA Experiment 20000069 PARAMETER Experiment Name: At_100uM_ABA_Mutants_cDNA_P Parameter: Treatment Value: 100uM ABA vs. No Treatment
  misc_feature: MA Experiment ID: 20000072 Result: Down-regulated in Transcription
  misc_feature: MA Experiment 20000072 PARAMETER Experiment Name: At_100uM_ABA_Mutants_cDNA_P Parameter: Plant Line Value: CS8105
  misc_feature: MA Experiment 20000072 PARAMETER Experiment Name: At_100uM_ABA_Mutants_cDNA_P Parameter: Timepoint (hr) Value: 6
  misc_feature: MA Experiment 20000072 PARAMETER Experiment Name: At_100uM_ABA_Mutants_cDNA_P Parameter: Tissue Value: Aerial
  misc_feature: MA Experiment 20000072 PARAMETER Experiment Name: At_100uM_ABA_Mutants_cDNA_P Parameter: Treatment Value: 100uM ABA vs. No Treatment
  misc_feature: MA Experiment ID: 20000113 Result: Down-regulated in Transcription
  misc_feature: MA Experiment 20000113 PARAMETER Experiment Name: At_42deg_Heat_cDNA_P Parameter: Temperature (deg C) Value: 42 vs. 22
  misc_feature: MA Experiment 20000113 PARAMETER Experiment Name: At_42deg_Heat_cDNA_P Parameter: Timepoint (hr) Value: 8
  misc_feature: MA Experiment 20000113 PARAMETER Experiment Name: At_42deg_Heat_cDNA_P Parameter: Tissue Value: Aerial
  misc_feature: MA Experiment ID: 20000117 Result: Down-regulated in Transcription
  misc_feature: MA Experiment 20000117 PARAMETER Experiment Name: At_100uM_ABA_Mutants_cDNA_P Parameter: Plant Line Value: Columbia
  misc_feature: MA Experiment 20000117 PARAMETER Experiment Name: At_100uM_ABA_Mutants_cDNA_P Parameter: Timepoint (hr) Value: 6
  misc_feature: MA Experiment 20000117 PARAMETER Experiment Name: At_100uM_ABA_Mutants_cDNA_P Parameter: Tissue Value: Aerial
  misc_feature: MA Experiment 20000117 PARAMETER Experiment Name: At_100uM_ABA_Mutants_cDNA_P Parameter: Treatment Value: 100uM ABA vs. No Treatment
  misc_feature: MA Experiment ID: 20000180 Result: Up-regulated in Transcription
  misc_feature: MA Experiment 20000180 PARAMETER Experiment Name: At_Germinating_Seeds_P Parameter: Age (hr) Value: 24 vs. 0
  misc_feature: MA Experiment 20000180 PARAMETER Experiment Name: At_Germinating_Seeds_P Parameter: Tissue Value: Germinating Seeds
  misc_feature: MA Experiment ID: 20000184 Result: Down-regulated in Transcription
  misc_feature: MA Experiment 20000184 PARAMETER Experiment Name: At_Shoots__P Parameter: Age (day) Value: 7
  misc_feature: MA Experiment 20000184 PARAMETER Experiment Name: At_Shoots__P Parameter: Tissue Value: Shoots vs. Whole Plant
  misc_feature: MA Experiment ID: 20000185 Result: Down-regulated in Transcription
  misc_feature: MA Experiment 20000185 PARAMETER Experiment Name: At_Roots__P Parameter: Age (day) Value: 7 vs. 21
  misc_feature: MA Experiment 20000185 PARAMETER Experiment Name: At_Roots__P Parameter: Organism Value: A. thaliana
  misc_feature: MA Experiment 20000185 PARAMETER Experiment Name: At_Roots__P Parameter: Tissue Value: Roots vs. Whole Plant
  misc_feature: MA Experiment ID: 20000264 Result: Down-regulated in Transcription
  misc_feature: MA Experiment 20000264 PARAMETER Experiment Name: At_Open_Flower_P Parameter: Age (day) Value: 21
  misc_feature: MA Experiment 20000264 PARAMETER Experiment Name: At_Open_Flower_P Parameter: Plant Line Value: WS
  misc_feature: MA Experiment 20000264 PARAMETER Experiment Name: At_Open_Flower_P Parameter: Tissue Value: Open Flower vs. Whole Plant
  misc_feature: MA Experiment ID: 20000265 Result: Down-regulated in Transcription
  misc_feature: MA Experiment 20000265 PARAMETER Experiment Name: At_Open_Flower_P Parameter: Age (day) Value: 21
  misc_feature: MA Experiment 20000265 PARAMETER Experiment Name: At_Open_Flower_P Parameter: Plant Line Value: WS
  misc_feature: MA Experiment 20000265 PARAMETER Experiment Name: At_Open_Flower_P Parameter: Tissue Value: Closed Flower vs. Whole Plant
  misc_feature: MA Experiment ID: 20000286 Result: Down-regulated in Transcription
  misc_feature: MA Experiment 20000286 PARAMETER Experiment Name: At_Open_Flower_P Parameter: Age (day) Value: 21
  misc_feature: MA Experiment 20000286 PARAMETER Experiment Name: At_Open_Flower_P Parameter: Plant Line Value: WS
  misc_feature: MA Experiment 20000286 PARAMETER Experiment Name: At_Open_Flower_P Parameter: Tissue Value: Half Open vs. Whole Plant
  misc_feature: MA Experiment ID: 20000438 Result: Down-regulated in Transcription
  misc_feature: MA Experiment 20000438 PARAMETER Experiment Name: At_Shoots__P Parameter: Age (day) Value: 14
  misc_feature: MA Experiment 20000438 PARAMETER Experiment Name: At_Shoots__P Parameter: Tissue Value: Shoots vs. Whole Plant
  misc_feature: MA Experiment ID: 20000439 Result: Down-regulated in Transcription
  misc_feature: MA Experiment 20000439 PARAMETER Experiment Name: At_Roots__P Parameter: Age (day) Value: 14 vs. 21
  misc_feature: MA Experiment 20000439 PARAMETER Experiment Name: At_Roots__P Parameter: Organism Value: A. thaliana
  misc_feature: MA Experiment 20000439 PARAMETER Experiment Name: At_Roots__P Parameter: Tissue Value: Roots vs. Whole Plant
  misc_feature: MA Experiment ID: 20000495 Result: Up-regulated in Transcription
  misc_feature: MA Experiment 20000495 PARAMETER Experiment Name: At_Guard_Cells_P Parameter: Harvest Date Value: 8/2/2002
  misc_feature: MA Experiment 20000495 PARAMETER Experiment Name: At_Guard_Cells_P Parameter: Organism Value: A. thaliana
  misc_feature: MA Experiment 20000495 PARAMETER Experiment Name: At_Guard_Cells_P Parameter: Tissue Value: Guard Cells vs. Leaves
  misc_feature: MA Experiment ID: 20000527 Result: Down-regulated in Transcription
  misc_feature: MA Experiment 20000527 PARAMETER Experiment Name: At_10percent_PEG_P Parameter: Age (day) Value: 20
  misc_feature: MA Experiment 20000527 PARAMETER Experiment Name: At_10percent_PEG_P Parameter: Organism Value: A. thaliana
  misc_feature: MA Experiment 20000527 PARAMETER Experiment Name: At_10percent_PEG_P Parameter: Plant Line Value: WS
  misc_feature: MA Experiment 20000527 PARAMETER Experiment Name: At_10percent_PEG_P Parameter: Timepoint (day) Value: 20
  misc_feature: MA Experiment 20000527 PARAMETER Experiment Name: At_10percent_PEG_P Parameter: Tissue Value: Whole Plant
  misc_feature: MA Experiment 20000527 PARAMETER Experiment Name: At_10percent_PEG_P Parameter: Treatment Value: 10percent PEG vs. No Treatment
  misc_feature: MA Experiment ID: 20000794 Result: Down-regulated in Transcription
  misc_feature: MA Experiment 20000794 PARAMETER Experiment Name: At_Petals_P Parameter: Age (day) Value: 23-25 days
  misc_feature: MA Experiment 20000794 PARAMETER Experiment Name: At_Petals_P Parameter: Plant Line Value: WS
  misc_feature: MA Experiment 20000794 PARAMETER Experiment Name: At_Petals_P Parameter: Tissue Value: Petals vs. Whole plant
  misc_feature: MA Experiment ID: 20001555 Result: Down-regulated in Transcription
  misc_feature: MA Experiment 20001555 PARAMETER Experiment Name: At_Drought_Soil_Dry_P Parameter: Age (day) Value: 24
  misc_feature: MA Experiment 20001555 PARAMETER Experiment Name: At_Drought_Soil_Dry_P Parameter: Organism Value: A. thaliana
  misc_feature: MA Experiment 20001555 PARAMETER Experiment Name: At_Drought_Soil_Dry_P Parameter: Plant Line Value: WS
  misc_feature: MA Experiment 20001555 PARAMETER Experiment Name: At_Drought_Soil_Dry_P Parameter: Post Timepoint (hr) Value: None
  misc_feature: MA Experiment 20001555 PARAMETER Experiment Name: At_Drought_Soil_Dry_P Parameter: Post-Treatment Value: None
  misc_feature: MA Experiment 20001555 PARAMETER Experiment Name: At_Drought_Soil_Dry_P Parameter: Timepoint (day) Value: 10
  misc_feature: MA Experiment 20001555 PARAMETER Experiment Name: At_Drought_Soil_Dry_P Parameter: Treatment Value: Drought vs. No Drought
  misc_feature: MA Experiment ID: 20001556 Result: Down-regulated in Transcription
  misc_feature: MA Experiment 20001556 PARAMETER Experiment Name: At_Drought_Soil_Dry_P Parameter: Age (day) Value: 26
  misc_feature: MA Experiment 20001556 PARAMETER Experiment Name: At_Drought_Soil_Dry_P Parameter: Organism Value: A. thaliana
  misc_feature: MA Experiment 20001556 PARAMETER Experiment Name: At_Drought_Soil_Dry_P Parameter: Plant Line Value: WS
  misc_feature: MA Experiment 20001556 PARAMETER Experiment Name: At_Drought_Soil_Dry_P Parameter: Post Timepoint (hr) Value: None
  misc_feature: MA Experiment 20001556 PARAMETER Experiment Name: At_Drought_Soil_Dry_P Parameter: Post-Treatment Value: None
  misc_feature: MA Experiment 20001556 PARAMETER Experiment Name: At_Drought_Soil_Dry_P Parameter: Timepoint (day) Value: 12
  misc_feature: MA Experiment 20001556 PARAMETER Experiment Name: At_Drought_Soil_Dry_P Parameter: Treatment Value: Drought vs. No Drought
  misc_feature: MA Experiment ID: 20001558 Result: Down-regulated in Transcription
  misc_feature: MA Experiment 20001558 PARAMETER Experiment Name: At_Drought_Soil_Dry_P Parameter: Age (day) Value: 27
  misc_feature: MA Experiment 20001558 PARAMETER Experiment Name: At_Drought_Soil_Dry_P Parameter: Organism Value: A. thaliana
  misc_feature: MA Experiment 20001558 PARAMETER Experiment Name: At_Drought_Soil_Dry_P Parameter: Plant Line Value: WS
  misc_feature: MA Experiment 20001558 PARAMETER Experiment Name: At_Drought_Soil_Dry_P Parameter: Post Timepoint (hr) Value: 6
  misc_feature: MA Experiment 20001558 PARAMETER Experiment Name: At_Drought_Soil_Dry_P Parameter: Post-Treatment Value: Re-Water vs. No Drought
  misc_feature: MA Experiment 20001558 PARAMETER Experiment Name: At_Drought_Soil_Dry_P Parameter: Timepoint (day) Value: 13
  misc_feature: MA Experiment 20001558 PARAMETER Experiment Name: At_Drought_Soil_Dry_P Parameter: Treatment Value: Drought vs. No Drought
  misc_feature: MA Experiment ID: 20001559 Result: Down-regulated in Transcription
  misc_feature: MA Experiment 20001559 PARAMETER Experiment Name: At_Drought_Soil_Dry_P Parameter: Age (day) Value: 28
  misc_feature: MA Experiment 20001559 PARAMETER Experiment Name: At_Drought_Soil_Dry_P Parameter: Organism Value: A. thaliana
  misc_feature: MA Experiment 20001559 PARAMETER Experiment Name: At_Drought_Soil_Dry_P Parameter: Plant Line Value: WS
  misc_feature: MA Experiment 20001559 PARAMETER Experiment Name: At_Drought_Soil_Dry_P Parameter: Post Timepoint (hr) Value: 29
  misc_feature: MA Experiment 20001559 PARAMETER Experiment Name: At_Drought_Soil_Dry_P Parameter: Post-Treatment Value: Re-Water vs. No Drought
  misc_feature: MA Experiment 20001559 PARAMETER Experiment Name: At_Drought_Soil_Dry_P Parameter: Timepoint (day) Value: 14
  misc_feature: MA Experiment 20001559 PARAMETER Experiment Name: At_Drought_Soil_Dry_P Parameter: Treatment Value: Drought vs. No Drought
  misc_feature: MA Experiment ID: 20001768 Result: Up-regulated in Transcription
  misc_feature: MA Experiment 20001768 PARAMETER Experiment Name: At_Far-red-enriched-adult_P Parameter: Age (day) Value: 28
  misc_feature: MA Experiment 20001768 PARAMETER Experiment Name: At_Far-red-enriched-adult_P Parameter: Light Value: Far-red enriched vs. White
  misc_feature: MA Experiment 20001768 PARAMETER Experiment Name: At_Far-red-enriched-adult_P Parameter: Organism Value: A. thaliana
  misc_feature: MA Experiment 20001768 PARAMETER Experiment Name: At_Far-red-enriched-adult_P Parameter: Plant Line Value: Columbia
  misc_feature: MA Experiment 20001768 PARAMETER Experiment Name: At_Far-red-enriched-adult_P Parameter: Timepoint (hr) Value: 1
  misc_feature: MA Experiment 20001768 PARAMETER Experiment Name: At_Far-red-enriched-adult_P Parameter: Tissue Value: Aerial
  misc_feature: MA Experiment ID: 20001771 Result: Up-regulated in Transcription
  misc_feature: MA Experiment 20001771 PARAMETER Experiment Name: At_Far-red-enriched-adult_P Parameter: Age (day) Value: 28
  misc_feature: MA Experiment 20001771 PARAMETER Experiment Name: At_Far-red-enriched-adult_P Parameter: Light Value: Far-red enriched vs. White
  misc_feature: MA Experiment 20001771 PARAMETER Experiment Name: At_Far-red-enriched-adult_P Parameter: Organism Value: A. thaliana
  misc_feature: MA Experiment 20001771 PARAMETER Experiment Name: At_Far-red-enriched-adult_P Parameter: Plant Line Value: Columbia
  misc_feature: MA Experiment 20001771 PARAMETER Experiment Name: At_Far-red-enriched-adult_P Parameter: Timepoint (hr) Value: 16
  misc_feature: MA Experiment 20001771 PARAMETER Experiment Name: At_Far-red-enriched-adult_P Parameter: Tissue Value: Aerial
  misc_feature: MA Experiment ID: 20001773 Result: Up-regulated in Transcription
  misc_feature: MA Experiment 20001773 PARAMETER Experiment Name: At_Far-red-enriched-adult_P Parameter: Age (day) Value: 30
  misc_feature: MA Experiment 20001773 PARAMETER Experiment Name: At_Far-red-enriched-adult_P Parameter: Light Value: Far-red enriched vs. White
  misc_feature: MA Experiment 20001773 PARAMETER Experiment Name: At_Far-red-enriched-adult_P Parameter: Organism Value: A. thaliana
  misc_feature: MA Experiment 20001773 PARAMETER Experiment Name: At_Far-red-enriched-adult_P Parameter: Plant Line Value: Columbia
  misc_feature: MA Experiment 20001773 PARAMETER Experiment Name: At_Far-red-enriched-adult_P Parameter: Timepoint (hr) Value: 48
  misc_feature: MA Experiment 20001773 PARAMETER Experiment Name: At_Far-red-enriched-adult_P Parameter: Tissue Value: Aerial
  misc_feature: MA Experiment ID: 20001906 Result: Down-regulated in Transcription
  misc_feature: MA Experiment 20001906 PARAMETER Experiment Name: At_Drought_Reproduction_P Parameter: Age (day) Value: 35
  misc_feature: MA Experiment 20001906 PARAMETER Experiment Name: At_Drought_Reproduction_P Parameter: Organism Value: A. thaliana
  misc_feature: MA Experiment 20001906 PARAMETER Experiment Name: At_Drought_Reproduction_P Parameter: Plant Line Value: WS
  misc_feature: MA Experiment 20001906 PARAMETER Experiment Name: At_Drought_Reproduction_P Parameter: Timepoint (day) Value: 5
  misc_feature: MA Experiment 20001906 PARAMETER Experiment Name: At_Drought_Reproduction_P Parameter: Tissue Value: Siliques
  misc_feature: MA Experiment 20001906 PARAMETER Experiment Name: At_Drought_Reproduction_P Parameter: Treatment Value: Drought vs. No Drought

SEQ ID NO: 33331 - protein, 251 aa, Arabidopsis thaliana; identical to SEQ ID NO: 29741
  peptide (1)..(251): Ceres Seq. ID no. 12322295
  misc_feature (49)..(195): Pfam Name: Fasciclin domain Pfam Description: Fasciclin domain
  misc_feature (24)..(217): Homolog of NCBI NO: 34910950 NR Description: putative arabinogalactan-like protein
  misc_feature (28)..(237): Homolog of NCBI NO: 2129473 NR Description: arabinogalactan-like protein - loblolly pine
  misc_feature (31)..(230): Homolog of NCBI NO: 34896012 NR Description: EST D25138(R3286) corresponds to a region of the gene.~Similar to Pinus taeda arabinogalactan-like protein
  misc_feature (21)..(231): Homolog of NCBI NO: 15242651 NR Description: fasciclin-like arabinogalactan-protein (FLA11)
  misc_feature (21)..(231): Homolog of NCBI NO: 21553523 NR Description: arabinogalactan protein-like [Arabidopsis
  misc_feature (24)..(231): Homolog of NCBI NO: 5919185 NR Description: arabinogalactan protein Pop14A9 [Populus x
  misc_feature (13)..(231): Homolog of NCBI NO: 30841338 NR Description: arabinogalactan protein [Gossypium hirsutum]
  misc_feature (13)..(251): Homolog of NCBI NO: 15294288 NR Description: AT5g60490/muf9_140 [Arabidopsis thaliana]
  misc_feature (13)..(250): Homolog of NCBI NO: 21553590 NR Description: arabinogalactan protein-like [Arabidopsis
  misc_feature (13)..(250): Homolog of NCBI NO: 15239344 NR Description: fasciclin-like arabinogalactan-protein (FLA12)

SEQ ID NO: 33332 - protein, 239 aa, Arabidopsis thaliana; identical to SEQ ID NO: 29742
  peptide (1)..(239): Ceres Seq. ID no. 12322296
  misc_feature (37)..(183): Pfam Name: Fasciclin domain Pfam Description: Fasciclin domain
  misc_feature (12)..(205): Homolog of NCBI NO: 34910950 NR Description: putative arabinogalactan-like protein
  misc_feature (16)..(225): Homolog of NCBI NO: 2129473 NR Description: arabinogalactan-like protein - loblolly pine
  misc_feature (19)..(218): Homolog of NCBI NO: 34896012 NR Description: EST D25138(R3286) corresponds to a region of the gene.~Similar to Pinus taeda arabinogalactan-like protein
  misc_feature (9)..(219): Homolog of NCBI NO: 15242651 NR Description: fasciclin-like arabinogalactan-protein (FLA11)
  misc_feature (9)..(219): Homolog of NCBI NO: 21553523 NR Description: arabinogalactan protein-like [Arabidopsis
  misc_feature (12)..(219): Homolog of NCBI NO: 5919185 NR Description: arabinogalactan protein Pop14A9 [Populus x
  misc_feature (1)..(219): Homolog of NCBI NO: 30841338 NR Description: arabinogalactan protein [Gossypium hirsutum]
  misc_feature (1)..(239): Homolog of NCBI NO: 15294288 NR Description: AT5g60490/muf9_140 [Arabidopsis thaliana]
  misc_feature (1)..(238): Homolog of NCBI NO: 21553590 NR Description: arabinogalactan protein-like [Arabidopsis
  misc_feature (1)..(238): Homolog of NCBI NO: 15239344 NR Description: fasciclin-like arabinogalactan-protein (FLA12)

SEQ ID NO: 33333 - DNA, 1153 bp, Arabidopsis thaliana; identical to SEQ ID NO: 29743
  misc_feature (1)..(1153): Ceres Seq. ID no. 13497626
  misc_feature: MA Experiment ID: 108464 Result: Down-regulated in Transcription
  misc_feature: MA Experiment 108464 PARAMETER Experiment Name: At_Germinating_Seeds_cDNA_P Parameter: Age (day) Value: 4 vs. 0
  misc_feature: MA Experiment 108464 PARAMETER Experiment Name: At_Germinating_Seeds_cDNA_P Parameter: Tissue Value: Germinating Seeds
  misc_feature: MA Experiment ID: 108595 Result: Up-regulated in Transcription
  misc_feature: MA Experiment 108595 PARAMETER Experiment Name: At_Ler-pi_Ovule_cDNA_P Parameter: Plant Line Value: null
  misc_feature: MA Experiment ID: 20000112 Result: Up-regulated in Transcription
  misc_feature: MA Experiment 20000112 PARAMETER Experiment Name: At_42deg_Heat_cDNA_P Parameter: Temperature (deg C) Value: 42 vs. 22
  misc_feature: MA Experiment 20000112 PARAMETER Experiment Name: At_42deg_Heat_cDNA_P Parameter: Timepoint (hr) Value: 2
  misc_feature: MA Experiment 20000112 PARAMETER Experiment Name: At_42deg_Heat_cDNA_P Parameter: Tissue Value: Aerial
  misc_feature: MA Experiment ID: 20000235 Result: Down-regulated in Transcription
  misc_feature: MA Experiment 20000235 PARAMETER Experiment Name: At_Siliques_P Parameter: Age (day) Value: 21
  misc_feature: MA Experiment 20000235 PARAMETER Experiment Name: At_Siliques_P Parameter: Organism Value: A. thaliana
  misc_feature: MA Experiment 20000235 PARAMETER Experiment Name: At_Siliques_P Parameter: Plant Line Value: WS
  misc_feature: MA Experiment 20000235 PARAMETER Experiment Name: At_Siliques_P Parameter: Tissue Value: 5-10mm Siliques vs. Whole Plant

SEQ ID NO: 33334 - protein, 293 aa, Arabidopsis thaliana; identical to SEQ ID NO: 29744
  peptide (1)..(293): Ceres Seq. ID no. 13497627
  misc_feature (61)..(263): Homolog of NCBI NO: 15226471 NR Description: expressed protein [Arabidopsis thaliana]
  misc_feature (79)..(285): Homolog of NCBI NO: 34902536 NR Description: P0581F09.27 [Oryza sativa (japonica
  misc_feature (66)..(285): Homolog of NCBI NO: 15228678 NR Description: expressed protein [Arabidopsis thaliana]
  misc_feature (45)..(262): Homolog of NCBI NO: 25334719 NR Description: hypothetical protein AT4g01670 [imported] -
  misc_feature (45)..(293): Homolog of NCBI NO: 30678941 NR Description: expressed protein [Arabidopsis thaliana]

SEQ ID NO: 33335 - protein, 249 aa, Arabidopsis thaliana; identical to SEQ ID NO: 29745
  peptide (1)..(249): Ceres Seq. ID no. 13497628
  misc_feature (17)..(219): Homolog of NCBI NO: 15226471 NR Description: expressed protein [Arabidopsis thaliana]
  misc_feature (35)..(241): Homolog of NCBI NO: 34902536 NR Description: P0581F09.27 [Oryza sativa (japonica
  misc_feature (22)..(241): Homolog of NCBI NO: 15228678 NR Description: expressed protein [Arabidopsis thaliana]
  misc_feature (1)..(218): Homolog of NCBI NO: 25334719 NR Description: hypothetical protein AT4g01670 [imported] -
  misc_feature (1)..(249): Homolog of NCBI NO: 30678941 NR Description: expressed protein [Arabidopsis thaliana]

SEQ ID NO: 33336 - protein, 243 aa, Arabidopsis thaliana; identical to SEQ ID NO: 29746
  peptide (1)..(243): Ceres Seq. ID no. 13497629
  misc_feature (11)..(213): Homolog of NCBI NO: 15226471 NR Description: expressed protein [Arabidopsis thaliana]
  misc_feature (29)..(235): Homolog of NCBI NO: 34902536 NR Description: P0581F09.27 [Oryza sativa (japonica
  misc_feature (16)..(235): Homolog of NCBI NO: 15228678 NR Description: expressed protein [Arabidopsis thaliana]
  misc_feature (1)..(212): Homolog of NCBI NO: 25334719 NR Description: hypothetical protein AT4g01670 [imported] -
  misc_feature (1)..(243): Homolog of NCBI NO: 30678941 NR Description: expressed protein [Arabidopsis thaliana]

SEQ ID NO: 33337 - DNA, 946 bp, Arabidopsis thaliana; identical to SEQ ID NO: 26202
  misc_feature (1)..(946): Ceres Seq. ID no. 13487250
  misc_feature: MA Experiment ID: 108434 Result: Up-regulated in Transcription
  misc_feature: MA Experiment 108434 PARAMETER Experiment Name: At_Root_Tips_cDNA_P Parameter: Tissue Value: Root Tips
  misc_feature: MA Experiment ID: 108461 Result: Up-regulated in Transcription
  misc_feature: MA Experiment 108461 PARAMETER Experiment Name: At_Germinating_Seeds_cDNA_P Parameter: Age (day) Value: 1 vs. 0
  misc_feature: MA Experiment 108461 PARAMETER Experiment Name: At_Germinating_Seeds_cDNA_P Parameter: Tissue Value: Germinating Seeds
  misc_feature: MA Experiment ID: 108488 Result: Up-regulated in Transcription
  misc_feature: MA Experiment ID: 20000069 Result: Up-regulated in Transcription
  misc_feature: MA Experiment 20000069 PARAMETER Experiment Name: At_100uM_ABA_Mutants_cDNA_P Parameter: Plant Line Value: CS23
  misc_feature: MA Experiment 20000069 PARAMETER Experiment Name: At_100uM_ABA_Mutants_cDNA_P Parameter: Timepoint (hr) Value: 6
  misc_feature: MA Experiment 20000069 PARAMETER Experiment Name: At_100uM_ABA_Mutants_cDNA_P Parameter: Tissue Value: Aerial
  misc_feature: MA Experiment 20000069 PARAMETER Experiment Name: At_100uM_ABA_Mutants_cDNA_P Parameter: Treatment Value: 100uM ABA vs. No Treatment
  misc_feature: MA Experiment ID: 20000072 Result: Up-regulated in Transcription
  misc_feature: MA Experiment 20000072 PARAMETER Experiment Name: At_100uM_ABA_Mutants_cDNA_P Parameter: Plant Line Value: CS8105
  misc_feature: MA Experiment 20000072 PARAMETER Experiment Name: At_100uM_ABA_Mutants_cDNA_P Parameter: Timepoint (hr) Value: 6
  misc_feature: MA Experiment 20000072 PARAMETER Experiment Name: At_100uM_ABA_Mutants_cDNA_P Parameter: Tissue Value: Aerial
  misc_feature: MA Experiment 20000072 PARAMETER Experiment Name: At_100uM_ABA_Mutants_cDNA_P Parameter: Treatment Value: 100uM ABA vs. No Treatment
  misc_feature: MA Experiment ID: 20000086 Result: Up-regulated in Transcription
  misc_feature: MA Experiment 20000086 PARAMETER Experiment Name: At_100uM_ABA_Mutants_cDNA_P Parameter: Plant Line Value: CS22
  misc_feature: MA Experiment 20000086 PARAMETER Experiment Name: At_100uM_ABA_Mutants_cDNA_P Parameter: Timepoint (hr) Value: 6
  misc_feature: MA Experiment 20000086 PARAMETER Experiment Name: At_100uM_ABA_Mutants_cDNA_P Parameter: Tissue Value: Aerial
  misc_feature: MA Experiment 20000086 PARAMETER Experiment Name: At_100uM_ABA_Mutants_cDNA_P Parameter: Treatment Value: 100uM ABA vs. No Treatment
  misc_feature: MA Experiment ID: 20000087 Result: Up-regulated in Transcription
  misc_feature: MA Experiment 20000087 PARAMETER Experiment Name: At_100uM_ABA_Mutants_cDNA_P Parameter: Plant Line Value: WS
  misc_feature: MA Experiment 20000087 PARAMETER Experiment Name: At_100uM_ABA_Mutants_cDNA_P Parameter: Timepoint (hr) Value: 6
  misc_feature: MA Experiment 20000087 PARAMETER Experiment Name: At_100uM_ABA_Mutants_cDNA_P Parameter: Tissue Value: Aerial
  misc_feature: MA Experiment 20000087 PARAMETER Experiment Name: At_100uM_ABA_Mutants_cDNA_P Parameter: Treatment Value: 100uM ABA vs. No Treatment
  misc_feature: MA Experiment ID: 20000089 Result: Up-regulated in Transcription
  misc_feature: MA Experiment ID: 20000090 Result: Up-regulated in Transcription
  misc_feature: MA Experiment ID: 20000117 Result: Up-regulated in Transcription
  misc_feature: MA Experiment 20000117 PARAMETER Experiment Name: At_100uM_ABA_Mutants_cDNA_P Parameter: Plant Line Value: Columbia
  misc_feature: MA Experiment 20000117 PARAMETER Experiment Name: At_100uM_ABA_Mutants_cDNA_P Parameter: Timepoint (hr) Value: 6
  misc_feature: MA Experiment 20000117 PARAMETER Experiment Name: At_100uM_ABA_Mutants_cDNA_P Parameter: Tissue Value: Aerial
  misc_feature: MA Experiment 20000117 PARAMETER Experiment Name: At_100uM_ABA_Mutants_cDNA_P Parameter: Treatment Value: 100uM ABA vs. No Treatment
  misc_feature: MA Experiment ID: 20000173 Result: Down-regulated in Transcription
  misc_feature: MA Experiment 20000173 PARAMETER Experiment Name: At_42deg_Heat_P Parameter: Age (day) Value: 14
  misc_feature: MA Experiment 20000173 PARAMETER Experiment Name: At_42deg_Heat_P Parameter: Organism Value: A. thaliana
  misc_feature: MA Experiment 20000173 PARAMETER Experiment Name: At_42deg_Heat_P Parameter: Plant Line Value: WS
  misc_feature: MA Experiment 20000173 PARAMETER Experiment Name: At_42deg_Heat_P Parameter: Temperature (deg C) Value: 42 vs. 22
  misc_feature: MA Experiment 20000173 PARAMETER Experiment Name: At_42deg_Heat_P Parameter: Timepoint (hr) Value: 6
  misc_feature: MA Experiment 20000173 PARAMETER Experiment Name: At_42deg_Heat_P Parameter: Tissue Value: Aerial
  misc_feature: MA Experiment ID: 20000439 Result: Up-regulated in Transcription
  misc_feature: MA Experiment 20000439 PARAMETER Experiment Name: At_Roots__P Parameter: Age (day) Value: 14 vs. 21
  misc_feature: MA Experiment 20000439 PARAMETER Experiment Name: At_Roots__P Parameter: Organism Value: A. thaliana
  misc_feature: MA Experiment 20000439 PARAMETER Experiment Name: At_Roots__P Parameter: Tissue Value: Roots vs. Whole Plant
  misc_feature: MA Experiment ID: 20000794 Result: Down-regulated in Transcription
  misc_feature: MA Experiment 20000794 PARAMETER Experiment Name: At_Petals_P Parameter: Age (day) Value: 23-25 days
  misc_feature: MA Experiment 20000794 PARAMETER Experiment Name: At_Petals_P Parameter: Plant Line Value: WS
  misc_feature: MA Experiment 20000794 PARAMETER Experiment Name: At_Petals_P Parameter: Tissue Value: Petals vs. Whole plant
  misc_feature: MA Experiment ID: 20001905 Result: Down-regulated in Transcription
  misc_feature: MA Experiment 20001905 PARAMETER Experiment Name: At_Drought_Reproduction_P Parameter: Age (day) Value: 40
  misc_feature: MA Experiment 20001905 PARAMETER Experiment Name: At_Drought_Reproduction_P Parameter: Organism Value: A. thaliana
  misc_feature: MA Experiment 20001905 PARAMETER Experiment Name: At_Drought_Reproduction_P Parameter: Plant Line Value: WS
  misc_feature: MA Experiment 20001905 PARAMETER Experiment Name: At_Drought_Reproduction_P Parameter: Timepoint (day) Value: 10
  misc_feature: MA Experiment 20001905 PARAMETER Experiment Name: At_Drought_Reproduction_P Parameter: Tissue Value: Rosettes
  misc_feature: MA Experiment 20001905 PARAMETER Experiment Name: At_Drought_Reproduction_P Parameter: Treatment Value: Drought vs. No Drought
  misc_feature: MA Experiment ID: 20001911 Result: Down-regulated in Transcription
  misc_feature: MA Experiment 20001911 PARAMETER Experiment Name: At_Drought_Reproduction_P Parameter: Age (day) Value: 40
  misc_feature: MA Experiment 20001911 PARAMETER Experiment Name: At_Drought_Reproduction_P Parameter: Organism Value: A. thaliana
  misc_feature: MA Experiment 20001911 PARAMETER Experiment Name: At_Drought_Reproduction_P Parameter: Plant Line Value: WS
  misc_feature: MA Experiment 20001911 PARAMETER Experiment Name: At_Drought_Reproduction_P Parameter: Timepoint (day) Value: 10
  misc_feature: MA Experiment 20001911 PARAMETER Experiment Name: At_Drought_Reproduction_P Parameter: Tissue Value: Flowers
  misc_feature: MA Experiment 20001911 PARAMETER Experiment Name: At_Drought_Reproduction_P Parameter: Treatment Value: Drought vs. No Drought

SEQ ID NO: 33338 - protein, 223 aa, Arabidopsis thaliana; identical to SEQ ID NO: 26203
  peptide (1)..(223): Ceres Seq. ID no. 13487251
  misc_feature (20)..(214): Pfam Name: Emopamil binding protein Pfam Description: Emopamil binding protein
  misc_feature (20)..(214): Pfam Name: Emopamil binding protein Pfam Description: Emopamil binding protein
  misc_feature (6)..(221): Homolog of NCBI NO: 5729810 NR Description: emopamil binding protein (sterol isomerase)
  misc_feature (6)..(195): Homolog of NCBI NO: 12848900 NR Description: unnamed protein product [Mus musculus]
  misc_feature (6)..(220): Homolog of NCBI NO: 18202586 NR Description: 3-beta-hydroxysteroid-delta(8),delta(7)-isomerase delta-isomerase) (Delta8-delta7 sterol isomerase) (D8-D7 sterol
  misc_feature (6)..(221): Homolog of NCBI NO: 6681255 NR Description: phenylalkylamine Ca2+ antagonist (emopamil)
  misc_feature (1)..(221): Homolog of NCBI NO: 16923992 NR Description: phenylalkylamine Ca2+ antagonist (emopamil)
  misc_feature (6)..(221): Homolog of NCBI NO: 5729810 NR Description: emopamil binding protein (sterol isomerase)
  misc_feature (6)..(220): Homolog of NCBI NO: 18202586 NR Description: 3-beta-hydroxysteroid-delta(8),delta(7)-isomerase delta-isomerase) (Delta8-delta7 sterol isomerase) (D8-D7 sterol
  misc_feature (1)..(221): Homolog of NCBI NO: 16923992 NR Description: phenylalkylamine Ca2+ antagonist (emopamil)
  misc_feature (1)..(223): Homolog of NCBI NO: 21554213 NR Description: C-8,7 sterol isomerase [Arabidopsis thaliana]
  misc_feature (1)..(223): Homolog of NCBI NO: 15223758 NR Description: C-8,7 sterol isomerase [Arabidopsis thaliana]
  misc_feature (1)..(223): Homolog of NCBI NO: 4098989 NR Description: phenylalkylamine binding protein homolog
  misc_feature (6)..(217): Homolog of NCBI NO: 34894044 NR Description: putative C-8,7 sterol isomerase
  misc_feature (6)..(221): Homolog of NCBI NO: 33417065 NR Description: Unknown (protein for MGC:68833) [Xenopus laevis]
  misc_feature (6)..(221): Homolog of NCBI NO: 6681255 NR Description: phenylalkylamine Ca2+ antagonist (emopamil)
  misc_feature (6)..(195): Homolog of NCBI NO: 12848900 NR Description: unnamed protein product [Mus musculus]
  misc_feature (6)..(221): Homolog of NCBI NO: 33417065 NR Description: Unknown (protein for MGC:68833) [Xenopus laevis]
  misc_feature (6)..(217): Homolog of NCBI NO: 34894044 NR Description: putative C-8,7 sterol isomerase
  misc_feature (1)..(223): Homolog of NCBI NO: 4098989 NR Description: phenylalkylamine binding protein homolog
  misc_feature (1)..(223): Homolog of NCBI NO: 15223758 NR Description: C-8,7 sterol isomerase [Arabidopsis thaliana]
  misc_feature (1)..(223): Homolog of NCBI NO: 21554213 NR Description: C-8,7 sterol isomerase [Arabidopsis thaliana]

SEQ ID NO: 33339 - protein, 201 aa, Arabidopsis thaliana; identical to SEQ ID NO: 26204
  peptide (1)..(201): Ceres Seq. ID no. 13487252
  misc_feature (1)..(192): Pfam Name: Emopamil binding protein Pfam Description: Emopamil binding protein
  misc_feature (1)..(192): Pfam Name: Emopamil binding protein Pfam Description: Emopamil binding protein
  misc_feature (1)..(199): Homolog of NCBI NO: 5729810 NR Description: emopamil binding protein (sterol isomerase)
  misc_feature (1)..(173): Homolog of NCBI NO: 12848900 NR Description: unnamed protein product [Mus musculus]
  misc_feature (1)..(198): Homolog of NCBI NO: 18202586 NR Description: 3-beta-hydroxysteroid-delta(8),delta(7)-isomerase delta-isomerase) (Delta8-delta7 sterol isomerase) (D8-D7 sterol
  misc_feature (1)..(199): Homolog of NCBI NO: 6681255 NR Description: phenylalkylamine Ca2+ antagonist (emopamil)
  misc_feature (1)..(199): Homolog of NCBI NO: 16923992 NR Description: phenylalkylamine Ca2+ antagonist (emopamil)
  misc_feature (1)..(199): Homolog of NCBI NO: 5729810 NR Description: emopamil binding protein (sterol isomerase)
  misc_feature (1)..(198): Homolog of NCBI NO: 18202586 NR Description: 3-beta-hydroxysteroid-delta(8),delta(7)-isomerase delta-isomerase) (Delta8-delta7 sterol isomerase) (D8-D7 sterol
  misc_feature (1)..(199): Homolog of NCBI NO: 16923992 NR Description: phenylalkylamine Ca2+ antagonist (emopamil)
  misc_feature (1)..(201): Homolog of NCBI NO: 21554213 NR Description: C-8,7 sterol isomerase [Arabidopsis thaliana]
  misc_feature (1)..(201): Homolog of NCBI NO: 15223758 NR Description: C-8,7 sterol isomerase [Arabidopsis thaliana]
  misc_feature (1)..(201): Homolog of NCBI NO: 4098989 NR Description: phenylalkylamine binding protein homolog
  misc_feature (1)..(195): Homolog of NCBI NO: 34894044 NR Description: putative C-8,7 sterol isomerase
  misc_feature (1)..(199): Homolog of NCBI NO: 33417065 NR Description: Unknown (protein for MGC:68833) [Xenopus laevis]
  misc_feature (1)..(199): Homolog of NCBI NO: 6681255 NR Description: phenylalkylamine Ca2+ antagonist (emopamil)
  misc_feature (1)..(173): Homolog of NCBI NO: 12848900 NR Description: unnamed protein product [Mus musculus]
  misc_feature (1)..(199): Homolog of NCBI NO: 33417065 NR Description: Unknown (protein for MGC:68833) [Xenopus laevis]
  misc_feature (1)..(195): Homolog of NCBI NO: 34894044 NR Description: putative C-8,7 sterol isomerase
  misc_feature (1)..(201): Homolog of NCBI NO: 4098989 NR Description: phenylalkylamine binding protein homolog
  misc_feature (1)..(201): Homolog of NCBI NO: 15223758 NR Description: C-8,7 sterol isomerase [Arabidopsis thaliana]
  misc_feature (1)..(201): Homolog of NCBI NO: 21554213 NR Description: C-8,7 sterol isomerase [Arabidopsis thaliana]

SEQ ID NO: 33340 - protein, 199 aa, Arabidopsis thaliana; identical to SEQ ID NO: 26205
  peptide (1)..(199): Ceres Seq. ID no. 13487253
  misc_feature (1)..(190): Pfam Name: Emopamil binding protein Pfam Description: Emopamil binding protein
  misc_feature (1)..(190): Pfam Name: Emopamil binding protein Pfam Description: Emopamil binding protein
  misc_feature (1)..(197): Homolog of NCBI NO: 5729810 NR Description: emopamil binding protein (sterol isomerase)
  misc_feature (1)..(171): Homolog of NCBI NO: 12848900 NR Description: unnamed protein product [Mus musculus]
  misc_feature (1)..(196): Homolog of NCBI NO: 18202586 NR Description: 3-beta-hydroxysteroid-delta(8),delta(7)-isomerase delta-isomerase) (Delta8-delta7 sterol isomerase) (D8-D7 sterol
  misc_feature (1)..(197): Homolog of NCBI NO: 6681255 NR Description: phenylalkylamine Ca2+ antagonist (emopamil)
  misc_feature (1)..(197): Homolog of NCBI NO: 16923992 NR Description: phenylalkylamine Ca2+ antagonist (emopamil)
  misc_feature (1)..(197): Homolog of NCBI NO: 5729810 NR Description: emopamil binding protein (sterol isomerase)
  misc_feature (1)..(196): Homolog of NCBI NO: 18202586 NR Description: 3-beta-hydroxysteroid-delta(8),delta(7)-isomerase delta-isomerase) (Delta8-delta7 sterol isomerase) (D8-D7 sterol
  misc_feature (1)..(197): Homolog of NCBI NO: 16923992 NR Description: phenylalkylamine Ca2+ antagonist (emopamil)
  misc_feature (1)..(199): Homolog of NCBI NO: 21554213 NR Description: C-8,7 sterol isomerase [Arabidopsis thaliana]
  misc_feature (1)..(199): Homolog of NCBI NO: 15223758 NR Description: C-8,7 sterol isomerase [Arabidopsis thaliana]
  misc_feature (1)..(199): Homolog of NCBI NO: 4098989 NR Description: phenylalkylamine binding protein homolog
  misc_feature (1)..(193): Homolog of NCBI NO: 34894044 NR Description: putative C-8,7 sterol isomerase
  misc_feature (1)..(197): Homolog of NCBI NO: 33417065 NR Description: Unknown (protein for MGC:68833) [Xenopus laevis]
  misc_feature (1)..(197): Homolog of NCBI NO: 6681255 NR Description: phenylalkylamine Ca2+ antagonist (emopamil)
  misc_feature (1)..(171): Homolog of NCBI NO: 12848900 NR Description: unnamed protein product [Mus musculus]
  misc_feature (1)..(197): Homolog of NCBI NO: 33417065 NR Description: Unknown (protein for MGC:68833) [Xenopus laevis]
  misc_feature (1)..(193): Homolog of NCBI NO: 34894044 NR Description: putative C-8,7 sterol isomerase
  misc_feature (1)..(199): Homolog of NCBI NO: 4098989 NR Description: phenylalkylamine binding protein homolog
  misc_feature (1)..(199): Homolog of NCBI NO: 15223758 NR Description: C-8,7 sterol isomerase [Arabidopsis thaliana]
  misc_feature (1)..(199): Homolog of NCBI NO: 21554213 NR Description: C-8,7 sterol isomerase [Arabidopsis thaliana]

SEQ ID NO: 33341 - DNA, 1151 bp, Arabidopsis thaliana; identical to SEQ ID NO: 29751
  misc_feature (1)..(1151): Ceres Seq. ID no. 13490670
  misc_feature: MA Experiment ID: 108435 Result: Up-regulated in Transcription
  misc_feature: MA Experiment 108435 PARAMETER Experiment Name: At_stm_Mutants_cDNA_P Parameter: Plant Line Value: wt Landsburg vs stm
  misc_feature: MA Experiment 108435 PARAMETER Experiment Name: At_stm_Mutants_cDNA_P Parameter: Tissue Value: Shoot Apical Meristem Region
  misc_feature: MA Experiment ID: 108462 Result: Up-regulated in Transcription
  misc_feature: MA Experiment 108462 PARAMETER Experiment Name: At_Germinating_Seeds_cDNA_P Parameter: Age (day) Value: 2 vs. 0
  misc_feature: MA Experiment 108462 PARAMETER Experiment Name: At_Germinating_Seeds_cDNA_P Parameter: Tissue Value: Germinating Seeds
  misc_feature: MA Experiment ID: 108463 Result: Up-regulated in Transcription
  misc_feature: MA Experiment 108463 PARAMETER Experiment Name: At_Germinating_Seeds_cDNA_P Parameter: Age (day) Value: 3 vs. 0
  misc_feature: MA Experiment 108463 PARAMETER Experiment Name: At_Germinating_Seeds_cDNA_P Parameter: Tissue Value: Germinating Seeds
  misc_feature: MA Experiment ID: 108464 Result: Up-regulated in Transcription
  misc_feature: MA Experiment 108464 PARAMETER Experiment Name: At_Germinating_Seeds_cDNA_P Parameter: Age (day) Value: 4 vs. 0
  misc_feature: MA Experiment 108464 PARAMETER Experiment Name: At_Germinating_Seeds_cDNA_P Parameter: Tissue Value: Germinating Seeds
  misc_feature: MA Experiment ID: 108474 Result: Down-regulated in Transcription
  misc_feature: MA Experiment 108474 PARAMETER Experiment Name: At_Drought_Flowers_cDNA_P Parameter: Timepoint (hr) Value: null
  misc_feature: MA Experiment 108474 PARAMETER Experiment Name: At_Drought_Flowers_cDNA_P Parameter: Treatment Value: Drought vs. No Drought
  misc_feature: MA Experiment ID: 108561 Result: Down-regulated in Transcription
  misc_feature: MA Experiment 108561 PARAMETER Experiment Name: At_100uM_ABA_cDNA_P Parameter: Timepoint (hr) Value: 6
  misc_feature: MA Experiment 108561 PARAMETER Experiment Name: At_100uM_ABA_cDNA_P Parameter: Tissue Value: Aerial
  misc_feature: MA Experiment 108561 PARAMETER Experiment Name: At_100uM_ABA_cDNA_P Parameter: Treatment Value: 100uM ABA vs. No Treatment
  misc_feature: MA Experiment ID: 108576 Result: Down-regulated in Transcription
  misc_feature: MA Experiment 108576 PARAMETER Experiment Name: At_42deg_Heat_cDNA_P Parameter: Temperature (deg C) Value: 42 vs. 22
  misc_feature: MA Experiment 108576 PARAMETER Experiment Name: At_42deg_Heat_cDNA_P Parameter: Timepoint (hr) Value: 1
  misc_feature: MA Experiment 108576 PARAMETER Experiment Name: At_42deg_Heat_cDNA_P Parameter: Tissue Value: Aerial
  misc_feature: MA Experiment ID: 108577 Result: Down-regulated in Transcription
  misc_feature: MA Experiment 108577 PARAMETER Experiment Name: At_42deg_Heat_cDNA_P Parameter: Temperature (deg C) Value: 42 vs. 22
  misc_feature: MA Experiment 108577 PARAMETER Experiment Name: At_42deg_Heat_cDNA_P Parameter: Timepoint (hr) Value: 6
  misc_feature: MA Experiment 108577 PARAMETER Experiment Name: At_42deg_Heat_cDNA_P Parameter: Tissue Value: Aerial
  misc_feature: MA Experiment ID: 108595 Result: Down-regulated in Transcription
  misc_feature: MA Experiment 108595 PARAMETER Experiment Name: At_Ler-pi_Ovule_cDNA_P Parameter: Plant Line Value: null
  misc_feature: MA Experiment ID: 108605 Result: Down-regulated in Transcription
  misc_feature: MA Experiment 108605 PARAMETER Experiment Name: At_100uM_ABA_cDNA_P Parameter: Timepoint (hr) Value: 6
  misc_feature: MA Experiment 108605 PARAMETER Experiment Name: At_100uM_ABA_cDNA_P Parameter: Tissue Value: Aerial
  misc_feature: MA Experiment 108605 PARAMETER Experiment Name: At_100uM_ABA_cDNA_P Parameter: Treatment Value: 100uM ABA vs. No Treatment
  misc_feature: MA Experiment ID: 108607 Result: Down-regulated in Transcription
  misc_feature: MA Experiment 108607 PARAMETER Experiment Name: At_100uM_ABA_cDNA_P Parameter: Timepoint (hr) Value: 4
  misc_feature: MA Experiment 108607 PARAMETER Experiment Name: At_100uM_ABA_cDNA_P Parameter: Tissue Value: Aerial
  misc_feature: MA Experiment 108607 PARAMETER Experiment Name: At_100uM_ABA_cDNA_P Parameter: Treatment Value: 100uM ABA vs. No Treatment
  misc_feature: MA Experiment ID: 108668 Result: Down-regulated in Transcription
  misc_feature: MA Experiment 108668 PARAMETER Experiment Name: At_2mM_SA_cDNA_P Parameter: Plant Line Value: WS
  misc_feature: MA Experiment 108668 PARAMETER Experiment Name: At_2mM_SA_cDNA_P Parameter: Timepoint (hr) Value: 6
  misc_feature: MA Experiment 108668 PARAMETER Experiment Name: At_2mM_SA_cDNA_P Parameter: Treatment Value: 2mM SA vs. No Treatment
  misc_feature: MA Experiment ID: 20000070 Result: Down-regulated in Transcription
  misc_feature: MA Experiment 20000070 PARAMETER Experiment Name: At_100uM_ABA_Mutants_cDNA_P Parameter: Plant Line Value: CS24
  misc_feature: MA Experiment 20000070 PARAMETER Experiment Name: At_100uM_ABA_Mutants_cDNA_P Parameter: Timepoint (hr) Value: 6
  misc_feature: MA Experiment 20000070 PARAMETER Experiment Name: At_100uM_ABA_Mutants_cDNA_P Parameter: Tissue Value: Aerial
  misc_feature: MA Experiment 20000070 PARAMETER Experiment Name: At_100uM_ABA_Mutants_cDNA_P Parameter: Treatment Value: 100uM ABA vs. No Treatment
  misc_feature: MA Experiment ID: 20000071 Result: Down-regulated in Transcription
  misc_feature: MA Experiment 20000071 PARAMETER Experiment Name: At_100uM_ABA_Mutants_cDNA_P Parameter: Plant Line Value: CS8104
  misc_feature: MA Experiment 20000071 PARAMETER Experiment Name: At_100uM_ABA_Mutants_cDNA_P Parameter: Timepoint (hr) Value: 6
  misc_feature: MA Experiment 20000071 PARAMETER Experiment Name: At_100uM_ABA_Mutants_cDNA_P Parameter: Tissue Value: Aerial
  misc_feature: MA Experiment 20000071 PARAMETER Experiment Name: At_100uM_ABA_Mutants_cDNA_P Parameter: Treatment Value: 100uM ABA vs. No Treatment
  misc_feature: MA Experiment ID: 20000087 Result: Down-regulated in Transcription
  misc_feature: MA Experiment 20000087 PARAMETER Experiment Name: At_100uM_ABA_Mutants_cDNA_P Parameter: Plant Line Value: WS
  misc_feature: MA Experiment 20000087 PARAMETER Experiment Name: At_100uM_ABA_Mutants_cDNA_P Parameter: Timepoint (hr) Value: 6
  misc_feature: MA Experiment 20000087 PARAMETER Experiment Name: At_100uM_ABA_Mutants_cDNA_P Parameter: Tissue Value: Aerial
  misc_feature: MA Experiment 20000087 PARAMETER Experiment Name: At_100uM_ABA_Mutants_cDNA_P Parameter: Treatment Value: 100uM ABA vs. No Treatment
  misc_feature: MA Experiment ID: 20000112 Result: Down-regulated in Transcription
  misc_feature: MA Experiment 20000112 PARAMETER Experiment Name: At_42deg_Heat_cDNA_P Parameter: Temperature (deg C) Value: 42 vs. 22
  misc_feature: MA Experiment 20000112 PARAMETER Experiment Name: At_42deg_Heat_cDNA_P Parameter: Timepoint (hr) Value: 2
  misc_feature: MA Experiment 20000112 PARAMETER Experiment Name: At_42deg_Heat_cDNA_P Parameter: Tissue Value: Aerial
  misc_feature: MA Experiment ID: 20000113 Result: Down-regulated in Transcription
  misc_feature: MA Experiment 20000113 PARAMETER Experiment Name: At_42deg_Heat_cDNA_P Parameter: Temperature (deg C) Value: 42 vs. 22
  misc_feature: MA Experiment 20000113 PARAMETER Experiment Name: At_42deg_Heat_cDNA_P Parameter: Timepoint (hr) Value: 8
  misc_feature: MA Experiment 20000113 PARAMETER Experiment Name: At_42deg_Heat_cDNA_P Parameter: Tissue Value: Aerial
  misc_feature: MA Experiment ID: 20000117 Result: Down-regulated in Transcription
  misc_feature: MA Experiment 20000117 PARAMETER Experiment Name: At_100uM_ABA_Mutants_cDNA_P Parameter: Plant Line Value: Columbia
  misc_feature: MA Experiment 20000117 PARAMETER Experiment Name: At_100uM_ABA_Mutants_cDNA_P Parameter: Timepoint (hr) Value: 6
  misc_feature: MA Experiment 20000117 PARAMETER Experiment Name: At_100uM_ABA_Mutants_cDNA_P Parameter: Tissue Value: Aerial
  misc_feature: MA Experiment 20000117 PARAMETER Experiment Name: At_100uM_ABA_Mutants_cDNA_P Parameter: Treatment Value: 100uM ABA vs. No Treatment
  misc_feature: MA Experiment ID: 20000169 Result: Down-regulated in Transcription
  misc_feature: MA Experiment 20000169 PARAMETER Experiment Name: At_100uM_ABA_P Parameter: Age (day) Value: 14
  misc_feature: MA Experiment 20000169 PARAMETER Experiment Name: At_100uM_ABA_P Parameter: Organism Value: A. thaliana
  misc_feature: MA Experiment 20000169 PARAMETER Experiment Name: At_100uM_ABA_P Parameter: Plant Line Value: WS
  misc_feature: MA Experiment 20000169 PARAMETER Experiment Name: At_100uM_ABA_P Parameter: Timepoint (hr) Value: 6
  misc_feature: MA Experiment 20000169 PARAMETER Experiment Name: At_100uM_ABA_P Parameter: Tissue Value: Aerial
  misc_feature: MA Experiment 20000169 PARAMETER Experiment Name: At_100uM_ABA_P Parameter: Treatment Value: 100uM ABA vs. No Treatment
  misc_feature: MA Experiment ID: 20000173 Result: Down-regulated in Transcription
  misc_feature: MA Experiment 20000173 PARAMETER Experiment Name: At_42deg_Heat_P Parameter: Age (day) Value: 14
  misc_feature: MA Experiment 20000173 PARAMETER Experiment Name: At_42deg_Heat_P Parameter: Organism Value: A. thaliana
  misc_feature: MA Experiment 20000173 PARAMETER Experiment Name: At_42deg_Heat_P Parameter: Plant Line Value: WS
  misc_feature: MA Experiment 20000173 PARAMETER Experiment Name: At_42deg_Heat_P Parameter: Temperature (deg C) Value: 42 vs. 22
  misc_feature: MA Experiment 20000173 PARAMETER Experiment Name: At_42deg_Heat_P Parameter: Timepoint (hr) Value: 6
  misc_feature: MA Experiment 20000173 PARAMETER Experiment Name: At_42deg_Heat_P Parameter: Tissue Value: Aerial
  misc_feature: MA Experiment ID: 20000180 Result: Up-regulated in Transcription
  misc_feature: MA Experiment 20000180 PARAMETER Experiment Name: At_Germinating_Seeds_P Parameter: Age (hr) Value: 24 vs. 0
  misc_feature: MA Experiment 20000180 PARAMETER Experiment Name: At_Germinating_Seeds_P Parameter: Tissue Value: Germinating Seeds
  misc_feature: MA Experiment ID: 20000182 Result: Down-regulated in Transcription
  misc_feature: MA Experiment 20000182 PARAMETER Experiment Name: At_2mM_SA_P Parameter: Age (day) Value: 14
  misc_feature: MA Experiment 20000182 PARAMETER Experiment Name: At_2mM_SA_P Parameter: Organism Value: A. thaliana
  misc_feature: MA Experiment 20000182 PARAMETER Experiment Name: At_2mM_SA_P Parameter: Plant Line Value: WS
  misc_feature: MA Experiment 20000182 PARAMETER Experiment Name: At_2mM_SA_P Parameter: Timepoint (hr) Value: 6
  misc_feature: MA Experiment 20000182 PARAMETER Experiment Name: At_2mM_SA_P Parameter: Tissue Value: Aerial
  misc_feature: MA Experiment 20000182 PARAMETER Experiment Name: At_2mM_SA_P Parameter: Treatment Value: 2mM SA vs. No Treatment
  misc_feature: MA Experiment ID: 20000185 Result: Down-regulated in Transcription
  misc_feature: MA Experiment 20000185 PARAMETER Experiment Name: At_Roots__P Parameter: Age (day) Value: 7 vs. 21
  misc_feature: MA Experiment 20000185 PARAMETER Experiment Name: At_Roots__P Parameter: Organism Value: A. thaliana
  misc_feature: MA Experiment 20000185 PARAMETER Experiment Name: At_Roots__P Parameter: Tissue Value: Roots vs. Whole Plant
  misc_feature: MA Experiment ID: 20000224 Result: Down-regulated in Transcription
  misc_feature: MA Experiment ID: 20000227 Result: Up-regulated in Transcription
  misc_feature: MA Experiment 20000227 PARAMETER Experiment Name: At_Root-Tips-vs-Tops_P Parameter: Tissue Value: Root Tips vs. Root Tops
  misc_feature: MA Experiment ID: 20000234 Result: Down-regulated in Transcription
  misc_feature: MA Experiment 20000234 PARAMETER Experiment Name: At_Siliques_P Parameter: Age (day) Value: 21
  misc_feature: MA Experiment 20000234 PARAMETER Experiment Name: At_Siliques_P Parameter: Organism Value: A. thaliana
  misc_feature: MA Experiment 20000234 PARAMETER Experiment Name: At_Siliques_P Parameter: Plant Line Value: WS
  misc_feature: MA Experiment 20000234 PARAMETER Experiment Name: At_Siliques_P Parameter: Tissue Value: Less Than 5mm Siliques vs. Whole Plant
  misc_feature: MA Experiment ID: 20000265 Result: Down-regulated in Transcription
  misc_feature: MA Experiment 20000265 PARAMETER Experiment Name: At_Open_Flower_P Parameter: Age (day) Value: 21
  misc_feature: MA Experiment 20000265 PARAMETER Experiment Name: At_Open_Flower_P Parameter: Plant Line Value: WS
  misc_feature: MA Experiment 20000265 PARAMETER Experiment Name: At_Open_Flower_P Parameter: Tissue Value: Closed Flower vs. Whole Plant
  misc_feature: MA Experiment ID: 20000268 Result: Down-regulated in Transcription
  misc_feature: MA Experiment 20000268 PARAMETER Experiment Name: At_100mM_NaCl__P Parameter: Age (day) Value: 14
  misc_feature: MA Experiment 20000268 PARAMETER Experiment Name: At_100mM_NaCl__P Parameter: Organism Value: A. thaliana
  misc_feature: MA Experiment 20000268 PARAMETER Experiment Name: At_100mM_NaCl__P Parameter: Plant Line Value: WS
  misc_feature: MA Experiment 20000268 PARAMETER Experiment Name: At_100mM_NaCl__P Parameter: Timepoint (hr) Value: 6
  misc_feature: MA Experiment 20000268 PARAMETER Experiment Name: At_100mM_NaCl__P Parameter: Tissue Value: Whole Plant
  misc_feature: MA Experiment 20000268 PARAMETER Experiment Name: At_100mM_NaCl__P Parameter: Treatment Value: 100mM NaCl vs. No Treatment
  misc_feature: MA Experiment ID: 20000437 Result: Down-regulated in Transcription
  misc_feature: MA Experiment 20000437 PARAMETER Experiment Name: At_Drought_P Parameter: Age (day) Value: 8
  misc_feature: MA Experiment 20000437 PARAMETER Experiment Name: At_Drought_P Parameter: Organism Value: A. thaliana
  misc_feature: MA Experiment 20000437 PARAMETER Experiment Name: At_Drought_P Parameter: Plant Line Value: WS
  misc_feature: MA Experiment 20000437 PARAMETER Experiment Name: At_Drought_P Parameter: Timepoint (hr) Value: 24
  misc_feature: MA Experiment 20000437 PARAMETER Experiment Name: At_Drought_P Parameter: Tissue Value: Whole Plant
  misc_feature: MA Experiment 20000437 PARAMETER Experiment Name: At_Drought_P Parameter: Treatment Value: Drought vs. No Drought
  misc_feature: MA Experiment ID: 20000439 Result: Down-regulated in Transcription
  misc_feature: MA Experiment 20000439 PARAMETER Experiment Name: At_Roots__P Parameter: Age (day) Value: 14 vs. 21
  misc_feature: MA Experiment 20000439 PARAMETER Experiment Name: At_Roots__P Parameter: Organism Value: A. thaliana
  misc_feature: MA Experiment 20000439 PARAMETER Experiment Name: At_Roots__P Parameter: Tissue Value: Roots vs. Whole Plant
  misc_feature: MA Experiment ID: 20000794 Result: Up-regulated in Transcription
  misc_feature: MA Experiment 20000794 PARAMETER Experiment Name: At_Petals_P Parameter: Age (day) Value: 23-25 days
  misc_feature: MA Experiment 20000794 PARAMETER Experiment Name: At_Petals_P Parameter: Plant Line Value: WS
  misc_feature: MA Experiment 20000794 PARAMETER Experiment Name: At_Petals_P Parameter: Tissue Value: Petals vs. Whole plant
  misc_feature: MA Experiment ID: 20001248 Result: Up-regulated in Transcription
  misc_feature: MA Experiment 20001248 PARAMETER Experiment Name: At_Far-red-induction_P Parameter: Age (day) Value: 7
  misc_feature: MA Experiment 20001248 PARAMETER Experiment Name: At_Far-red-induction_P Parameter: Light Value: Far-red vs. White
  misc_feature: MA Experiment 20001248 PARAMETER Experiment Name: At_Far-red-induction_P Parameter: Organism Value: A. thaliana
  misc_feature: MA Experiment 20001248 PARAMETER Experiment Name: At_Far-red-induction_P Parameter: Plant Line Value: Columbia
  misc_feature: MA Experiment 20001248 PARAMETER Experiment Name: At_Far-red-induction_P Parameter: Timepoint (hr) Value: 4
  misc_feature: MA Experiment 20001248 PARAMETER Experiment Name: At_Far-red-induction_P Parameter: Tissue Value: Whole Plant
  misc_feature: MA Experiment ID: 20001450 Result: Up-regulated in Transcription
  misc_feature: MA Experiment 20001450 PARAMETER Experiment Name: At_Far-red-induction_P Parameter: Age (day) Value: 7
  misc_feature: MA Experiment 20001450 PARAMETER Experiment Name: At_Far-red-induction_P Parameter: Light Value: Far-red vs. White
  misc_feature: MA Experiment 20001450 PARAMETER Experiment Name: At_Far-red-induction_P Parameter: Organism Value: A. thaliana
  misc_feature: MA Experiment 20001450 PARAMETER Experiment Name: At_Far-red-induction_P Parameter: Plant Line Value: Columbia
  misc_feature: MA Experiment 20001450 PARAMETER Experiment Name: At_Far-red-induction_P Parameter: Timepoint (hr) Value: 8
  misc_feature: MA Experiment 20001450 PARAMETER Experiment Name: At_Far-red-induction_P Parameter: Tissue Value: Whole Plant
  misc_feature: MA Experiment ID: 20001451 Result: Up-regulated in Transcription
  misc_feature: MA Experiment 20001451 PARAMETER Experiment Name: At_Far-red-induction_P Parameter: Age (day) Value: 7
  misc_feature: MA Experiment 20001451 PARAMETER Experiment Name: At_Far-red-induction_P Parameter: Light Value: Far-red vs. White
  misc_feature: MA Experiment 20001451 PARAMETER Experiment Name: At_Far-red-induction_P Parameter: Organism Value: A. thaliana
  misc_feature: MA Experiment 20001451 PARAMETER Experiment Name: At_Far-red-induction_P Parameter: Plant Line Value: Columbia
  misc_feature: MA Experiment 20001451 PARAMETER Experiment Name: At_Far-red-induction_P Parameter: Timepoint (hr) Value: 24
  misc_feature: MA Experiment 20001451 PARAMETER Experiment Name: At_Far-red-induction_P Parameter: Tissue Value: Whole Plant
  misc_feature: MA Experiment ID: 20001457 Result: Up-regulated in Transcription
  misc_feature: MA Experiment 20001457 PARAMETER Experiment Name: At_50mM_NH4NO3_L-to-H_P Parameter: Age (day) Value: Undefined
  misc_feature: MA Experiment 20001457 PARAMETER Experiment Name: At_50mM_NH4NO3_L-to-H_P Parameter: Organism Value: Undefined
  misc_feature: MA Experiment 20001457 PARAMETER Experiment Name: At_50mM_NH4NO3_L-to-H_P Parameter: Plant Line Value: Undefined
  misc_feature: MA Experiment 20001457 PARAMETER Experiment Name: At_50mM_NH4NO3_L-to-H_P Parameter: Timepoint (hr) Value: 0.5
  misc_feature: MA Experiment 20001457 PARAMETER Experiment Name: At_50mM_NH4NO3_L-to-H_P Parameter: Tissue Value: Siliques
  misc_feature: MA Experiment 20001457 PARAMETER Experiment Name: At_50mM_NH4NO3_L-to-H_P Parameter: Treatment Value: 50mM NH4NO3 vs. 100mM Manitol
  misc_feature: MA Experiment ID: 20001554 Result: Down-regulated in Transcription
  misc_feature: MA Experiment 20001554 PARAMETER Experiment Name: At_Drought_Soil_Dry_P Parameter: Age (day) Value: 21
  misc_feature: MA Experiment 20001554 PARAMETER Experiment Name: At_Drought_Soil_Dry_P Parameter: Organism Value: A. thaliana
  misc_feature: MA Experiment 20001554 PARAMETER Experiment Name: At_Drought_Soil_Dry_P Parameter: Plant Line Value: WS
  misc_feature: MA Experiment 20001554 PARAMETER Experiment Name: At_Drought_Soil_Dry_P Parameter: Post Timepoint (hr) Value: None
  misc_feature: MA Experiment 20001554 PARAMETER Experiment Name: At_Drought_Soil_Dry_P Parameter: Post-Treatment Value: None
  misc_feature: MA Experiment 20001554 PARAMETER Experiment Name: At_Drought_Soil_Dry_P Parameter: Timepoint (day) Value: 7
  misc_feature: MA Experiment 20001554 PARAMETER Experiment Name: At_Drought_Soil_Dry_P Parameter: Treatment Value: Drought vs. No Drought
  misc_feature: MA Experiment ID: 20001556 Result: Down-regulated in Transcription
  misc_feature: MA Experiment 20001556 PARAMETER Experiment Name: At_Drought_Soil_Dry_P Parameter: Age (day) Value: 26
  misc_feature: MA Experiment 20001556 PARAMETER Experiment Name: At_Drought_Soil_Dry_P Parameter: Organism Value: A. thaliana
  misc_feature: MA Experiment 20001556 PARAMETER Experiment Name: At_Drought_Soil_Dry_P Parameter: Plant Line Value: WS
  misc_feature: MA Experiment 20001556 PARAMETER Experiment Name: At_Drought_Soil_Dry_P Parameter: Post Timepoint (hr) Value: None
  misc_feature: MA Experiment 20001556 PARAMETER Experiment Name: At_Drought_Soil_Dry_P Parameter: Post-Treatment Value: None
  misc_feature: MA Experiment 20001556 PARAMETER Experiment Name: At_Drought_Soil_Dry_P Parameter: Timepoint (day) Value: 12
  misc_feature: MA Experiment 20001556 PARAMETER Experiment Name: At_Drought_Soil_Dry_P Parameter: Treatment Value: Drought vs. No Drought
  misc_feature: MA Experiment ID: 20001558 Result: Up-regulated in Transcription
  misc_feature: MA Experiment 20001558 PARAMETER Experiment Name: At_Drought_Soil_Dry_P Parameter: Age (day) Value: 27
  misc_feature: MA Experiment 20001558 PARAMETER Experiment Name: At_Drought_Soil_Dry_P Parameter: Organism Value: A. thaliana
  misc_feature: MA Experiment 20001558 PARAMETER Experiment Name: At_Drought_Soil_Dry_P Parameter: Plant Line Value: WS
  misc_feature: MA Experiment 20001558 PARAMETER Experiment Name: At_Drought_Soil_Dry_P Parameter: Post Timepoint (hr) Value: 6
  misc_feature: MA Experiment 20001558 PARAMETER Experiment Name: At_Drought_Soil_Dry_P Parameter: Post-Treatment Value: Re-Water vs. No Drought
  misc_feature: MA Experiment 20001558 PARAMETER Experiment Name: At_Drought_Soil_Dry_P Parameter: Timepoint (day) Value: 13
  misc_feature: MA Experiment 20001558 PARAMETER Experiment Name: At_Drought_Soil_Dry_P Parameter: Treatment Value: Drought vs. No Drought
  misc_feature: MA Experiment ID: 20001560 Result: Up-regulated in Transcription
  misc_feature: MA Experiment 20001560 PARAMETER Experiment Name: At_Drought_Soil_Dry_P Parameter: Age (day) Value: 28
  misc_feature: MA Experiment 20001560 PARAMETER Experiment Name: At_Drought_Soil_Dry_P Parameter: Organism Value: A. thaliana
  misc_feature: MA Experiment 20001560 PARAMETER Experiment Name: At_Drought_Soil_Dry_P Parameter: Plant Line Value: WS
  misc_feature: MA Experiment 20001560 PARAMETER Experiment Name: At_Drought_Soil_Dry_P Parameter: Post Timepoint (hr) Value: None
  misc_feature: MA Experiment 20001560 PARAMETER Experiment Name: At_Drought_Soil_Dry_P Parameter: Post-Treatment Value: None
  misc_feature: MA Experiment 20001560 PARAMETER Experiment Name: At_Drought_Soil_Dry_P Parameter: Timepoint (day) Value: 14
  misc_feature: MA Experiment 20001560 PARAMETER Experiment Name: At_Drought_Soil_Dry_P Parameter: Treatment Value: Drought vs. No Drought
  misc_feature: MA Experiment ID: 20001761 Result: Up-regulated in Transcription
  misc_feature: MA Experiment 20001761 PARAMETER Experiment Name: At_50mM_NH4NO3_L-to-H_P Parameter: Timepoint (hr) Value: 4
  misc_feature: MA Experiment 20001761 PARAMETER Experiment Name: At_50mM_NH4NO3_L-to-H_P Parameter: Tissue Value: Siliques
  misc_feature: MA Experiment 20001761 PARAMETER Experiment Name: At_50mM_NH4NO3_L-to-H_P Parameter: Treatment Value: 50mM NH4NO3 vs 100mM Mannitol
  misc_feature: MA Experiment ID: 20001904 Result: Down-regulated in Transcription
  misc_feature: MA Experiment 20001904 PARAMETER Experiment Name: At_Drought_Reproduction_P Parameter: Age (day) Value: 37
  misc_feature: MA Experiment 20001904 PARAMETER Experiment Name: At_Drought_Reproduction_P Parameter: Organism Value: A. thaliana
  misc_feature: MA Experiment 20001904 PARAMETER Experiment Name: At_Drought_Reproduction_P Parameter: Plant Line Value: WS
  misc_feature: MA Experiment 20001904 PARAMETER Experiment Name: At_Drought_Reproduction_P Parameter: Timepoint (day) Value: 7
  misc_feature: MA Experiment 20001904 PARAMETER Experiment Name: At_Drought_Reproduction_P Parameter: Tissue Value: Rosettes
  misc_feature: MA Experiment 20001904 PARAMETER Experiment Name: At_Drought_Reproduction_P Parameter: Treatment Value: Drought vs. No Drought
  misc_feature: MA Experiment ID: 20001905 Result: Down-regulated in Transcription
  misc_feature: MA Experiment 20001905 PARAMETER Experiment Name: At_Drought_Reproduction_P Parameter: Age (day) Value: 40
  misc_feature: MA Experiment 20001905 PARAMETER Experiment Name: At_Drought_Reproduction_P Parameter: Organism Value: A. thaliana
  misc_feature: MA Experiment 20001905 PARAMETER Experiment Name: At_Drought_Reproduction_P Parameter: Plant Line Value: WS
  misc_feature: MA Experiment 20001905 PARAMETER Experiment Name: At_Drought_Reproduction_P Parameter: Timepoint (day) Value: 10
  misc_feature: MA Experiment 20001905 PARAMETER Experiment Name: At_Drought_Reproduction_P Parameter: Tissue Value: Rosettes
  misc_feature: MA Experiment 20001905 PARAMETER Experiment Name: At_Drought_Reproduction_P Parameter: Treatment Value: Drought vs. No Drought
  misc_feature: MA Experiment ID: 20001906 Result: Down-regulated in Transcription
  misc_feature: MA Experiment 20001906 PARAMETER Experiment Name: At_Drought_Reproduction_P Parameter: Age (day) Value: 35
  misc_feature: MA Experiment 20001906 PARAMETER Experiment Name: At_Drought_Reproduction_P Parameter: Organism Value: A. thaliana
  misc_feature: MA Experiment 20001906 PARAMETER Experiment Name: At_Drought_Reproduction_P Parameter: Plant Line Value: WS
  misc_feature: MA Experiment 20001906 PARAMETER Experiment Name: At_Drought_Reproduction_P Parameter: Timepoint (day) Value: 5
  misc_feature: MA Experiment 20001906 PARAMETER Experiment Name: At_Drought_Reproduction_P Parameter: Tissue Value: Siliques
  misc_feature: MA Experiment 20001906 PARAMETER Experiment Name: At_Drought_Reproduction_P Parameter: Treatment Value: Drought vs. No Drought
  misc_feature: MA Experiment ID: 20001907 Result: Down-regulated in Transcription
  misc_feature: MA Experiment 20001907 PARAMETER Experiment Name: At_Drought_Reproduction_P Parameter: Age (day) Value: 37
  misc_feature: MA Experiment 20001907 PARAMETER Experiment Name: At_Drought_Reproduction_P Parameter: Organism Value: A. thaliana
  misc_feature: MA Experiment 20001907 PARAMETER Experiment Name: At_Drought_Reproduction_P Parameter: Plant Line Value: WS
  misc_feature: MA Experiment 20001907 PARAMETER Experiment Name: At_Drought_Reproduction_P Parameter: Timepoint (day) Value: 7
  misc_feature: MA Experiment 20001907 PARAMETER Experiment Name: At_Drought_Reproduction_P Parameter: Tissue Value: Siliques
  misc_feature: MA Experiment 20001907 PARAMETER Experiment Name: At_Drought_Reproduction_P Parameter: Treatment Value: Drought vs. No Drought
  misc_feature: MA Experiment ID: 20001908 Result: Down-regulated in Transcription
  misc_feature: MA Experiment 20001908 PARAMETER Experiment Name: At_Drought_Reproduction_P Parameter: Age (day) Value: 40
  misc_feature: MA Experiment 20001908 PARAMETER Experiment Name: At_Drought_Reproduction_P Parameter: Organism Value: A. thaliana
  misc_feature: MA Experiment 20001908 PARAMETER Experiment Name: At_Drought_Reproduction_P Parameter: Plant Line Value: WS
  misc_feature: MA Experiment 20001908 PARAMETER Experiment Name: At_Drought_Reproduction_P Parameter: Timepoint (day) Value: 10
  misc_feature: MA Experiment 20001908 PARAMETER Experiment Name: At_Drought_Reproduction_P Parameter: Tissue Value: Siliques
  misc_feature: MA Experiment 20001908 PARAMETER Experiment Name: At_Drought_Reproduction_P Parameter: Treatment Value: Drought vs. No Drought
  misc_feature: MA Experiment ID: 20001911 Result: Down-regulated in Transcription
  misc_feature: MA Experiment 20001911 PARAMETER Experiment Name: At_Drought_Reproduction_P Parameter: Age (day) Value: 40
  misc_feature: MA Experiment 20001911 PARAMETER Experiment Name: At_Drought_Reproduction_P Parameter: Organism Value: A. thaliana
  misc_feature: MA Experiment 20001911 PARAMETER Experiment Name: At_Drought_Reproduction_P Parameter: Plant Line Value: WS
  misc_feature: MA Experiment 20001911 PARAMETER Experiment Name: At_Drought_Reproduction_P Parameter: Timepoint (day) Value: 10
  misc_feature: MA Experiment 20001911 PARAMETER Experiment Name: At_Drought_Reproduction_P Parameter: Tissue Value: Flowers
  misc_feature: MA Experiment 20001911 PARAMETER Experiment Name: At_Drought_Reproduction_P Parameter: Treatment Value: Drought vs. No Drought

SEQ ID NO: 33342 - protein, 296 aa, Arabidopsis thaliana; identical to SEQ ID NO: 29752
  peptide (1)..(296): Ceres Seq. ID no. 13490671
  misc_feature (35)..(216): Pfam Name: Glycosyl hydrolases family 16 Pfam Description: Glycosyl hydrolases family 16
  misc_feature (1)..(290): Homolog of NCBI NO: 18391291 NR Description: xyloglucan endotransglycosylase, putative
  misc_feature (6)..(295): Homolog of NCBI NO: 541939 NR Description: xyloglucan endo-1,4-beta-D-glucanase (EC 3.2.1.-)
  misc_feature (5)..(295): Homolog of NCBI NO: 38605591 NR Description: Probable xyloglucan
  misc_feature (1)..(295): Homolog of NCBI NO: 3043422 NR Description: endoxyloglucan transferase [Cicer arietinum]
  misc_feature (7)..(295): Homolog of NCBI NO: 27228078 NR Description: xyloglucan endotransglycosylase precursor
  misc_feature (3)..(295): Homolog of NCBI NO: 7447416 NR Description: xyloglucan endo-1,4-beta-D-glucanase (EC 3.2.1.-)
  misc_feature (3)..(295): Homolog of NCBI NO: 950299 NR Description: xyloglucan endotransglycosylase precursor
  misc_feature (11)..(295): Homolog of NCBI NO: 15240733 NR Description: xyloglucan endotransglycosylase (EXGT-A4)
  misc_feature (4)..(295): Homolog of NCBI NO: 22947847 NR Description: xyloglucan endotransglycosylase [Malus x
  misc_feature (1)..(296): Homolog of NCBI NO: 15225605 NR Description: xyloglucan endotransglycosylase (ext/EXGT-A1)

SEQ ID NO: 33343 - protein, 286 aa, Arabidopsis thaliana; identical to SEQ ID NO: 29753
  peptide (1)..(286): Ceres Seq. ID no. 13490672
  misc_feature (25)..(206): Pfam Name: Glycosyl hydrolases family 16 Pfam Description: Glycosyl hydrolases family 16
  misc_feature (1)..(280): Homolog of NCBI NO: 18391291 NR Description: xyloglucan endotransglycosylase, putative
  misc_feature (1)..(285): Homolog of NCBI NO: 541939 NR Description: xyloglucan endo-1,4-beta-D-glucanase (EC 3.2.1.-)
  misc_feature (1)..(285): Homolog of NCBI NO: 38605591 NR Description: Probable xyloglucan
  misc_feature (1)..(285): Homolog of NCBI NO: 3043422 NR Description: endoxyloglucan transferase [Cicer arietinum]
  misc_feature (1)..(285): Homolog of NCBI NO: 27228078 NR Description: xyloglucan endotransglycosylase precursor
  misc_feature (1)..(285): Homolog of NCBI NO: 7447416 NR Description: xyloglucan endo-1,4-beta-D-glucanase (EC 3.2.1.-)
  misc_feature (1)..(285): Homolog of NCBI NO: 950299 NR Description: xyloglucan endotransglycosylase precursor
  misc_feature (1)..(285): Homolog of NCBI NO: 15240733 NR Description: xyloglucan endotransglycosylase (EXGT-A4)
  misc_feature (1)..(285): Homolog of NCBI NO: 22947847 NR Description: xyloglucan endotransglycosylase [Malus x
  misc_feature (1)..(286): Homolog of NCBI NO: 15225605 NR Description: xyloglucan endotransglycosylase (ext/EXGT-A1)

SEQ ID NO: 33344 - protein, 281 aa, Arabidopsis thaliana; identical to SEQ ID NO: 29754
  peptide (1)..(281): Ceres Seq. ID no. 13490673
  misc_feature (20)..(201): Pfam Name: Glycosyl hydrolases family 16 Pfam Description: Glycosyl hydrolases family 16
  misc_feature (1)..(275): Homolog of NCBI NO: 18391291 NR Description: xyloglucan endotransglycosylase, putative
  misc_feature (1)..(280): Homolog of NCBI NO: 541939 NR Description: xyloglucan endo-1,4-beta-D-glucanase (EC 3.2.1.-)
  misc_feature (1)..(280): Homolog of NCBI NO: 38605591 NR Description: Probable xyloglucan
  misc_feature (1)..(280): Homolog of NCBI NO: 3043422 NR Description: endoxyloglucan transferase [Cicer arietinum]
  misc_feature (1)..(280): Homolog of NCBI NO: 27228078 NR Description: xyloglucan endotransglycosylase precursor
  misc_feature (1)..(280): Homolog of NCBI NO: 7447416 NR Description: xyloglucan endo-1,4-beta-D-glucanase (EC 3.2.1.-)
  misc_feature (1)..(280): Homolog of NCBI NO: 950299 NR Description: xyloglucan endotransglycosylase precursor
  misc_feature (1)..(280): Homolog of NCBI NO: 15240733 NR Description: xyloglucan endotransglycosylase (EXGT-A4)
  misc_feature (1)..(280): Homolog of NCBI NO: 22947847 NR Description: xyloglucan endotransglycosylase [Malus x
  misc_feature (1)..(281): Homolog of NCBI NO: 15225605 NR Description: xyloglucan endotransglycosylase (ext/EXGT-A1)

SEQ ID NO: 33345 - DNA, 1176 bp, Arabidopsis thaliana; identical to SEQ ID NO: 29755
  misc_feature (1)..(1176): Ceres Seq. ID no. 13487542
  misc_feature: MA Experiment ID: 108488 Result: Down-regulated in Transcription
  misc_feature: MA Experiment ID: 108573 Result: Up-regulated in Transcription
  misc_feature: MA Experiment 108573 PARAMETER Experiment Name: At_Drought_cDNA_P Parameter: Timepoint (hr) Value: 6
  misc_feature: MA Experiment 108573 PARAMETER Experiment Name: At_Drought_cDNA_P Parameter: Tissue Value: Aerial
  misc_feature: MA Experiment 108573 PARAMETER Experiment Name: At_Drought_cDNA_P Parameter: Treatment Value: Drought vs. No Drought
  misc_feature: MA Experiment ID: 108577 Result: Down-regulated in Transcription
  misc_feature: MA Experiment 108577 PARAMETER Experiment Name: At_42deg_Heat_cDNA_P Parameter: Temperature (deg C) Value: 42 vs. 22
  misc_feature: MA Experiment 108577 PARAMETER Experiment Name: At_42deg_Heat_cDNA_P Parameter: Timepoint (hr) Value: 6
  misc_feature: MA Experiment 108577 PARAMETER Experiment Name: At_42deg_Heat_cDNA_P Parameter: Tissue Value: Aerial
  misc_feature: MA Experiment ID: 20000069 Result: Up-regulated in Transcription
  misc_feature: MA Experiment 20000069 PARAMETER Experiment Name: At_100uM_ABA_Mutants_cDNA_P Parameter: Plant Line Value: CS23
  misc_feature: MA Experiment 20000069 PARAMETER Experiment Name: At_100uM_ABA_Mutants_cDNA_P Parameter: Timepoint (hr) Value: 6
  misc_feature: MA Experiment 20000069 PARAMETER Experiment Name: At_100uM_ABA_Mutants_cDNA_P Parameter: Tissue Value: Aerial
  misc_feature: MA Experiment 20000069 PARAMETER Experiment Name: At_100uM_ABA_Mutants_cDNA_P Parameter: Treatment Value: 100uM ABA vs. No Treatment
  misc_feature: MA Experiment ID: 20000087 Result: Up-regulated in Transcription
  misc_feature: MA Experiment 20000087 PARAMETER Experiment Name: At_100uM_ABA_Mutants_cDNA_P Parameter: Plant Line Value: WS
  misc_feature: MA Experiment 20000087 PARAMETER Experiment Name: At_100uM_ABA_Mutants_cDNA_P Parameter: Timepoint (hr) Value: 6
  misc_feature: MA Experiment 20000087 PARAMETER Experiment Name: At_100uM_ABA_Mutants_cDNA_P Parameter: Tissue Value: Aerial
  misc_feature: MA Experiment 20000087 PARAMETER Experiment Name: At_100uM_ABA_Mutants_cDNA_P Parameter: Treatment Value: 100uM ABA vs. No Treatment
  misc_feature: MA Experiment ID: 20000117 Result: Up-regulated in Transcription
  misc_feature: MA Experiment 20000117 PARAMETER Experiment Name: At_100uM_ABA_Mutants_cDNA_P Parameter: Plant Line Value: Columbia
  misc_feature: MA Experiment 20000117 PARAMETER Experiment Name: At_100uM_ABA_Mutants_cDNA_P Parameter: Timepoint (hr) Value: 6
  misc_feature: MA Experiment 20000117 PARAMETER Experiment Name: At_100uM_ABA_Mutants_cDNA_P Parameter: Tissue Value: Aerial
  misc_feature: MA Experiment 20000117 PARAMETER Experiment Name: At_100uM_ABA_Mutants_cDNA_P Parameter: Treatment Value: 100uM ABA vs. No Treatment
  misc_feature: MA Experiment ID: 20000173 Result: Down-regulated in Transcription
  misc_feature: MA Experiment 20000173 PARAMETER Experiment Name: At_42deg_Heat_P Parameter: Age (day) Value: 14
  misc_feature: MA Experiment 20000173 PARAMETER Experiment Name: At_42deg_Heat_P Parameter: Organism Value: A. thaliana
  misc_feature: MA Experiment 20000173 PARAMETER Experiment Name: At_42deg_Heat_P Parameter: Plant Line Value: WS
  misc_feature: MA Experiment 20000173 PARAMETER Experiment Name: At_42deg_Heat_P Parameter: Temperature (deg C) Value: 42 vs. 22
  misc_feature: MA Experiment 20000173 PARAMETER Experiment Name: At_42deg_Heat_P Parameter: Timepoint (hr) Value: 6
  misc_feature: MA Experiment 20000173 PARAMETER Experiment Name: At_42deg_Heat_P Parameter: Tissue Value: Aerial
  misc_feature: MA Experiment ID: 20001451 Result: Down-regulated in Transcription
  misc_feature: MA Experiment 20001451 PARAMETER Experiment Name: At_Far-red-induction_P Parameter: Age (day) Value: 7
  misc_feature: MA Experiment 20001451 PARAMETER Experiment Name: At_Far-red-induction_P Parameter: Light Value: Far-red vs. White
  misc_feature: MA Experiment 20001451 PARAMETER Experiment Name: At_Far-red-induction_P Parameter: Organism Value: A. thaliana
  misc_feature: MA Experiment 20001451 PARAMETER Experiment Name: At_Far-red-induction_P Parameter: Plant Line Value: Columbia
  misc_feature: MA Experiment 20001451 PARAMETER Experiment Name: At_Far-red-induction_P Parameter: Timepoint (hr) Value: 24
  misc_feature: MA Experiment 20001451 PARAMETER Experiment Name: At_Far-red-induction_P Parameter: Tissue Value: Whole Plant

SEQ ID NO: 33346 - protein, 324 aa, Arabidopsis thaliana; identical to SEQ ID NO: 29756
  peptide (1)..(324): Ceres Seq. ID no. 13487543
  misc_feature (52)..(311): Pfam Name: alpha/beta hydrolase fold Pfam Description: alpha/beta hydrolase fold
  misc_feature (1)..(316): Homolog of NCBI NO: 25044843 NR Description: epoxide hydrolase [Ananas comosus]
  misc_feature (1)..(316): Homolog of NCBI NO: 27960680 NR Description: soluble epoxide hydrolase [Euphorbia lagascae]
  misc_feature (1)..(324): Homolog of NCBI NO: 18411917 NR Description: epoxide hydrolase, putative [Arabidopsis

SEQ ID NO: 33347 - protein, 309 aa, Arabidopsis thaliana; identical to SEQ ID NO: 29757
  peptide (1)..(309): Ceres Seq. ID no. 13487544
  misc_feature (37)..(296): Pfam Name: alpha/beta hydrolase fold Pfam Description: alpha/beta hydrolase fold
  misc_feature (1)..(301): Homolog of NCBI NO: 25044843 NR Description: epoxide hydrolase [Ananas comosus]
  misc_feature (1)..(301): Homolog of NCBI NO: 27960680 NR Description: soluble epoxide hydrolase [Euphorbia lagascae]
  misc_feature (1)..(309): Homolog of NCBI NO: 18411917 NR Description: epoxide hydrolase, putative [Arabidopsis

SEQ ID NO: 33348 - protein, 213 aa, Arabidopsis thaliana; identical to SEQ ID NO: 29758
  peptide (1)..(213): Ceres Seq. ID no. 13487545
  misc_feature (1)..(200): Pfam Name: alpha/beta hydrolase fold Pfam Description: alpha/beta hydrolase fold
  misc_feature (1)..(205): Homolog of NCBI NO: 25044843 NR Description: epoxide hydrolase [Ananas comosus]
  misc_feature (1)..(205): Homolog of NCBI NO: 27960680 NR Description: soluble epoxide hydrolase [Euphorbia lagascae]
  misc_feature (1)..(213): Homolog of NCBI NO: 18411917 NR Description: epoxide hydrolase, putative [Arabidopsis

SEQ ID NO: 33349 - DNA, 1215 bp, Arabidopsis thaliana; identical to SEQ ID NO: 29759
  misc_feature (1)..(1215): Ceres Seq. ID no. 12339760
  misc_feature: MA Experiment ID: 108434 Result: Up-regulated in Transcription
  misc_feature: MA Experiment 108434 PARAMETER Experiment Name: At_Root_Tips_cDNA_P Parameter: Tissue Value: Root Tips
  misc_feature: MA Experiment ID: 108461 Result: Down-regulated in Transcription
  misc_feature: MA Experiment 108461 PARAMETER Experiment Name: At_Germinating_Seeds_cDNA_P Parameter: Age (day) Value: 1 vs. 0
  misc_feature: MA Experiment 108461 PARAMETER Experiment Name: At_Germinating_Seeds_cDNA_P Parameter: Tissue Value: Germinating Seeds
  misc_feature: MA Experiment ID: 108462 Result: Down-regulated in Transcription
  misc_feature: MA Experiment 108462 PARAMETER Experiment Name: At_Germinating_Seeds_cDNA_P Parameter: Age (day) Value: 2 vs. 0
  misc_feature: MA Experiment 108462 PARAMETER Experiment Name: At_Germinating_Seeds_cDNA_P Parameter: Tissue Value: Germinating Seeds
  misc_feature: MA Experiment ID: 108463 Result: Down-regulated in Transcription
  misc_feature: MA Experiment 108463 PARAMETER Experiment Name: At_Germinating_Seeds_cDNA_P Parameter: Age (day) Value: 3 vs. 0
  misc_feature: MA Experiment 108463 PARAMETER Experiment Name: At_Germinating_Seeds_cDNA_P Parameter: Tissue Value: Germinating Seeds
  misc_feature: MA Experiment ID: 108464 Result: Down-regulated in Transcription
  misc_feature: MA Experiment 108464 PARAMETER Experiment Name: At_Germinating_Seeds_cDNA_P Parameter: Age (day) Value: 4 vs. 0
  misc_feature: MA Experiment 108464 PARAMETER Experiment Name: At_Germinating_Seeds_cDNA_P Parameter: Tissue Value: Germinating Seeds
  misc_feature: MA Experiment ID: 108577 Result: Down-regulated in Transcription
  misc_feature: MA Experiment 108577 PARAMETER Experiment Name: At_42deg_Heat_cDNA_P Parameter: Temperature (deg C) Value: 42 vs. 22
  misc_feature: MA Experiment 108577 PARAMETER Experiment Name: At_42deg_Heat_cDNA_P Parameter: Timepoint (hr) Value: 6
  misc_feature: MA Experiment 108577 PARAMETER Experiment Name: At_42deg_Heat_cDNA_P Parameter: Tissue Value: Aerial
  misc_feature: MA Experiment ID: 108595 Result: Down-regulated in Transcription
  misc_feature: MA Experiment 108595 PARAMETER Experiment Name: At_Ler-pi_Ovule_cDNA_P Parameter: Plant Line Value: null
  misc_feature: MA Experiment ID: 20000113 Result: Down-regulated in Transcription
  misc_feature: MA Experiment 20000113 PARAMETER Experiment Name: At_42deg_Heat_cDNA_P Parameter: Temperature (deg C) Value: 42 vs. 22
  misc_feature: MA Experiment 20000113 PARAMETER Experiment Name: At_42deg_Heat_cDNA_P Parameter: Timepoint (hr) Value: 8
  misc_feature: MA Experiment 20000113 PARAMETER Experiment Name: At_42deg_Heat_cDNA_P Parameter: Tissue Value: Aerial

SEQ ID NO: 33350 - protein, 360 aa, Arabidopsis thaliana; identical to SEQ ID NO: 29760
  peptide (1)..(360): Ceres Seq. ID no. 12339761
  misc_feature (59)..(355): Homolog of NCBI NO: 25372690 NR Description: F19G10.7 protein - Arabidopsis thaliana
  misc_feature (4)..(355): Homolog of NCBI NO: 18395185 NR Description: unknown protein; protein id: At1g22980.1
  misc_feature (4)..(358): Homolog of NCBI NO: 15223962 NR Description: unknown protein; protein id: At1g71150.1
  misc_feature (4)..(360): Homolog of NCBI NO: 15219987 NR Description: unknown protein

SEQ ID NO: 33351 - protein, 357 aa, Arabidopsis thaliana; identical to SEQ ID NO: 29761
  peptide (1)..(357): Ceres Seq. ID no. 12339762
  misc_feature (56)..(352): Homolog of NCBI NO: 25372690 NR Description: F19G10.7 protein - Arabidopsis thaliana
  misc_feature (1)..(352): Homolog of NCBI NO: 18395185 NR Description: unknown protein; protein id: At1g22980.1
  misc_feature (1)..(355): Homolog of NCBI NO: 15223962 NR Description: unknown protein; protein id: At1g71150.1
  misc_feature (1)..(357): Homolog of NCBI NO: 15219987 NR Description: unknown protein

SEQ ID NO: 33352 - protein, 312 aa, Arabidopsis thaliana; identical to SEQ ID NO: 29762
  peptide (1)..(312): Ceres Seq. ID no. 12339763
  misc_feature (11)..(307): Homolog of NCBI NO: 25372690 NR Description: F19G10.7 protein - Arabidopsis thaliana
  misc_feature (1)..(307): Homolog of NCBI NO: 18395185 NR Description: unknown protein; protein id: At1g22980.1
  misc_feature (1)..(310): Homolog of NCBI NO: 15223962 NR Description: unknown protein; protein id: At1g71150.1
  misc_feature (1)..(312): Homolog of NCBI NO: 15219987 NR Description: unknown protein

SEQ ID NO: 33353 - DNA, 1168 bp, Arabidopsis thaliana; identical to SEQ ID NO: 29763
  misc_feature (1)..(1168): Ceres Seq. ID no. 12396040
  misc_feature: MA Experiment ID: 20000111 Result: Up-regulated in Transcription
  misc_feature: MA Experiment 20000111 PARAMETER Experiment Name: At_42deg_Heat_cDNA_P Parameter: Temperature (deg C) Value: 42 vs. 22
  misc_feature: MA Experiment 20000111 PARAMETER Experiment Name: At_42deg_Heat_cDNA_P Parameter: Timepoint (hr) Value: 6
  misc_feature: MA Experiment 20000111 PARAMETER Experiment Name: At_42deg_Heat_cDNA_P Parameter: Tissue Value: Aerial
  misc_feature: MA Experiment ID: 20000185 Result: Up-regulated in Transcription
  misc_feature: MA Experiment 20000185 PARAMETER Experiment Name: At_Roots__P Parameter: Age (day) Value: 7 vs. 21
  misc_feature: MA Experiment 20000185 PARAMETER Experiment Name: At_Roots__P Parameter: Organism Value: A. thaliana
  misc_feature: MA Experiment 20000185 PARAMETER Experiment Name: At_Roots__P Parameter: Tissue Value: Roots vs. Whole Plant
  misc_feature: MA Experiment ID: 20000439 Result: Up-regulated in Transcription
  misc_feature: MA Experiment 20000439 PARAMETER Experiment Name: At_Roots__P Parameter: Age (day) Value: 14 vs. 21
  misc_feature: MA Experiment 20000439 PARAMETER Experiment Name: At_Roots__P Parameter: Organism Value: A. thaliana
  misc_feature: MA Experiment 20000439 PARAMETER Experiment Name: At_Roots__P Parameter: Tissue Value: Roots vs. Whole Plant
  misc_feature: MA Experiment ID: 20001451 Result: Up-regulated in Transcription
  misc_feature: MA Experiment 20001451 PARAMETER Experiment Name: At_Far-red-induction_P Parameter: Age (day) Value: 7
  misc_feature: MA Experiment 20001451 PARAMETER Experiment Name: At_Far-red-induction_P Parameter: Light Value: Far-red vs. White
  misc_feature: MA Experiment 20001451 PARAMETER Experiment Name: At_Far-red-induction_P Parameter: Organism Value: A. thaliana
  misc_feature: MA Experiment 20001451 PARAMETER Experiment Name: At_Far-red-induction_P Parameter: Plant Line Value: Columbia
  misc_feature: MA Experiment 20001451 PARAMETER Experiment Name: At_Far-red-induction_P Parameter: Timepoint (hr) Value: 24
  misc_feature: MA Experiment 20001451 PARAMETER Experiment Name: At_Far-red-induction_P Parameter: Tissue Value: Whole Plant

SEQ ID NO: 33354 - protein, 378 aa, Arabidopsis thaliana; identical to SEQ ID NO: 29764
  peptide (1)..(378): Ceres Seq. ID no. 12396041
  misc_feature (36)..(337): Homolog of NCBI NO: 32479726 NR Description: OJ991214_12.2 [Oryza sativa (japonica
  misc_feature (21)..(362): Homolog of NCBI NO: 15227574 NR Description: hypothetical protein; protein id: At2g36090.1
  misc_feature (36)..(359): Homolog of NCBI NO: 15225867 NR Description: unknown protein

SEQ ID NO: 33355 - protein, 363 aa, Arabidopsis thaliana; identical to SEQ ID NO: 29765
  peptide (1)..(363): Ceres Seq. ID no. 12396042
  misc_feature (21)..(322): Homolog of NCBI NO: 32479726 NR Description: OJ991214_12.2 [Oryza sativa (japonica
  misc_feature (6)..(347): Homolog of NCBI NO: 15227574 NR Description: hypothetical protein; protein id: At2g36090.1
  misc_feature (21)..(344): Homolog of NCBI NO: 15225867 NR Description: unknown protein

SEQ ID NO: 33356 - protein, 215 aa, Arabidopsis thaliana; identical to SEQ ID NO: 29766
  peptide (1)..(215): Ceres Seq. ID no. 12396043
  misc_feature (1)..(174): Homolog of NCBI NO: 32479726 NR Description: OJ991214_12.2 [Oryza sativa (japonica
  misc_feature (1)..(199): Homolog of NCBI NO: 15227574 NR Description: hypothetical protein; protein id: At2g36090.1
  misc_feature (1)..(196): Homolog of NCBI NO: 15225867 NR Description: unknown protein

SEQ ID NO: 33357 - DNA, 1401 bp, Arabidopsis thaliana; identical to SEQ ID NO: 29767
  misc_feature (1)..(1401): Ceres Seq. ID no. 12422582
  misc_feature: MA Experiment ID: 108577 Result: Down-regulated in Transcription
  misc_feature: MA Experiment 108577 PARAMETER Experiment Name: At_42deg_Heat_cDNA_P Parameter: Temperature (deg C) Value: 42 vs. 22
  misc_feature: MA Experiment 108577 PARAMETER Experiment Name: At_42deg_Heat_cDNA_P Parameter: Timepoint (hr) Value: 6
  misc_feature: MA Experiment 108577 PARAMETER Experiment Name: At_42deg_Heat_cDNA_P Parameter: Tissue Value: Aerial
  misc_feature: MA Experiment ID: 108585 Result: Up-regulated in Transcription
  misc_feature: MA Experiment 108585 PARAMETER Experiment Name: At_5mM_NaNP_cDNA_P Parameter: Timepoint (hr) Value: 6
  misc_feature: MA Experiment 108585 PARAMETER Experiment Name: At_5mM_NaNP_cDNA_P Parameter: Tissue Value: Aerial
  misc_feature: MA Experiment 108585 PARAMETER Experiment Name: At_5mM_NaNP_cDNA_P Parameter: Treatment Value: null
  misc_feature: MA Experiment ID: 20000185 Result: Down-regulated in Transcription
  misc_feature: MA Experiment 20000185 PARAMETER Experiment Name: At_Roots__P Parameter: Age (day) Value: 7 vs. 21
  misc_feature: MA Experiment 20000185 PARAMETER Experiment Name: At_Roots__P Parameter: Organism Value: A. thaliana
  misc_feature: MA Experiment 20000185 PARAMETER Experiment Name: At_Roots__P Parameter: Tissue Value: Roots vs. Whole Plant
  misc_feature: MA Experiment ID: 20000437 Result: Down-regulated in Transcription
  misc_feature: MA Experiment 20000437 PARAMETER Experiment Name: At_Drought_P Parameter: Age (day) Value: 8
  misc_feature: MA Experiment 20000437 PARAMETER Experiment Name: At_Drought_P Parameter: Organism Value: A. thaliana
  misc_feature: MA Experiment 20000437 PARAMETER Experiment Name: At_Drought_P Parameter: Plant Line Value: WS
  misc_feature: MA Experiment 20000437 PARAMETER Experiment Name: At_Drought_P Parameter: Timepoint (hr) Value: 24
  misc_feature: MA Experiment 20000437 PARAMETER Experiment Name: At_Drought_P Parameter: Tissue Value: Whole Plant
  misc_feature: MA Experiment 20000437 PARAMETER Experiment Name: At_Drought_P Parameter: Treatment Value: Drought vs. No Drought
  misc_feature: MA Experiment ID: 20000439 Result: Down-regulated in Transcription
  misc_feature: MA Experiment 20000439 PARAMETER Experiment Name: At_Roots__P Parameter: Age (day) Value: 14 vs. 21
  misc_feature: MA Experiment 20000439 PARAMETER Experiment Name: At_Roots__P Parameter: Organism Value: A. thaliana
  misc_feature: MA Experiment 20000439 PARAMETER Experiment Name: At_Roots__P Parameter: Tissue Value: Roots vs. Whole Plant
  misc_feature: MA Experiment ID: 20000495 Result: Up-regulated in Transcription
  misc_feature: MA Experiment 20000495 PARAMETER Experiment Name: At_Guard_Cells_P Parameter: Harvest Date Value: 8/2/2002
  misc_feature: MA Experiment 20000495 PARAMETER Experiment Name: At_Guard_Cells_P Parameter: Organism Value: A. thaliana
  misc_feature: MA Experiment 20000495 PARAMETER Experiment Name: At_Guard_Cells_P Parameter: Tissue Value: Guard Cells vs. Leaves
  misc_feature: MA Experiment ID: 20000496 Result: Up-regulated in Transcription
  misc_feature: MA Experiment 20000496 PARAMETER Experiment Name: At_Guard_Cells_P Parameter: Harvest Date Value: 7/19/2002
  misc_feature: MA Experiment 20000496 PARAMETER Experiment Name: At_Guard_Cells_P Parameter: Organism Value: Canola
  misc_feature: MA Experiment 20000496 PARAMETER Experiment Name: At_Guard_Cells_P Parameter: Tissue Value: Guard Cells vs. Leaves
  misc_feature: MA Experiment ID: 20000574 Result: Down-regulated in Transcription
  misc_feature: MA Experiment 20000574 PARAMETER Experiment Name: At_100uM_ABA_Mutants__P Parameter: Organism Value: A. thaliana
  misc_feature: MA Experiment 20000574 PARAMETER Experiment Name: At_100uM_ABA_Mutants__P Parameter: Plant Line Value: CS23 vs. Ler wt
  misc_feature: MA Experiment 20000574 PARAMETER Experiment Name: At_100uM_ABA_Mutants__P Parameter: Timepoint (hr) Value: N/A
  misc_feature: MA Experiment 20000574 PARAMETER Experiment Name: At_100uM_ABA_Mutants__P Parameter: Tissue Value: Whole Plant
  misc_feature: MA Experiment 20000574 PARAMETER Experiment Name: At_100uM_ABA_Mutants__P Parameter: Treatment Value: None
  misc_feature: MA Experiment ID: 20001557 Result: Up-regulated in Transcription
  misc_feature: MA Experiment 20001557 PARAMETER Experiment Name: At_Drought_Soil_Dry_P Parameter: Age (day) Value: 27
  misc_feature: MA Experiment 20001557 PARAMETER Experiment Name: At_Drought_Soil_Dry_P Parameter: Organism Value: A. thaliana
  misc_feature: MA Experiment 20001557 PARAMETER Experiment Name: At_Drought_Soil_Dry_P Parameter: Plant Line Value: WS
  misc_feature: MA Experiment 20001557 PARAMETER Experiment Name: At_Drought_Soil_Dry_P Parameter: Post Timepoint (hr) Value: 3
  misc_feature: MA Experiment 20001557 PARAMETER Experiment Name: At_Drought_Soil_Dry_P Parameter: Post-Treatment Value: Re-Water vs. No Drought
  misc_feature: MA Experiment 20001557 PARAMETER Experiment Name: At_Drought_Soil_Dry_P Parameter: Timepoint (day) Value: 13
  misc_feature: MA Experiment 20001557 PARAMETER Experiment Name: At_Drought_Soil_Dry_P Parameter: Treatment Value: Drought vs. No Drought
  misc_feature: MA Experiment ID: 20001904 Result: Down-regulated in Transcription
  misc_feature: MA Experiment 20001904 PARAMETER Experiment Name: At_Drought_Reproduction_P Parameter: Age (day) Value: 37
  misc_feature: MA Experiment 20001904 PARAMETER Experiment Name: At_Drought_Reproduction_P Parameter: Organism Value: A. thaliana
  misc_feature: MA Experiment 20001904 PARAMETER Experiment Name: At_Drought_Reproduction_P Parameter: Plant Line Value: WS
  misc_feature: MA Experiment 20001904 PARAMETER Experiment Name: At_Drought_Reproduction_P Parameter: Timepoint (day) Value: 7
  misc_feature: MA Experiment 20001904 PARAMETER Experiment Name: At_Drought_Reproduction_P Parameter: Tissue Value: Rosettes
  misc_feature: MA Experiment 20001904 PARAMETER Experiment Name: At_Drought_Reproduction_P Parameter: Treatment Value: Drought vs. No Drought
  misc_feature: MA Experiment ID: 20001905 Result: Down-regulated in Transcription
  misc_feature: MA Experiment 20001905 PARAMETER Experiment Name: At_Drought_Reproduction_P Parameter: Age (day) Value: 40
  misc_feature: MA Experiment 20001905 PARAMETER Experiment Name: At_Drought_Reproduction_P Parameter: Organism Value: A. thaliana
  misc_feature: MA Experiment 20001905 PARAMETER Experiment Name: At_Drought_Reproduction_P Parameter: Plant Line Value: WS
  misc_feature: MA Experiment 20001905 PARAMETER Experiment Name: At_Drought_Reproduction_P Parameter: Timepoint (day) Value: 10
  misc_feature: MA Experiment 20001905 PARAMETER Experiment Name: At_Drought_Reproduction_P Parameter: Tissue Value: Rosettes
  misc_feature: MA Experiment 20001905 PARAMETER Experiment Name: At_Drought_Reproduction_P Parameter: Treatment Value: Drought vs. No Drought
  misc_feature: MA Experiment ID: 20001911 Result: Down-regulated in Transcription
  misc_feature: MA Experiment 20001911 PARAMETER Experiment Name: At_Drought_Reproduction_P Parameter: Age (day) Value: 40
  misc_feature: MA Experiment 20001911 PARAMETER Experiment Name: At_Drought_Reproduction_P Parameter: Organism Value: A. thaliana
  misc_feature: MA Experiment 20001911 PARAMETER Experiment Name: At_Drought_Reproduction_P Parameter: Plant Line Value: WS
  misc_feature: MA Experiment 20001911 PARAMETER Experiment Name: At_Drought_Reproduction_P Parameter: Timepoint (day) Value: 10
  misc_feature: MA Experiment 20001911 PARAMETER Experiment Name: At_Drought_Reproduction_P Parameter: Tissue Value: Flowers
  misc_feature: MA Experiment 20001911 PARAMETER Experiment Name: At_Drought_Reproduction_P Parameter: Treatment Value: Drought vs. No Drought

SEQ ID NO: 33358 - protein, 288 aa, Arabidopsis thaliana; identical to SEQ ID NO: 29768
  peptide (1)..(288): Ceres Seq. ID no. 12422583
  misc_feature (64)..(273): Homolog of NCBI NO: 22971588 NR Description: hypothetical protein [Chloroflexus aurantiacus]
  misc_feature (1)..(288): Homolog of NCBI NO: 15239632 NR Description: putative protein; protein id: At5g54400.1
  misc_feature (1)..(288): Homolog of NCBI NO: 18400797 NR Description: expressed protein

SEQ ID NO: 33359 - protein, 191 aa, Arabidopsis thaliana; identical to SEQ ID NO: 29769
  peptide (1)..(191): Ceres Seq. ID no. 12422584
  misc_feature (1)..(176): Homolog of NCBI NO: 22971588 NR Description: hypothetical protein [Chloroflexus aurantiacus]
  misc_feature (1)..(191): Homolog of NCBI NO: 15239632 NR Description: putative protein; protein id: At5g54400.1
  misc_feature (1)..(191): Homolog of NCBI NO: 18400797 NR Description: expressed protein

SEQ ID NO: 33360 - protein, 187 aa, Arabidopsis thaliana; identical to SEQ ID NO: 29770
  peptide (1)..(187): Ceres Seq. ID no. 12422585
  misc_feature (1)..(172): Homolog of NCBI NO: 22971588 NR Description: hypothetical protein [Chloroflexus aurantiacus]
  misc_feature (1)..(187): Homolog of NCBI NO: 15239632 NR Description: putative protein; protein id: At5g54400.1
  misc_feature (1)..(187): Homolog of NCBI NO: 18400797 NR Description: expressed protein

SEQ ID NO: 33361 - DNA, 1107 bp, Arabidopsis thaliana; identical to SEQ ID NO: 29771
  misc_feature (1)..(1107): Ceres Seq. ID no. 12396806
  misc_feature: MA Experiment ID: 108462 Result: Down-regulated in Transcription
  misc_feature: MA Experiment 108462 PARAMETER Experiment Name: At_Germinating_Seeds_cDNA_P Parameter: Age (day) Value: 2 vs. 0
  misc_feature: MA Experiment 108462 PARAMETER Experiment Name: At_Germinating_Seeds_cDNA_P Parameter: Tissue Value: Germinating Seeds
  misc_feature: MA Experiment ID: 108488 Result: Down-regulated in Transcription
  misc_feature: MA Experiment ID: 108561 Result: Up-regulated in Transcription
  misc_feature: MA Experiment 108561 PARAMETER Experiment Name: At_100uM_ABA_cDNA_P Parameter: Timepoint (hr) Value: 6
  misc_feature: MA Experiment 108561 PARAMETER Experiment Name: At_100uM_ABA_cDNA_P Parameter: Tissue Value: Aerial
  misc_feature: MA Experiment 108561 PARAMETER Experiment Name: At_100uM_ABA_cDNA_P Parameter: Treatment Value: 100uM ABA vs. No Treatment
  misc_feature: MA Experiment ID: 108572 Result: Up-regulated in Transcription
  misc_feature: MA Experiment 108572 PARAMETER Experiment Name: At_Drought_cDNA_P Parameter: Timepoint (hr) Value: 1
  misc_feature: MA Experiment 108572 PARAMETER Experiment Name: At_Drought_cDNA_P Parameter: Tissue Value: Aerial
  misc_feature: MA Experiment 108572 PARAMETER Experiment Name: At_Drought_cDNA_P Parameter: Treatment Value: Drought vs. No Drought
  misc_feature: MA Experiment ID: 108573 Result: Up-regulated in Transcription
  misc_feature: MA Experiment 108573 PARAMETER Experiment Name: At_Drought_cDNA_P Parameter: Timepoint (hr) Value: 6
  misc_feature: MA Experiment 108573 PARAMETER Experiment Name: At_Drought_cDNA_P Parameter: Tissue Value: Aerial
  misc_feature: MA Experiment 108573 PARAMETER Experiment Name: At_Drought_cDNA_P Parameter: Treatment Value: Drought vs. No Drought
  misc_feature: MA Experiment ID: 108607 Result: Up-regulated in Transcription
  misc_feature: MA Experiment 108607 PARAMETER Experiment Name: At_100uM_ABA_cDNA_P Parameter: Timepoint (hr) Value: 4
  misc_feature: MA Experiment 108607 PARAMETER Experiment Name: At_100uM_ABA_cDNA_P Parameter: Tissue Value: Aerial
  misc_feature: MA Experiment 108607 PARAMETER Experiment Name: At_100uM_ABA_cDNA_P Parameter: Treatment Value: 100uM ABA vs. No Treatment
  misc_feature: MA Experiment ID: 108668 Result: Up-regulated in Transcription
  misc_feature: MA Experiment 108668 PARAMETER Experiment Name: At_2mM_SA_cDNA_P Parameter: Plant Line Value: WS
  misc_feature: MA Experiment 108668 PARAMETER Experiment Name: At_2mM_SA_cDNA_P Parameter: Timepoint (hr) Value: 6
  misc_feature: MA Experiment 108668 PARAMETER Experiment Name: At_2mM_SA_cDNA_P Parameter: Treatment Value: 2mM SA vs. No Treatment
  misc_feature: MA Experiment ID: 20000069 Result: Up-regulated in Transcription
  misc_feature: MA Experiment 20000069 PARAMETER Experiment Name: At_100uM_ABA_Mutants_cDNA_P Parameter: Plant Line Value: CS23
  misc_feature: MA Experiment 20000069 PARAMETER Experiment Name: At_100uM_ABA_Mutants_cDNA_P Parameter: Timepoint (hr) Value: 6
  misc_feature: MA Experiment 20000069 PARAMETER Experiment Name: At_100uM_ABA_Mutants_cDNA_P Parameter: Tissue Value: Aerial
  misc_feature: MA Experiment 20000069 PARAMETER Experiment Name: At_100uM_ABA_Mutants_cDNA_P Parameter: Treatment Value: 100uM ABA vs. No Treatment
  misc_feature: MA Experiment ID: 20000070 Result: Up-regulated in Transcription
  misc_feature: MA Experiment 20000070 PARAMETER Experiment Name: At_100uM_ABA_Mutants_cDNA_P Parameter: Plant Line Value: CS24
  misc_feature: MA Experiment 20000070 PARAMETER Experiment Name: At_100uM_ABA_Mutants_cDNA_P Parameter: Timepoint (hr) Value: 6
  misc_feature: MA Experiment 20000070 PARAMETER Experiment Name: At_100uM_ABA_Mutants_cDNA_P Parameter: Tissue Value: Aerial
  misc_feature: MA Experiment 20000070 PARAMETER Experiment Name: At_100uM_ABA_Mutants_cDNA_P Parameter: Treatment Value: 100uM ABA vs. No Treatment
  misc_feature: MA Experiment ID: 20000071 Result: Up-regulated in Transcription
  misc_feature: MA Experiment 20000071 PARAMETER Experiment Name: At_100uM_ABA_Mutants_cDNA_P Parameter: Plant Line Value: CS8104
  misc_feature: MA Experiment 20000071 PARAMETER Experiment Name: At_100uM_ABA_Mutants_cDNA_P Parameter: Timepoint (hr) Value: 6
  misc_feature: MA Experiment 20000071 PARAMETER Experiment Name: At_100uM_ABA_Mutants_cDNA_P Parameter: Tissue Value: Aerial
  misc_feature: MA Experiment 20000071 PARAMETER Experiment Name: At_100uM_ABA_Mutants_cDNA_P Parameter: Treatment Value: 100uM ABA vs. No Treatment
  misc_feature: MA Experiment ID: 20000072 Result: Up-regulated in Transcription
  misc_feature: MA Experiment 20000072 PARAMETER Experiment Name: At_100uM_ABA_Mutants_cDNA_P Parameter: Plant Line Value: CS8105
  misc_feature: MA Experiment 20000072 PARAMETER Experiment Name: At_100uM_ABA_Mutants_cDNA_P Parameter: Timepoint (hr) Value: 6
  misc_feature: MA Experiment 20000072 PARAMETER Experiment Name: At_100uM_ABA_Mutants_cDNA_P Parameter: Tissue Value: Aerial
  misc_feature: MA Experiment 20000072 PARAMETER Experiment Name: At_100uM_ABA_Mutants_cDNA_P Parameter: Treatment Value: 100uM ABA vs. No Treatment
  misc_feature: MA Experiment ID: 20000086 Result: Up-regulated in Transcription
  misc_feature: MA Experiment 20000086 PARAMETER Experiment Name: At_100uM_ABA_Mutants_cDNA_P Parameter: Plant Line Value: CS22
  misc_feature: MA Experiment 20000086 PARAMETER Experiment Name: At_100uM_ABA_Mutants_cDNA_P Parameter: Timepoint (hr) Value: 6
  misc_feature: MA Experiment 20000086 PARAMETER Experiment Name: At_100uM_ABA_Mutants_cDNA_P Parameter: Tissue Value: Aerial
  misc_feature: MA Experiment 20000086 PARAMETER Experiment Name: At_100uM_ABA_Mutants_cDNA_P Parameter: Treatment Value: 100uM ABA vs. No Treatment
  misc_feature: MA Experiment ID: 20000087 Result: Up-regulated in Transcription
  misc_feature: MA Experiment 20000087 PARAMETER Experiment Name: At_100uM_ABA_Mutants_cDNA_P Parameter: Plant Line Value: WS
  misc_feature: MA Experiment 20000087 PARAMETER Experiment Name: At_100uM_ABA_Mutants_cDNA_P Parameter: Timepoint (hr) Value: 6
  misc_feature: MA Experiment 20000087 PARAMETER Experiment Name: At_100uM_ABA_Mutants_cDNA_P Parameter: Tissue Value: Aerial
  misc_feature: MA Experiment 20000087 PARAMETER Experiment Name: At_100uM_ABA_Mutants_cDNA_P Parameter: Treatment Value: 100uM ABA vs. No Treatment
  misc_feature: MA Experiment ID: 20000088 Result: Up-regulated in Transcription
  misc_feature: MA Experiment 20000088 PARAMETER Experiment Name: At_100uM_ABA_Mutants_cDNA_P Parameter: Plant Line Value: Landsberg
  misc_feature: MA Experiment 20000088 PARAMETER Experiment Name: At_100uM_ABA_Mutants_cDNA_P Parameter: Timepoint (hr) Value: 6
  misc_feature: MA Experiment 20000088 PARAMETER Experiment Name: At_100uM_ABA_Mutants_cDNA_P Parameter: Tissue Value: Aerial
  misc_feature: MA Experiment 20000088 PARAMETER Experiment Name: At_100uM_ABA_Mutants_cDNA_P Parameter: Treatment Value: 100uM ABA vs. No Treatment
  misc_feature: MA Experiment ID: 20000117 Result: Up-regulated in Transcription
  misc_feature: MA Experiment 20000117 PARAMETER Experiment Name: At_100uM_ABA_Mutants_cDNA_P Parameter: Plant Line Value: Columbia
  misc_feature: MA Experiment 20000117 PARAMETER Experiment Name: At_100uM_ABA_Mutants_cDNA_P Parameter: Timepoint (hr) Value: 6
  misc_feature: MA Experiment 20000117 PARAMETER Experiment Name: At_100uM_ABA_Mutants_cDNA_P Parameter: Tissue Value: Aerial
  misc_feature: MA Experiment 20000117 PARAMETER Experiment Name: At_100uM_ABA_Mutants_cDNA_P Parameter: Treatment Value: 100uM ABA vs. No Treatment
  misc_feature: MA Experiment ID: 20000169 Result: Up-regulated in Transcription
  misc_feature: MA Experiment 20000169 PARAMETER Experiment Name: At_100uM_ABA_P Parameter: Age (day) Value: 14
  misc_feature: MA Experiment 20000169 PARAMETER Experiment Name: At_100uM_ABA_P Parameter: Organism Value: A. thaliana
  misc_feature: MA Experiment 20000169 PARAMETER Experiment Name: At_100uM_ABA_P Parameter: Plant Line Value: WS
  misc_feature: MA Experiment 20000169 PARAMETER Experiment Name: At_100uM_ABA_P Parameter: Timepoint (hr) Value: 6
  misc_feature: MA Experiment 20000169 PARAMETER Experiment Name: At_100uM_ABA_P Parameter: Tissue Value: Aerial
  misc_feature: MA Experiment 20000169 PARAMETER Experiment Name: At_100uM_ABA_P Parameter: Treatment Value: 100uM ABA vs. No Treatment
  misc_feature: MA Experiment ID: 20000173 Result: Down-regulated in Transcription
  misc_feature: MA Experiment 20000173 PARAMETER Experiment Name: At_42deg_Heat_P Parameter: Age (day) Value: 14
  misc_feature: MA Experiment 20000173 PARAMETER Experiment Name: At_42deg_Heat_P Parameter: Organism Value: A. thaliana
  misc_feature: MA Experiment 20000173 PARAMETER Experiment Name: At_42deg_Heat_P Parameter: Plant Line Value: WS
  misc_feature: MA Experiment 20000173 PARAMETER Experiment Name: At_42deg_Heat_P Parameter: Temperature (deg C) Value: 42 vs. 22
  misc_feature: MA Experiment 20000173 PARAMETER Experiment Name: At_42deg_Heat_P Parameter: Timepoint (hr) Value: 6
  misc_feature: MA Experiment 20000173 PARAMETER Experiment Name: At_42deg_Heat_P Parameter: Tissue Value: Aerial
  misc_feature: MA Experiment ID: 20000185 Result: Down-regulated in Transcription
  misc_feature: MA Experiment 20000185 PARAMETER Experiment Name: At_Roots__P Parameter: Age (day) Value: 7 vs. 21
  misc_feature: MA Experiment 20000185 PARAMETER Experiment Name: At_Roots__P Parameter: Organism Value: A. thaliana
  misc_feature: MA Experiment 20000185 PARAMETER Experiment Name: At_Roots__P Parameter: Tissue Value: Roots vs. Whole Plant
  misc_feature: MA Experiment ID: 20000234 Result: Down-regulated in Transcription
  misc_feature: MA Experiment 20000234 PARAMETER Experiment Name: At_Siliques_P Parameter: Age (day) Value: 21
  misc_feature: MA Experiment 20000234 PARAMETER Experiment Name: At_Siliques_P Parameter: Organism Value: A. thaliana
  misc_feature: MA Experiment 20000234 PARAMETER Experiment Name: At_Siliques_P Parameter: Plant Line Value: WS
  misc_feature: MA Experiment 20000234 PARAMETER Experiment Name: At_Siliques_P Parameter: Tissue Value: Less Than 5mm Siliques vs. Whole Plant
  misc_feature: MA Experiment ID: 20000235 Result: Down-regulated in Transcription
  misc_feature: MA Experiment 20000235 PARAMETER Experiment Name: At_Siliques_P Parameter: Age (day) Value: 21
  misc_feature: MA Experiment 20000235 PARAMETER Experiment Name: At_Siliques_P Parameter: Organism Value: A. thaliana
  misc_feature: MA Experiment 20000235 PARAMETER Experiment Name: At_Siliques_P Parameter: Plant Line Value: WS
  misc_feature: MA Experiment 20000235 PARAMETER Experiment Name: At_Siliques_P Parameter: Tissue Value: 5-10mm Siliques vs. Whole Plant
  misc_feature: MA Experiment ID: 20000265 Result: Down-regulated in Transcription
  misc_feature: MA Experiment 20000265 PARAMETER Experiment Name: At_Open_Flower_P Parameter: Age (day) Value: 21
  misc_feature: MA Experiment 20000265 PARAMETER Experiment Name: At_Open_Flower_P Parameter: Plant Line Value: WS
  misc_feature: MA Experiment 20000265 PARAMETER Experiment Name: At_Open_Flower_P Parameter: Tissue Value: Closed Flower vs. Whole Plant
  misc_feature: MA Experiment ID: 20000267 Result: Up-regulated in Transcription
  misc_feature: MA Experiment 20000267 PARAMETER Experiment Name: At_Drought_P Parameter: Age (day) Value: 7
  misc_feature: MA Experiment 20000267 PARAMETER Experiment Name: At_Drought_P Parameter: Organism Value: A. thaliana
  misc_feature: MA Experiment 20000267 PARAMETER Experiment Name: At_Drought_P Parameter: Plant Line Value: WS
  misc_feature: MA Experiment 20000267 PARAMETER Experiment Name: At_Drought_P Parameter: Timepoint (hr) Value: 6
  misc_feature: MA Experiment 20000267 PARAMETER Experiment Name: At_Drought_P Parameter: Tissue Value: Whole Plant
  misc_feature: MA Experiment 20000267 PARAMETER Experiment Name: At_Drought_P Parameter: Treatment Value: Drought vs. No Drought
  misc_feature: MA Experiment ID: 20000286 Result: Down-regulated in Transcription
  misc_feature: MA Experiment 20000286 PARAMETER Experiment Name: At_Open_Flower_P Parameter: Age (day) Value: 21
  misc_feature: MA Experiment 20000286 PARAMETER Experiment Name: At_Open_Flower_P Parameter: Plant Line Value: WS
  misc_feature: MA Experiment 20000286 PARAMETER Experiment Name: At_Open_Flower_P Parameter: Tissue Value: Half Open vs. Whole Plant
  misc_feature: MA Experiment ID: 20000436 Result: Up-regulated in Transcription
  misc_feature: MA Experiment 20000436 PARAMETER Experiment Name: At_Drought_P Parameter: Age (day) Value: 7
  misc_feature: MA Experiment 20000436 PARAMETER Experiment Name: At_Drought_P Parameter: Organism Value: A. thaliana
  misc_feature: MA Experiment 20000436 PARAMETER Experiment Name: At_Drought_P Parameter: Plant Line Value: WS
  misc_feature: MA Experiment 20000436 PARAMETER Experiment Name: At_Drought_P Parameter: Timepoint (hr) Value: 12
  misc_feature: MA Experiment 20000436 PARAMETER Experiment Name: At_Drought_P Parameter: Tissue Value: Whole Plant
  misc_feature: MA Experiment 20000436 PARAMETER Experiment Name: At_Drought_P Parameter: Treatment Value: Drought vs. No Drought
  misc_feature: MA Experiment ID: 20000437 Result: Up-regulated in Transcription
  misc_feature: MA Experiment 20000437 PARAMETER Experiment Name: At_Drought_P Parameter: Age (day) Value: 8
  misc_feature: MA Experiment 20000437 PARAMETER Experiment Name: At_Drought_P Parameter: Organism Value: A. thaliana
  misc_feature: MA Experiment 20000437 PARAMETER Experiment Name: At_Drought_P Parameter: Plant Line Value: WS
  misc_feature: MA Experiment 20000437 PARAMETER Experiment Name: At_Drought_P Parameter: Timepoint (hr) Value: 24
  misc_feature: MA Experiment 20000437 PARAMETER Experiment Name: At_Drought_P Parameter: Tissue Value: Whole Plant
  misc_feature: MA Experiment 20000437 PARAMETER Experiment Name: At_Drought_P Parameter: Treatment Value: Drought vs. No Drought
  misc_feature: MA Experiment ID: 20000438 Result: Down-regulated in Transcription
  misc_feature: MA Experiment 20000438 PARAMETER Experiment Name: At_Shoots__P Parameter: Age (day) Value: 14
  misc_feature: MA Experiment 20000438 PARAMETER Experiment Name: At_Shoots__P Parameter: Tissue Value: Shoots vs. Whole Plant
  misc_feature: MA Experiment ID: 20000439 Result: Down-regulated in Transcription
  misc_feature: MA Experiment 20000439 PARAMETER Experiment Name: At_Roots__P Parameter: Age (day) Value: 14 vs. 21
  misc_feature: MA Experiment 20000439 PARAMETER Experiment Name: At_Roots__P Parameter: Organism Value: A. thaliana
  misc_feature: MA Experiment 20000439 PARAMETER Experiment Name: At_Roots__P Parameter: Tissue Value: Roots vs. Whole Plant
  misc_feature: MA Experiment ID: 20000453 Result: Up-regulated in Transcription
  misc_feature: MA Experiment 20000453 PARAMETER Experiment Name: At_100uM_ABA_P Parameter: Age (day) Value: 15
  misc_feature: MA Experiment 20000453 PARAMETER Experiment Name: At_100uM_ABA_P Parameter: Organism Value: A. thaliana
  misc_feature: MA Experiment 20000453 PARAMETER Experiment Name: At_100uM_ABA_P Parameter: Plant Line Value: WS
  misc_feature: MA Experiment 20000453 PARAMETER Experiment Name: At_100uM_ABA_P Parameter: Timepoint (hr) Value: 24
  misc_feature: MA Experiment 20000453 PARAMETER Experiment Name: At_100uM_ABA_P Parameter: Tissue Value: Aerial
  misc_feature: MA Experiment 20000453 PARAMETER Experiment Name: At_100uM_ABA_P Parameter: Treatment Value: 100uM ABA vs. No Treatment
  misc_feature: MA Experiment ID: 20000527 Result: Down-regulated in Transcription
  misc_feature: MA Experiment 20000527 PARAMETER Experiment Name: At_10percent_PEG_P Parameter: Age (day) Value: 20
  misc_feature: MA Experiment 20000527 PARAMETER Experiment Name: At_10percent_PEG_P Parameter: Organism Value: A. thaliana
  misc_feature: MA Experiment 20000527 PARAMETER Experiment Name: At_10percent_PEG_P Parameter: Plant Line Value: WS
  misc_feature: MA Experiment 20000527 PARAMETER Experiment Name: At_10percent_PEG_P Parameter: Timepoint (day) Value: 20
  misc_feature: MA Experiment 20000527 PARAMETER Experiment Name: At_10percent_PEG_P Parameter: Tissue Value: Whole Plant
  misc_feature: MA Experiment 20000527 PARAMETER Experiment Name: At_10percent_PEG_P Parameter: Treatment Value: 10percent PEG vs. No Treatment
  misc_feature: MA Experiment ID: 20000573 Result: Up-regulated in Transcription
  misc_feature: MA Experiment 20000573 PARAMETER Experiment Name: At_100uM_ABA_Mutants__P Parameter: Organism Value: A. thaliana
  misc_feature: MA Experiment 20000573 PARAMETER Experiment Name: At_100uM_ABA_Mutants__P Parameter: Plant Line Value: CS22 vs. Ler wt
  misc_feature: MA Experiment 20000573 PARAMETER Experiment Name: At_100uM_ABA_Mutants__P Parameter: Timepoint (hr) Value: N/A
  misc_feature: MA Experiment 20000573 PARAMETER Experiment Name: At_100uM_ABA_Mutants__P Parameter: Tissue Value: Whole Plant
  misc_feature: MA Experiment 20000573 PARAMETER Experiment Name: At_100uM_ABA_Mutants__P Parameter: Treatment Value: None
  misc_feature: MA Experiment ID: 20000709 Result: Down-regulated in Transcription
  misc_feature: MA Experiment 20000709 PARAMETER Experiment Name: At_15mM_NH4NO3_L-to-H_P Parameter: Age (hr) Value: 14
  misc_feature: MA Experiment 20000709 PARAMETER Experiment Name: At_15mM_NH4NO3_L-to-H_P Parameter: Organism Value: A. thaliana
  misc_feature: MA Experiment 20000709 PARAMETER Experiment Name: At_15mM_NH4NO3_L-to-H_P Parameter: Plant Line Value: WS
  misc_feature: MA Experiment 20000709 PARAMETER Experiment Name: At_15mM_NH4NO3_L-to-H_P Parameter: Timepoint (hr) Value: 4
  misc_feature: MA Experiment 20000709 PARAMETER Experiment Name: At_15mM_NH4NO3_L-to-H_P Parameter: Tissue Value: Aerial
  misc_feature: MA Experiment 20000709 PARAMETER Experiment Name: At_15mM_NH4NO3_L-to-H_P Parameter: Treatment Value: 15mM NH4NO3 vs. 30mM Mannitol
  misc_feature: MA Experiment ID: 20000794 Result: Up-regulated in Transcription
  misc_feature: MA Experiment 20000794 PARAMETER Experiment Name: At_Petals_P Parameter: Age (day) Value: 23-25 days
  misc_feature: MA Experiment 20000794 PARAMETER Experiment Name: At_Petals_P Parameter: Plant Line Value: WS
  misc_feature: MA Experiment 20000794 PARAMETER Experiment Name: At_Petals_P Parameter: Tissue Value: Petals vs. Whole plant
  misc_feature: MA Experiment ID: 20001450 Result: Up-regulated in Transcription
  misc_feature: MA Experiment 20001450 PARAMETER Experiment Name: At_Far-red-induction_P Parameter: Age (day) Value: 7
  misc_feature: MA Experiment 20001450 PARAMETER Experiment Name: At_Far-red-induction_P Parameter: Light Value: Far-red vs. White
  misc_feature: MA Experiment 20001450 PARAMETER Experiment Name: At_Far-red-induction_P Parameter: Organism Value: A. thaliana
  misc_feature: MA Experiment 20001450 PARAMETER Experiment Name: At_Far-red-induction_P Parameter: Plant Line Value: Columbia
  misc_feature: MA Experiment 20001450 PARAMETER Experiment Name: At_Far-red-induction_P Parameter: Timepoint (hr) Value: 8
  misc_feature: MA Experiment 20001450 PARAMETER Experiment Name: At_Far-red-induction_P Parameter: Tissue Value: Whole Plant
  misc_feature: MA Experiment ID: 20001451 Result: Up-regulated in Transcription
  misc_feature: MA Experiment 20001451 PARAMETER Experiment Name: At_Far-red-induction_P Parameter: Age (day) Value: 7
  misc_feature: MA Experiment 20001451 PARAMETER Experiment Name: At_Far-red-induction_P Parameter: Light Value: Far-red vs. White
  misc_feature: MA Experiment 20001451 PARAMETER Experiment Name: At_Far-red-induction_P Parameter: Organism Value: A. thaliana
  misc_feature: MA Experiment 20001451 PARAMETER Experiment Name: At_Far-red-induction_P Parameter: Plant Line Value: Columbia
  misc_feature: MA Experiment 20001451 PARAMETER Experiment Name: At_Far-red-induction_P Parameter: Timepoint (hr) Value: 24
  misc_feature: MA Experiment 20001451 PARAMETER Experiment Name: At_Far-red-induction_P Parameter: Tissue Value: Whole Plant
  misc_feature: MA Experiment ID: 20001554 Result: Up-regulated in Transcription
  misc_feature: MA Experiment 20001554 PARAMETER Experiment Name: At_Drought_Soil_Dry_P Parameter: Age (day) Value: 21
  misc_feature: MA Experiment 20001554 PARAMETER Experiment Name: At_Drought_Soil_Dry_P Parameter: Organism Value: A. thaliana
  misc_feature: MA Experiment 20001554 PARAMETER Experiment Name: At_Drought_Soil_Dry_P Parameter: Plant Line Value: WS
  misc_feature: MA Experiment 20001554 PARAMETER Experiment Name: At_Drought_Soil_Dry_P Parameter: Post Timepoint (hr) Value: None
  misc_feature: MA Experiment 20001554 PARAMETER Experiment Name: At_Drought_Soil_Dry_P Parameter: Post-Treatment Value: None
  misc_feature: MA Experiment 20001554 PARAMETER Experiment Name: At_Drought_Soil_Dry_P Parameter: Timepoint (day) Value: 7
  misc_feature: MA Experiment 20001554 PARAMETER Experiment Name: At_Drought_Soil_Dry_P Parameter: Treatment Value: Drought vs. No Drought
  misc_feature: MA Experiment ID: 20001555 Result: Up-regulated in Transcription
  misc_feature: MA Experiment 20001555 PARAMETER Experiment Name: At_Drought_Soil_Dry_P Parameter: Age (day) Value: 24
  misc_feature: MA Experiment 20001555 PARAMETER Experiment Name: At_Drought_Soil_Dry_P Parameter: Organism Value: A. thaliana
  misc_feature: MA Experiment 20001555 PARAMETER Experiment Name: At_Drought_Soil_Dry_P Parameter: Plant Line Value: WS
  misc_feature: MA Experiment 20001555 PARAMETER Experiment Name: At_Drought_Soil_Dry_P Parameter: Post Timepoint (hr) Value: None
  misc_feature: MA Experiment 20001555 PARAMETER Experiment Name: At_Drought_Soil_Dry_P Parameter: Post-Treatment Value: None
  misc_feature: MA Experiment 20001555 PARAMETER Experiment Name: At_Drought_Soil_Dry_P Parameter: Timepoint (day) Value: 10
  misc_feature: MA Experiment 20001555 PARAMETER Experiment Name: At_Drought_Soil_Dry_P Parameter: Treatment Value: Drought vs. No Drought
  misc_feature: MA Experiment ID: 20001558 Result: Down-regulated in Transcription
  misc_feature: MA Experiment 20001558 PARAMETER Experiment Name: At_Drought_Soil_Dry_P Parameter: Age (day) Value: 27
  misc_feature: MA Experiment 20001558 PARAMETER Experiment Name: At_Drought_Soil_Dry_P Parameter: Organism Value: A. thaliana
  misc_feature: MA Experiment 20001558 PARAMETER Experiment Name: At_Drought_Soil_Dry_P Parameter: Plant Line Value: WS
  misc_feature: MA Experiment 20001558 PARAMETER Experiment Name: At_Drought_Soil_Dry_P Parameter: Post Timepoint (hr) Value: 6
  misc_feature: MA Experiment 20001558 PARAMETER Experiment Name: At_Drought_Soil_Dry_P Parameter: Post-Treatment Value: Re-Water vs. No Drought
  misc_feature: MA Experiment 20001558 PARAMETER Experiment Name: At_Drought_Soil_Dry_P Parameter: Timepoint (day) Value: 13
  misc_feature: MA Experiment 20001558 PARAMETER Experiment Name: At_Drought_Soil_Dry_P Parameter: Treatment Value: Drought vs. No Drought
  misc_feature: MA Experiment ID: 20001904 Result: Up-regulated in Transcription
  misc_feature: MA Experiment 20001904 PARAMETER Experiment Name: At_Drought_Reproduction_P Parameter: Age (day) Value: 37
  misc_feature: MA Experiment 20001904 PARAMETER Experiment Name: At_Drought_Reproduction_P Parameter: Organism Value: A. thaliana
  misc_feature: MA Experiment 20001904 PARAMETER Experiment Name: At_Drought_Reproduction_P Parameter: Plant Line Value: WS
  misc_feature: MA Experiment 20001904 PARAMETER Experiment Name: At_Drought_Reproduction_P Parameter: Timepoint (day) Value: 7
  misc_feature: MA Experiment 20001904 PARAMETER Experiment Name: At_Drought_Reproduction_P Parameter: Tissue Value: Rosettes
  misc_feature: MA Experiment 20001904 PARAMETER Experiment Name: At_Drought_Reproduction_P Parameter: Treatment Value: Drought vs. No Drought
  misc_feature: MA Experiment ID: 20001906 Result: Up-regulated in Transcription
  misc_feature: MA Experiment 20001906 PARAMETER Experiment Name: At_Drought_Reproduction_P Parameter: Age (day) Value: 35
  misc_feature: MA Experiment 20001906 PARAMETER Experiment Name: At_Drought_Reproduction_P Parameter: Organism Value: A. thaliana
  misc_feature: MA Experiment 20001906 PARAMETER Experiment Name: At_Drought_Reproduction_P Parameter: Plant Line Value: WS
  misc_feature: MA Experiment 20001906 PARAMETER Experiment Name: At_Drought_Reproduction_P Parameter: Timepoint (day) Value: 5
  misc_feature: MA Experiment 20001906 PARAMETER Experiment Name: At_Drought_Reproduction_P Parameter: Tissue Value: Siliques
  misc_feature: MA Experiment 20001906 PARAMETER Experiment Name: At_Drought_Reproduction_P Parameter: Treatment Value: Drought vs. No Drought
  misc_feature: MA Experiment ID: 20001907 Result: Up-regulated in Transcription
  misc_feature: MA Experiment 20001907 PARAMETER Experiment Name: At_Drought_Reproduction_P Parameter: Age (day) Value: 37
  misc_feature: MA Experiment 20001907 PARAMETER Experiment Name: At_Drought_Reproduction_P Parameter: Organism Value: A. thaliana
  misc_feature: MA Experiment 20001907 PARAMETER Experiment Name: At_Drought_Reproduction_P Parameter: Plant Line Value: WS
  misc_feature: MA Experiment 20001907 PARAMETER Experiment Name: At_Drought_Reproduction_P Parameter: Timepoint (day) Value: 7
  misc_feature: MA Experiment 20001907 PARAMETER Experiment Name: At_Drought_Reproduction_P Parameter: Tissue Value: Siliques
  misc_feature: MA Experiment 20001907 PARAMETER Experiment Name: At_Drought_Reproduction_P Parameter: Treatment Value: Drought vs. No Drought
  misc_feature: MA Experiment ID: 20001908 Result: Up-regulated in Transcription
  misc_feature: MA Experiment 20001908 PARAMETER Experiment Name: At_Drought_Reproduction_P Parameter: Age (day) Value: 40
  misc_feature: MA Experiment 20001908 PARAMETER Experiment Name: At_Drought_Reproduction_P Parameter: Organism Value: A. thaliana
  misc_feature: MA Experiment 20001908 PARAMETER Experiment Name: At_Drought_Reproduction_P Parameter: Plant Line Value: WS
  misc_feature: MA Experiment 20001908 PARAMETER Experiment Name: At_Drought_Reproduction_P Parameter: Timepoint (day) Value: 10
  misc_feature: MA Experiment 20001908 PARAMETER Experiment Name: At_Drought_Reproduction_P Parameter: Tissue Value: Siliques
  misc_feature: MA Experiment 20001908 PARAMETER Experiment Name: At_Drought_Reproduction_P Parameter: Treatment Value: Drought vs. No Drought

SEQ ID NO: 33362 - protein, 273 aa, Arabidopsis thaliana; identical to SEQ ID NO: 29772
  peptide (1)..(273): Ceres Seq. ID no. 12396807
  misc_feature (52)..(201): Homolog of NCBI NO: 18311568 NR Description: hypothetical protein [Clostridium perfringens]
  misc_feature (52)..(199): Homolog of NCBI NO: 15896657 NR Description: Uncharacterized protein, homolog of YYBI fused to uncharacterized domain similar to A.thaliana (gi:3292817
  misc_feature (45)..(179): Homolog of NCBI NO: 38567838 NR Description: OSJNBb0020J19.16 [Oryza sativa (japonica
  misc_feature (38)..(212): Homolog of NCBI NO: 18401163 NR Description: expressed protein
  misc_feature (38)..(212): Homolog of NCBI NO: 8778672 NR Description: F9C16.20 [Arabidopsis thaliana]
  misc_feature (44)..(257): Homolog of NCBI NO: 15234348 NR Description: putative protein; protein id: At4g11910.1
  misc_feature (1)..(270): Homolog of NCBI NO: 21592527 NR Description: unknown [Arabidopsis thaliana]
  misc_feature (1)..(270): Homolog of NCBI NO: 18416035 NR Description: expressed protein
  misc_feature (1)..(240): Homolog of NCBI NO: 15234348 NR Description: putative protein; protein id: At4g11910.1

SEQ ID NO: 33363 - protein, 260 aa, Arabidopsis thaliana; identical to SEQ ID NO: 29773
  peptide (1)..(260): Ceres Seq. ID no. 12396808
  misc_feature (39)..(188): Homolog of NCBI NO: 18311568 NR Description: hypothetical protein [Clostridium perfringens]
  misc_feature (39)..(186): Homolog of NCBI NO: 15896657 NR Description: Uncharacterized protein, homolog of YYBI fused to uncharacterized domain similar to A.thaliana (gi:3292817
  misc_feature (32)..(166): Homolog of NCBI NO: 38567838 NR Description: OSJNBb0020J19.16 [Oryza sativa (japonica
  misc_feature (25)..(199): Homolog of NCBI NO: 18401163 NR Description: expressed protein
  misc_feature (25)..(199): Homolog of NCBI NO: 8778672 NR Description: F9C16.20 [Arabidopsis thaliana]
  misc_feature (31)..(244): Homolog of NCBI NO: 15234348 NR Description: putative protein; protein id: At4g11910.1
  misc_feature (1)..(257): Homolog of NCBI NO: 21592527 NR Description: unknown [Arabidopsis thaliana]
  misc_feature (1)..(257): Homolog of NCBI NO: 18416035 NR Description: expressed protein
  misc_feature (1)..(227): Homolog of NCBI NO: 15234348 NR Description: putative protein; protein id: At4g11910.1

SEQ ID NO: 33364 - protein, 238 aa, Arabidopsis thaliana; identical to SEQ ID NO: 29774
  peptide (1)..(238): Ceres Seq. ID no. 12396809
  misc_feature (17)..(166): Homolog of NCBI NO: 18311568 NR Description: hypothetical protein [Clostridium perfringens]
  misc_feature (17)..(164): Homolog of NCBI NO: 15896657 NR Description: Uncharacterized protein, homolog of YYBI fused to uncharacterized domain similar to A.thaliana (gi:3292817
  misc_feature (10)..(144): Homolog of NCBI NO: 38567838 NR Description: OSJNBb0020J19.16 [Oryza sativa (japonica
  misc_feature (3)..(177): Homolog of NCBI NO: 18401163 NR Description: expressed protein
  misc_feature (3)..(177): Homolog of NCBI NO: 8778672 NR Description: F9C16.20 [Arabidopsis thaliana]
  misc_feature (9)..(222): Homolog of NCBI NO: 15234348 NR Description: putative protein; protein id: At4g11910.1
  misc_feature (1)..(235): Homolog of NCBI NO: 21592527 NR Description: unknown [Arabidopsis thaliana]
  misc_feature (1)..(235): Homolog of NCBI NO: 18416035 NR Description: expressed protein
  misc_feature (1)..(205): Homolog of NCBI NO: 15234348 NR Description: putative protein; protein id: At4g11910.1

SEQ ID NO: 33365 - DNA, 1016 bp, Arabidopsis thaliana; identical to SEQ ID NO: 29775
  misc_feature (1)..(1016): Ceres Seq. ID no. 12321335
  misc_feature: MA Experiment ID: 108434 Result: Down-regulated in Transcription
  misc_feature: MA Experiment 108434 PARAMETER Experiment Name: At_Root_Tips_cDNA_P Parameter: Tissue Value: Root Tips
  misc_feature: MA Experiment ID: 108573 Result: Up-regulated in Transcription
  misc_feature: MA Experiment 108573 PARAMETER Experiment Name: At_Drought_cDNA_P Parameter: Timepoint (hr) Value: 6
  misc_feature: MA Experiment 108573 PARAMETER Experiment Name: At_Drought_cDNA_P Parameter: Tissue Value: Aerial
  misc_feature: MA Experiment 108573 PARAMETER Experiment Name: At_Drought_cDNA_P Parameter: Treatment Value: Drought vs. No Drought
  misc_feature: MA Experiment ID: 108585 Result: Up-regulated in Transcription
  misc_feature: MA Experiment 108585 PARAMETER Experiment Name: At_5mM_NaNP_cDNA_P Parameter: Timepoint (hr) Value: 6
  misc_feature: MA Experiment 108585 PARAMETER Experiment Name: At_5mM_NaNP_cDNA_P Parameter: Tissue Value: Aerial
  misc_feature: MA Experiment 108585 PARAMETER Experiment Name: At_5mM_NaNP_cDNA_P Parameter: Treatment Value: null
  misc_feature: MA Experiment ID: 108668 Result: Up-regulated in Transcription
  misc_feature: MA Experiment 108668 PARAMETER Experiment Name: At_2mM_SA_cDNA_P Parameter: Plant Line Value: WS
  misc_feature: MA Experiment 108668 PARAMETER Experiment Name: At_2mM_SA_cDNA_P Parameter: Timepoint (hr) Value: 6
  misc_feature: MA Experiment 108668 PARAMETER Experiment Name: At_2mM_SA_cDNA_P Parameter: Treatment Value: 2mM SA vs. No Treatment
  misc_feature: MA Experiment ID: 20000224 Result: Down-regulated in Transcription

SEQ ID NO: 33366 - protein, 256 aa, Arabidopsis thaliana; identical to SEQ ID NO: 29776
  peptide (1)..(256): Ceres Seq. ID no. 12321336
  misc_feature (42)..(255): Pfam Name: Uncharacterised protein family UPF0005 Pfam Description: Uncharacterised protein family UPF0005
  misc_feature (21)..(252): Homolog of NCBI NO: 15235466 NR Description: putative glutamate-/aspartate-binding peptide
  misc_feature (24)..(256): Homolog of NCBI NO: 15229411 NR Description: putative protein; protein id: At3g63310.1
  misc_feature (21)..(255): Homolog of NCBI NO: 15218701 NR Description: putative glutamate/aspartate-binding peptide
  misc_feature (34)..(256): Homolog of NCBI NO: 14626300 NR Description: putative receptor-associated protein
  misc_feature (96)..(209): Homolog of NCBI NO: 7485070 NR Description: hypothetical protein - Arabidopsis thaliana
  misc_feature (20)..(255): Homolog of NCBI NO: 34393841 NR Description: putative z-protein [Oryza sativa (japonica
  misc_feature (118)..(207): Homolog of NCBI NO: 7485070 NR Description: hypothetical protein - Arabidopsis thaliana
  misc_feature (1)..(99): Homolog of NCBI NO: 7485070 NR Description: hypothetical protein - Arabidopsis thaliana
  misc_feature (1)..(216): Homolog of NCBI NO: 15810201 NR Description: AT4g15470/dl3775w [Arabidopsis thaliana]
  misc_feature (1)..(256): Homolog of NCBI NO: 18414455 NR Description: Expressed protein

SEQ ID NO: 33367 - protein, 245 aa, Arabidopsis thaliana; identical to SEQ ID NO: 29777
  peptide (1)..(245): Ceres Seq. ID no. 12321337
  misc_feature (31)..(244): Pfam Name: Uncharacterised protein family UPF0005 Pfam Description: Uncharacterised protein family UPF0005
  misc_feature (10)..(241): Homolog of NCBI NO: 15235466 NR Description: putative glutamate-/aspartate-binding peptide
  misc_feature (13)..(245): Homolog of NCBI NO: 15229411 NR Description: putative protein; protein id: At3g63310.1
  misc_feature (10)..(244): Homolog of NCBI NO: 15218701 NR Description: putative glutamate/aspartate-binding peptide
  misc_feature (23)..(245): Homolog of NCBI NO: 14626300 NR Description: putative receptor-associated protein
  misc_feature (85)..(198): Homolog of NCBI NO: 7485070 NR Description: hypothetical protein - Arabidopsis thaliana
  misc_feature (9)..(244): Homolog of NCBI NO: 34393841 NR Description: putative z-protein [Oryza sativa (japonica
  misc_feature (107)..(196): Homolog of NCBI NO: 7485070 NR Description: hypothetical protein - Arabidopsis thaliana
  misc_feature (1)..(88): Homolog of NCBI NO: 7485070 NR Description: hypothetical protein - Arabidopsis thaliana
  misc_feature (1)..(205): Homolog of NCBI NO: 15810201 NR Description: AT4g15470/dl3775w [Arabidopsis thaliana]
  misc_feature (1)..(245): Homolog of NCBI NO: 18414455 NR Description: Expressed protein

SEQ ID NO: 33368 - protein, 230 aa, Arabidopsis thaliana; identical to SEQ ID NO: 29778
  peptide (1)..(230): Ceres Seq. ID no. 12321338
  misc_feature (16)..(229): Pfam Name: Uncharacterised protein family UPF0005 Pfam Description: Uncharacterised protein family UPF0005
  misc_feature (1)..(226): Homolog of NCBI NO: 15235466 NR Description: putative glutamate-/aspartate-binding peptide
  misc_feature (1)..(230): Homolog of NCBI NO: 15229411 NR Description: putative protein; protein id: At3g63310.1
  misc_feature (1)..(229): Homolog of NCBI NO: 15218701 NR Description: putative glutamate/aspartate-binding peptide
  misc_feature (8)..(230): Homolog of NCBI NO: 14626300 NR Description: putative receptor-associated protein
  misc_feature (70)..(183): Homolog of NCBI NO: 7485070 NR Description: hypothetical protein - Arabidopsis thaliana
  misc_feature (1)..(229): Homolog of NCBI NO: 34393841 NR Description: putative z-protein [Oryza sativa (japonica
  misc_feature (92)..(181): Homolog of NCBI NO: 7485070 NR Description: hypothetical protein - Arabidopsis thaliana
  misc_feature (1)..(73): Homolog of NCBI NO: 7485070 NR Description: hypothetical protein - Arabidopsis thaliana
  misc_feature (1)..(190): Homolog of NCBI NO: 15810201 NR Description: AT4g15470/dl3775w [Arabidopsis thaliana]
  misc_feature (1)..(230): Homolog of NCBI NO: 18414455 NR Description: Expressed protein

SEQ ID NO: 33369 - DNA, 1957 bp, Arabidopsis thaliana; identical to SEQ ID NO: 29779
  misc_feature (1)..(1957): Ceres Seq. ID no. 12396656
  misc_feature: MA Experiment ID: 108433 Result: Down-regulated in Transcription
  misc_feature: MA Experiment 108433 PARAMETER Experiment Name: At_rhl_Mutant2_cDNA_P Parameter: Age (day) Value: 7
  misc_feature: MA Experiment 108433 PARAMETER Experiment Name: At_rhl_Mutant2_cDNA_P Parameter: Organism Value: A. thaliana
  misc_feature: MA Experiment 108433 PARAMETER Experiment Name: At_rhl_Mutant2_cDNA_P Parameter: Plant Line Value: rhl Mutant vs. wt landsburg
  misc_feature: MA Experiment 108433 PARAMETER Experiment Name: At_rhl_Mutant2_cDNA_P Parameter: Tissue Value: Roots
  misc_feature: MA Experiment ID: 108434 Result: Up-regulated in Transcription
  misc_feature: MA Experiment 108434 PARAMETER Experiment Name: At_Root_Tips_cDNA_P Parameter: Tissue Value: Root Tips
  misc_feature: MA Experiment ID: 108435 Result: Up-regulated in Transcription
  misc_feature: MA Experiment 108435 PARAMETER Experiment Name: At_stm_Mutants_cDNA_P Parameter: Plant Line Value: wt Landsburg vs stm
  misc_feature: MA Experiment 108435 PARAMETER Experiment Name: At_stm_Mutants_cDNA_P Parameter: Tissue Value: Shoot Apical Meristem Region
  misc_feature: MA Experiment ID: 108461 Result: Down-regulated in Transcription
  misc_feature: MA Experiment 108461 PARAMETER Experiment Name: At_Germinating_Seeds_cDNA_P Parameter: Age (day) Value: 1 vs. 0
  misc_feature: MA Experiment 108461 PARAMETER Experiment Name: At_Germinating_Seeds_cDNA_P Parameter: Tissue Value: Germinating Seeds
  misc_feature: MA Experiment ID: 108462 Result: Down-regulated in Transcription
  misc_feature: MA Experiment 108462 PARAMETER Experiment Name: At_Germinating_Seeds_cDNA_P Parameter: Age (day) Value: 2 vs. 0
  misc_feature: MA Experiment 108462 PARAMETER Experiment Name: At_Germinating_Seeds_cDNA_P Parameter: Tissue Value: Germinating Seeds
  misc_feature: MA Experiment ID: 108463 Result: Down-regulated in Transcription
  misc_feature: MA Experiment 108463 PARAMETER Experiment Name: At_Germinating_Seeds_cDNA_P Parameter: Age (day) Value: 3 vs. 0
  misc_feature: MA Experiment 108463 PARAMETER Experiment Name: At_Germinating_Seeds_cDNA_P Parameter: Tissue Value: Germinating Seeds
  misc_feature: MA Experiment ID: 108464 Result: Down-regulated in Transcription
  misc_feature: MA Experiment 108464 PARAMETER Experiment Name: At_Germinating_Seeds_cDNA_P Parameter: Age (day) Value: 4 vs. 0
  misc_feature: MA Experiment 108464 PARAMETER Experiment Name: At_Germinating_Seeds_cDNA_P Parameter: Tissue Value: Germinating Seeds
  misc_feature: MA Experiment ID: 108573 Result: Down-regulated in Transcription
  misc_feature: MA Experiment 108573 PARAMETER Experiment Name: At_Drought_cDNA_P Parameter: Timepoint (hr) Value: 6
  misc_feature: MA Experiment 108573 PARAMETER Experiment Name: At_Drought_cDNA_P Parameter: Tissue Value: Aerial
  misc_feature: MA Experiment 108573 PARAMETER Experiment Name: At_Drought_cDNA_P Parameter: Treatment Value: Drought vs. No Drought
  misc_feature: MA Experiment ID: 20000169 Result: Down-regulated in Transcription
  misc_feature: MA Experiment 20000169 PARAMETER Experiment Name: At_100uM_ABA_P Parameter: Age (day) Value: 14
  misc_feature: MA Experiment 20000169 PARAMETER Experiment Name: At_100uM_ABA_P Parameter: Organism Value: A. thaliana
  misc_feature: MA Experiment 20000169 PARAMETER Experiment Name: At_100uM_ABA_P Parameter: Plant Line Value: WS
  misc_feature: MA Experiment 20000169 PARAMETER Experiment Name: At_100uM_ABA_P Parameter: Timepoint (hr) Value: 6
  misc_feature: MA Experiment 20000169 PARAMETER Experiment Name: At_100uM_ABA_P Parameter: Tissue Value: Aerial
  misc_feature: MA Experiment 20000169 PARAMETER Experiment Name: At_100uM_ABA_P Parameter: Treatment Value: 100uM ABA vs. No Treatment
  misc_feature: MA Experiment ID: 20000180 Result: Down-regulated in Transcription
  misc_feature: MA Experiment 20000180 PARAMETER Experiment Name: At_Germinating_Seeds_P Parameter: Age (hr) Value: 24 vs. 0
  misc_feature: MA Experiment 20000180 PARAMETER Experiment Name: At_Germinating_Seeds_P Parameter: Tissue Value: Germinating Seeds
  misc_feature: MA Experiment ID: 20000227 Result: Up-regulated in Transcription
  misc_feature: MA Experiment 20000227 PARAMETER Experiment Name: At_Root-Tips-vs-Tops_P Parameter: Tissue Value: Root Tips vs. Root Tops
  misc_feature: MA Experiment ID: 20000234 Result: Up-regulated in Transcription
  misc_feature: MA Experiment 20000234 PARAMETER Experiment Name: At_Siliques_P Parameter: Age (day) Value: 21
  misc_feature: MA Experiment 20000234 PARAMETER Experiment Name: At_Siliques_P Parameter: Organism Value: A. thaliana
  misc_feature: MA Experiment 20000234 PARAMETER Experiment Name: At_Siliques_P Parameter: Plant Line Value: WS
  misc_feature: MA Experiment 20000234 PARAMETER Experiment Name: At_Siliques_P Parameter: Tissue Value: Less Than 5mm Siliques vs. Whole Plant
  misc_feature: MA Experiment ID: 20000264 Result: Up-regulated in Transcription
  misc_feature: MA Experiment 20000264 PARAMETER Experiment Name: At_Open_Flower_P Parameter: Age (day) Value: 21
  misc_feature: MA Experiment 20000264 PARAMETER Experiment Name: At_Open_Flower_P Parameter: Plant Line Value: WS
  misc_feature: MA Experiment 20000264 PARAMETER Experiment Name: At_Open_Flower_P Parameter: Tissue Value: Open Flower vs. Whole Plant
  misc_feature: MA Experiment ID: 20000286 Result: Up-regulated in Transcription
  misc_feature: MA Experiment 20000286 PARAMETER Experiment Name: At_Open_Flower_P Parameter: Age (day) Value: 21
  misc_feature: MA Experiment 20000286 PARAMETER Experiment Name: At_Open_Flower_P Parameter: Plant Line Value: WS
  misc_feature: MA Experiment 20000286 PARAMETER Experiment Name: At_Open_Flower_P Parameter: Tissue Value: Half Open vs. Whole Plant
  misc_feature: MA Experiment ID: 20001458 Result: Up-regulated in Transcription
  misc_feature: MA Experiment 20001458 PARAMETER Experiment Name: At_50mM_NH4NO3_L-to-H_P Parameter: Age (day) Value: Undefined
  misc_feature: MA Experiment 20001458 PARAMETER Experiment Name: At_50mM_NH4NO3_L-to-H_P Parameter: Organism Value: Undefined
  misc_feature: MA Experiment 20001458 PARAMETER Experiment Name: At_50mM_NH4NO3_L-to-H_P Parameter: Plant Line Value: Undefined
  misc_feature: MA Experiment 20001458 PARAMETER Experiment Name: At_50mM_NH4NO3_L-to-H_P Parameter: Timepoint (hr) Value: 2
  misc_feature: MA Experiment 20001458 PARAMETER Experiment Name: At_50mM_NH4NO3_L-to-H_P Parameter: Tissue Value: Siliques
  misc_feature: MA Experiment 20001458 PARAMETER Experiment Name: At_50mM_NH4NO3_L-to-H_P Parameter: Treatment Value: 50mM NH4NO3 vs. 100mM Manitol
  misc_feature: MA Experiment ID: 20001556 Result: Up-regulated in Transcription
  misc_feature: MA Experiment 20001556 PARAMETER Experiment Name: At_Drought_Soil_Dry_P Parameter: Age (day) Value: 26
  misc_feature: MA Experiment 20001556 PARAMETER Experiment Name: At_Drought_Soil_Dry_P Parameter: Organism Value: A. thaliana
  misc_feature: MA Experiment 20001556 PARAMETER Experiment Name: At_Drought_Soil_Dry_P Parameter: Plant Line Value: WS
  misc_feature: MA Experiment 20001556 PARAMETER Experiment Name: At_Drought_Soil_Dry_P Parameter: Post Timepoint (hr) Value: None
  misc_feature: MA Experiment 20001556 PARAMETER Experiment Name: At_Drought_Soil_Dry_P Parameter: Post-Treatment Value: None
  misc_feature: MA Experiment 20001556 PARAMETER Experiment Name: At_Drought_Soil_Dry_P Parameter: Timepoint (day) Value: 12
  misc_feature: MA Experiment 20001556 PARAMETER Experiment Name: At_Drought_Soil_Dry_P Parameter: Treatment Value: Drought vs. No Drought
  misc_feature: MA Experiment ID: 20001557 Result: Up-regulated in Transcription
  misc_feature: MA Experiment 20001557 PARAMETER Experiment Name: At_Drought_Soil_Dry_P Parameter: Age (day) Value: 27
  misc_feature: MA Experiment 20001557 PARAMETER Experiment Name: At_Drought_Soil_Dry_P Parameter: Organism Value: A. thaliana
  misc_feature: MA Experiment 20001557 PARAMETER Experiment Name: At_Drought_Soil_Dry_P Parameter: Plant Line Value: WS
  misc_feature: MA Experiment 20001557 PARAMETER Experiment Name: At_Drought_Soil_Dry_P Parameter: Post Timepoint (hr) Value: 3
  misc_feature: MA Experiment 20001557 PARAMETER Experiment Name: At_Drought_Soil_Dry_P Parameter: Post-Treatment Value: Re-Water vs. No Drought
  misc_feature: MA Experiment 20001557 PARAMETER Experiment Name: At_Drought_Soil_Dry_P Parameter: Timepoint (day) Value: 13
  misc_feature: MA Experiment 20001557 PARAMETER Experiment Name: At_Drought_Soil_Dry_P Parameter: Treatment Value: Drought vs. No Drought
  misc_feature: MA Experiment ID: 20001558 Result: Up-regulated in Transcription
  misc_feature: MA Experiment 20001558 PARAMETER Experiment Name: At_Drought_Soil_Dry_P Parameter: Age (day) Value: 27
  misc_feature: MA Experiment 20001558 PARAMETER Experiment Name: At_Drought_Soil_Dry_P Parameter: Organism Value: A. thaliana
  misc_feature: MA Experiment 20001558 PARAMETER Experiment Name: At_Drought_Soil_Dry_P Parameter: Plant Line Value: WS
  misc_feature: MA Experiment 20001558 PARAMETER Experiment Name: At_Drought_Soil_Dry_P Parameter: Post Timepoint (hr) Value: 6
  misc_feature: MA Experiment 20001558 PARAMETER Experiment Name: At_Drought_Soil_Dry_P Parameter: Post-Treatment Value: Re-Water vs. No Drought
  misc_feature: MA Experiment 20001558 PARAMETER Experiment Name: At_Drought_Soil_Dry_P Parameter: Timepoint (day) Value: 13
  misc_feature: MA Experiment 20001558 PARAMETER Experiment Name: At_Drought_Soil_Dry_P Parameter: Treatment Value: Drought vs. No Drought
  misc_feature: MA Experiment ID: 20001560 Result: Up-regulated in Transcription
  misc_feature: MA Experiment 20001560 PARAMETER Experiment Name: At_Drought_Soil_Dry_P Parameter: Age (day) Value: 28
  misc_feature: MA Experiment 20001560 PARAMETER Experiment Name: At_Drought_Soil_Dry_P Parameter: Organism Value: A. thaliana
  misc_feature: MA Experiment 20001560 PARAMETER Experiment Name: At_Drought_Soil_Dry_P Parameter: Plant Line Value: WS
  misc_feature: MA Experiment 20001560 PARAMETER Experiment Name: At_Drought_Soil_Dry_P Parameter: Post Timepoint (hr) Value: None
  misc_feature: MA Experiment 20001560 PARAMETER Experiment Name: At_Drought_Soil_Dry_P Parameter: Post-Treatment Value: None
  misc_feature: MA Experiment 20001560 PARAMETER Experiment Name: At_Drought_Soil_Dry_P Parameter: Timepoint (day) Value: 14
  misc_feature: MA Experiment 20001560 PARAMETER Experiment Name: At_Drought_Soil_Dry_P Parameter: Treatment Value: Drought vs. No Drought
  misc_feature: MA Experiment ID: 20001757 Result: Up-regulated in Transcription
  misc_feature: MA Experiment 20001757 PARAMETER Experiment Name: At_50mM_NH4NO3_L-to-H_P Parameter: Timepoint (hr) Value: 6
  misc_feature: MA Experiment 20001757 PARAMETER Experiment Name: At_50mM_NH4NO3_L-to-H_P Parameter: Tissue Value: Leaf
  misc_feature: MA Experiment 20001757 PARAMETER Experiment Name: At_50mM_NH4NO3_L-to-H_P Parameter: Treatment Value: 50mM NH4NO3 vs 100mM Mannitol

SEQ ID NO: 33370 - protein, 527 aa, Arabidopsis thaliana; identical to SEQ ID NO: 29780
  peptide (1)..(527): Ceres Seq. ID no. 12396657
  misc_feature (11)..(526): Pfam Name: Mpp10 protein Pfam Description: Mpp10 protein
  misc_feature (109)..(526): Homolog of NCBI NO: 19114546 NR Description: putative component of the U3 small nucleolar
  misc_feature (55)..(280): Homolog of NCBI NO: 40740848 NR Description: hypothetical protein AN4298.2 [Aspergillus
  misc_feature (264)..(495): Homolog of NCBI NO: 40740848 NR Description: hypothetical protein AN4298.2 [Aspergillus
  misc_feature (124)..(514): Homolog of NCBI NO: 19920954 NR Description: CG13097-PA [Drosophila melanogaster]
  misc_feature (83)..(527): Homolog of NCBI NO: 6322461 NR Description: part of small (ribosomal) subunit (SSU)
  misc_feature (129)..(525): Homolog of NCBI NO: 28175284 NR Description: Unknown (protein for IMAGE:5543289) [Xenopus
  misc_feature (124)..(527): Homolog of NCBI NO: 34856326 NR Description: similar to U3 small nucleolar ribonucleoprotein
  misc_feature (127)..(524): Homolog of NCBI NO: 2230873 NR Description: M phase phosphoprotein 10 [Homo sapiens]
  misc_feature (124)..(527): Homolog of NCBI NO: 29351667 NR Description: similar to U3 small nucleolar ribonucleoprotein
  misc_feature (1)..(527): Homolog of NCBI NO: 18425086 NR Description: expressed protein

SEQ ID NO: 33371 - protein, 486 aa, Arabidopsis thaliana; identical to SEQ ID NO: 29781
  peptide (1)..(486): Ceres Seq. ID no. 12396658
  misc_feature (1)..(485): Pfam Name: Mpp10 protein Pfam Description: Mpp10 protein
  misc_feature (68)..(485): Homolog of NCBI NO: 19114546 NR Description: putative component of the U3 small nucleolar
  misc_feature (14)..(239): Homolog of NCBI NO: 40740848 NR Description: hypothetical protein AN4298.2 [Aspergillus
  misc_feature (223)..(454): Homolog of NCBI NO: 40740848 NR Description: hypothetical protein AN4298.2 [Aspergillus
  misc_feature (83)..(473): Homolog of NCBI NO: 19920954 NR Description: CG13097-PA [Drosophila melanogaster]
  misc_feature (42)..(486): Homolog of NCBI NO: 6322461 NR Description: part of small (ribosomal) subunit (SSU)
  misc_feature (88)..(484): Homolog of NCBI NO: 28175284 NR Description: Unknown (protein for IMAGE:5543289) [Xenopus
  misc_feature (83)..(486): Homolog of NCBI NO: 34856326 NR Description: similar to U3 small nucleolar ribonucleoprotein
  misc_feature (86)..(483): Homolog of NCBI NO: 2230873 NR Description: M phase phosphoprotein 10 [Homo sapiens]
  misc_feature (83)..(486): Homolog of NCBI NO: 29351667 NR Description: similar to U3 small nucleolar ribonucleoprotein
  misc_feature (1)..(486): Homolog of NCBI NO: 18425086 NR Description: expressed protein

SEQ ID NO: 33372 - protein, 456 aa, Arabidopsis thaliana; identical to SEQ ID NO: 29782
  peptide (1)..(456): Ceres Seq. ID no. 12396659
  misc_feature (1)..(455): Pfam Name: Mpp10 protein Pfam Description: Mpp10 protein
  misc_feature (38)..(455): Homolog of NCBI NO: 19114546 NR Description: putative component of the U3 small nucleolar
  misc_feature (1)..(209): Homolog of NCBI NO: 40740848 NR Description: hypothetical protein AN4298.2 [Aspergillus
  misc_feature (193)..(424): Homolog of NCBI NO: 40740848 NR Description: hypothetical protein AN4298.2 [Aspergillus
  misc_feature (53)..(443): Homolog of NCBI NO: 19920954 NR Description: CG13097-PA [Drosophila melanogaster]
  misc_feature (12)..(456): Homolog of NCBI NO: 6322461 NR Description: part of small (ribosomal) subunit (SSU)
  misc_feature (58)..(454): Homolog of NCBI NO: 28175284 NR Description: Unknown (protein for IMAGE:5543289) [Xenopus
  misc_feature (53)..(456): Homolog of NCBI NO: 34856326 NR Description: similar to U3 small nucleolar ribonucleoprotein
  misc_feature (56)..(453): Homolog of NCBI NO: 2230873 NR Description: M phase phosphoprotein 10 [Homo sapiens]
  misc_feature (53)..(456): Homolog of NCBI NO: 29351667 NR Description: similar to U3 small nucleolar ribonucleoprotein
  misc_feature (1)..(456): Homolog of NCBI NO: 18425086 NR Description: expressed protein

SEQ ID NO: 33373 - DNA, 897 bp, Arabidopsis thaliana; identical to SEQ ID NO: 29783
  misc_feature (1)..(897): Ceres Seq. ID no. 12321699
  misc_feature: MA Experiment ID: 108434 Result: Down-regulated in Transcription
  misc_feature: MA Experiment 108434 PARAMETER Experiment Name: At_Root_Tips_cDNA_P Parameter: Tissue Value: Root Tips
  misc_feature: MA Experiment ID: 108464 Result: Up-regulated in Transcription
  misc_feature: MA Experiment 108464 PARAMETER Experiment Name: At_Germinating_Seeds_cDNA_P Parameter: Age (day) Value: 4 vs. 0
  misc_feature: MA Experiment 108464 PARAMETER Experiment Name: At_Germinating_Seeds_cDNA_P Parameter: Tissue Value: Germinating Seeds
  misc_feature: MA Experiment ID: 108488 Result: Down-regulated in Transcription
  misc_feature: MA Experiment ID: 108573 Result: Up-regulated in Transcription
  misc_feature: MA Experiment 108573 PARAMETER Experiment Name: At_Drought_cDNA_P Parameter: Timepoint (hr) Value: 6
  misc_feature: MA Experiment 108573 PARAMETER Experiment Name: At_Drought_cDNA_P Parameter: Tissue Value: Aerial
  misc_feature: MA Experiment 108573 PARAMETER Experiment Name: At_Drought_cDNA_P Parameter: Treatment Value: Drought vs. No Drought
  misc_feature: MA Experiment ID: 20000794 Result: Up-regulated in Transcription
  misc_feature: MA Experiment 20000794 PARAMETER Experiment Name: At_Petals_P Parameter: Age (day) Value: 23-25 days
  misc_feature: MA Experiment 20000794 PARAMETER Experiment Name: At_Petals_P Parameter: Plant Line Value: WS
  misc_feature: MA Experiment 20000794 PARAMETER Experiment Name: At_Petals_P Parameter: Tissue Value: Petals vs. Whole plant
  misc_feature: MA Experiment ID: 20001905 Result: Up-regulated in Transcription
  misc_feature: MA Experiment 20001905 PARAMETER Experiment Name: At_Drought_Reproduction_P Parameter: Age (day) Value: 40
  misc_feature: MA Experiment 20001905 PARAMETER Experiment Name: At_Drought_Reproduction_P Parameter: Organism Value: A. thaliana
  misc_feature: MA Experiment 20001905 PARAMETER Experiment Name: At_Drought_Reproduction_P Parameter: Plant Line Value: WS
  misc_feature: MA Experiment 20001905 PARAMETER Experiment Name: At_Drought_Reproduction_P Parameter: Timepoint (day) Value: 10
  misc_feature: MA Experiment 20001905 PARAMETER Experiment Name: At_Drought_Reproduction_P Parameter: Tissue Value: Rosettes
  misc_feature: MA Experiment 20001905 PARAMETER Experiment Name: At_Drought_Reproduction_P Parameter: Treatment Value: Drought vs. No Drought
  misc_feature: MA Experiment ID: 20001911 Result: Up-regulated in Transcription
  misc_feature: MA Experiment 20001911 PARAMETER Experiment Name: At_Drought_Reproduction_P Parameter: Age (day) Value: 40
  misc_feature: MA Experiment 20001911 PARAMETER Experiment Name: At_Drought_Reproduction_P Parameter: Organism Value: A. thaliana
  misc_feature: MA Experiment 20001911 PARAMETER Experiment Name: At_Drought_Reproduction_P Parameter: Plant Line Value: WS
  misc_feature: MA Experiment 20001911 PARAMETER Experiment Name: At_Drought_Reproduction_P Parameter: Timepoint (day) Value: 10
  misc_feature: MA Experiment 20001911 PARAMETER Experiment Name: At_Drought_Reproduction_P Parameter: Tissue Value: Flowers
  misc_feature: MA Experiment 20001911 PARAMETER Experiment Name: At_Drought_Reproduction_P Parameter: Treatment Value: Drought vs. No Drought

SEQ ID NO: 33374 - protein, 237 aa, Arabidopsis thaliana; identical to SEQ ID NO: 29784
  peptide (1)..(237): Ceres Seq. ID no. 12321700
  misc_feature (32)..(221): Homolog of NCBI NO: 40745235 NR Description: hypothetical protein AN2280.2 [Aspergillus
  misc_feature (23)..(165): Homolog of NCBI NO: 15810345 NR Description: unknown protein [Arabidopsis thaliana]
  misc_feature (23)..(165): Homolog of NCBI NO: 30698266 NR Description: expressed protein [Arabidopsis thaliana]
  misc_feature (1)..(212): Homolog of NCBI NO: 9758143 NR Description: gene_id:MUD21.19~pir||T38383~similar to unknown
  misc_feature (23)..(237): Homolog of NCBI NO: 30698268 NR Description: expressed protein [Arabidopsis thaliana]

SEQ ID NO: 33375 - protein, 215 aa, Arabidopsis thaliana; identical to SEQ ID NO: 29785
  peptide (1)..(215): Ceres Seq. ID no. 12321701
  misc_feature (10)..(199): Homolog of NCBI NO: 40745235 NR Description: hypothetical protein AN2280.2 [Aspergillus
  misc_feature (1)..(143): Homolog of NCBI NO: 15810345 NR Description: unknown protein [Arabidopsis thaliana]
  misc_feature (1)..(143): Homolog of NCBI NO: 30698266 NR Description: expressed protein [Arabidopsis thaliana]
  misc_feature (1)..(190): Homolog of NCBI NO: 9758143 NR Description: gene_id:MUD21.19~pir||T38383~similar to unknown
  misc_feature (1)..(215): Homolog of NCBI NO: 30698268 NR Description: expressed protein [Arabidopsis thaliana]

SEQ ID NO: 33376 - DNA, 1590 bp, Arabidopsis thaliana; identical to SEQ ID NO: 29786
  misc_feature (1)..(1590): Ceres Seq. ID no. 12422847
  misc_feature: MA Experiment ID: 108585 Result: Up-regulated in Transcription
  misc_feature: MA Experiment 108585 PARAMETER Experiment Name: At_5mM_NaNP_cDNA_P Parameter: Timepoint (hr) Value: 6
  misc_feature: MA Experiment 108585 PARAMETER Experiment Name: At_5mM_NaNP_cDNA_P Parameter: Tissue Value: Aerial
  misc_feature: MA Experiment 108585 PARAMETER Experiment Name: At_5mM_NaNP_cDNA_P Parameter: Treatment Value: null
  misc_feature: MA Experiment ID: 108594 Result: Down-regulated in Transcription
  misc_feature: MA Experiment 108594 PARAMETER Experiment Name: At_Ler-rhl_Root_cDNA_P Parameter: Plant Line Value: null
  misc_feature: MA Experiment ID: 20000439 Result: Up-regulated in Transcription
  misc_feature: MA Experiment 20000439 PARAMETER Experiment Name: At_Roots__P Parameter: Age (day) Value: 14 vs. 21
  misc_feature: MA Experiment 20000439 PARAMETER Experiment Name: At_Roots__P Parameter: Organism Value: A. thaliana
  misc_feature: MA Experiment 20000439 PARAMETER Experiment Name: At_Roots__P Parameter: Tissue Value: Roots vs. Whole Plant

SEQ ID NO: 33377 - protein, 367 aa, Arabidopsis thaliana; identical to SEQ ID NO: 29787
  peptide (1)..(367): Ceres Seq. ID no. 12422848
  misc_feature (176)..(337): Pfam Name: Signal peptidase I Pfam Description: Signal peptidase I
  misc_feature (193)..(352): Homolog of NCBI NO: 17230467 NR Description: signal peptidase I [Nostoc sp. PCC 7120]
  misc_feature (185)..(348): Homolog of NCBI NO: 16329254 NR Description: leader peptidase I [Synechocystis sp. PCC 6803]
  misc_feature (168)..(352): Homolog of NCBI NO: 23042815 NR Description: hypothetical protein [Trichodesmium erythraeum
  misc_feature (180)..(353): Homolog of NCBI NO: 25082936 NR Description: chloroplast thylakoidal processing peptidase,
  misc_feature (180)..(353): Homolog of NCBI NO: 30687572 NR Description: chloroplast thylakoidal processing peptidase
  misc_feature (180)..(353): Homolog of NCBI NO: 9294054 NR Description: contains similarity to signal peptidase (leader
  misc_feature (114)..(367): Homolog of NCBI NO: 25408074 NR Description: probable signal peptidase I [imported] -
  misc_feature (67)..(367): Homolog of NCBI NO: 30684587 NR Description: signal peptidase I -related [Arabidopsis
  misc_feature (1)..(367): Homolog of NCBI NO: 15222236 NR Description: chloroplast thylakoidal processing peptidase,
  misc_feature (1)..(367): Homolog of NCBI NO: 21553622 NR Description: chloroplast thylakoidal processing peptidase,

SEQ ID NO: 33378 - protein, 293 aa, Arabidopsis thaliana; identical to SEQ ID NO: 29788
  peptide (1)..(293): Ceres Seq. ID no. 12422849
  misc_feature (102)..(263): Pfam Name: Signal peptidase I Pfam Description: Signal peptidase I
  misc_feature (119)..(278): Homolog of NCBI NO: 17230467 NR Description: signal peptidase I [Nostoc sp. PCC 7120]
  misc_feature (111)..(274): Homolog of NCBI NO: 16329254 NR Description: leader peptidase I [Synechocystis sp. PCC 6803]
  misc_feature (94)..(278): Homolog of NCBI NO: 23042815 NR Description: hypothetical protein [Trichodesmium erythraeum
  misc_feature (106)..(279): Homolog of NCBI NO: 25082936 NR Description: chloroplast thylakoidal processing peptidase,
  misc_feature (106)..(279): Homolog of NCBI NO: 30687572 NR Description: chloroplast thylakoidal processing peptidase
  misc_feature (106)..(279): Homolog of NCBI NO: 9294054 NR Description: contains similarity to signal peptidase (leader
  misc_feature (40)..(293): Homolog of NCBI NO: 25408074 NR Description: probable signal peptidase I [imported] -
  misc_feature (1)..(293): Homolog of NCBI NO: 30684587 NR Description: signal peptidase I -related [Arabidopsis
  misc_feature (1)..(293): Homolog of NCBI NO: 15222236 NR Description: chloroplast thylakoidal processing peptidase,
  misc_feature (1)..(293): Homolog of NCBI NO: 21553622 NR Description: chloroplast thylakoidal processing peptidase,

SEQ ID NO: 33379 - protein, 272 aa, Arabidopsis thaliana; identical to SEQ ID NO: 29789
  peptide (1)..(272): Ceres Seq. ID no. 12422850
  misc_feature (81)..(242): Pfam Name: Signal peptidase I Pfam Description: Signal peptidase I
  misc_feature (98)..(257): Homolog of NCBI NO: 17230467 NR Description: signal peptidase I [Nostoc sp. PCC 7120]
  misc_feature (90)..(253): Homolog of NCBI NO: 16329254 NR Description: leader peptidase I [Synechocystis sp. PCC 6803]
  misc_feature (73)..(257): Homolog of NCBI NO: 23042815 NR Description: hypothetical protein [Trichodesmium erythraeum
  misc_feature (85)..(258): Homolog of NCBI NO: 25082936 NR Description: chloroplast thylakoidal processing peptidase,
  misc_feature (85)..(258): Homolog of NCBI NO: 30687572 NR Description: chloroplast thylakoidal processing peptidase
  misc_feature (85)..(258): Homolog of NCBI NO: 9294054 NR Description: contains similarity to signal peptidase (leader
  misc_feature (19)..(272): Homolog of NCBI NO: 25408074 NR Description: probable signal peptidase I [imported] -
  misc_feature (1)..(272): Homolog of NCBI NO: 30684587 NR Description: signal peptidase I -related [Arabidopsis
  misc_feature (1)..(272): Homolog of NCBI NO: 15222236 NR Description: chloroplast thylakoidal processing peptidase,
  misc_feature (1)..(272): Homolog of NCBI NO: 21553622 NR Description: chloroplast thylakoidal processing peptidase,

SEQ ID NO: 33380 - DNA, 1825 bp, Arabidopsis thaliana; identical to SEQ ID NO: 29790
  misc_feature (1)..(1825): Ceres Seq. ID no. 12738746
  misc_feature: MA Experiment ID: 108434 Result: Up-regulated in Transcription
  misc_feature: MA Experiment 108434 PARAMETER Experiment Name: At_Root_Tips_cDNA_P Parameter: Tissue Value: Root Tips
  misc_feature: MA Experiment ID: 108462 Result: Down-regulated in Transcription
  misc_feature: MA Experiment 108462 PARAMETER Experiment Name: At_Germinating_Seeds_cDNA_P Parameter: Age (day) Value: 2 vs. 0
  misc_feature: MA Experiment 108462 PARAMETER Experiment Name: At_Germinating_Seeds_cDNA_P Parameter: Tissue Value: Germinating Seeds
  misc_feature: MA Experiment ID: 108463 Result: Down-regulated in Transcription
  misc_feature: MA Experiment 108463 PARAMETER Experiment Name: At_Germinating_Seeds_cDNA_P Parameter: Age (day) Value: 3 vs. 0
  misc_feature: MA Experiment 108463 PARAMETER Experiment Name: At_Germinating_Seeds_cDNA_P Parameter: Tissue Value: Germinating Seeds
  misc_feature: MA Experiment ID: 108464 Result: Down-regulated in Transcription
  misc_feature: MA Experiment 108464 PARAMETER Experiment Name: At_Germinating_Seeds_cDNA_P Parameter: Age (day) Value: 4 vs. 0
  misc_feature: MA Experiment 108464 PARAMETER Experiment Name: At_Germinating_Seeds_cDNA_P Parameter: Tissue Value: Germinating Seeds
  misc_feature: MA Experiment ID: 108573 Result: Down-regulated in Transcription
  misc_feature: MA Experiment 108573 PARAMETER Experiment Name: At_Drought_cDNA_P Parameter: Timepoint (hr) Value: 6
  misc_feature: MA Experiment 108573 PARAMETER Experiment Name: At_Drought_cDNA_P Parameter: Tissue Value: Aerial
  misc_feature: MA Experiment 108573 PARAMETER Experiment Name: At_Drought_cDNA_P Parameter: Treatment Value: Drought vs. No Drought
  misc_feature: MA Experiment ID: 20000113 Result: Up-regulated in Transcription
  misc_feature: MA Experiment 20000113 PARAMETER Experiment Name: At_42deg_Heat_cDNA_P Parameter: Temperature (deg C) Value: 42 vs. 22
  misc_feature: MA Experiment 20000113 PARAMETER Experiment Name: At_42deg_Heat_cDNA_P Parameter: Timepoint (hr) Value: 8
  misc_feature: MA Experiment 20000113 PARAMETER Experiment Name: At_42deg_Heat_cDNA_P Parameter: Tissue Value: Aerial
  misc_feature: MA Experiment ID: 20000224 Result: Down-regulated in Transcription
  misc_feature: MA Experiment ID: 20000234 Result: Up-regulated in Transcription
  misc_feature: MA Experiment 20000234 PARAMETER Experiment Name: At_Siliques_P Parameter: Age (day) Value: 21
  misc_feature: MA Experiment 20000234 PARAMETER Experiment Name: At_Siliques_P Parameter: Organism Value: A. thaliana
  misc_feature: MA Experiment 20000234 PARAMETER Experiment Name: At_Siliques_P Parameter: Plant Line Value: WS
  misc_feature: MA Experiment 20000234 PARAMETER Experiment Name: At_Siliques_P Parameter: Tissue Value: Less Than 5mm Siliques vs. Whole Plant
  misc_feature: MA Experiment ID: 20000794 Result: Down-regulated in Transcription
  misc_feature: MA Experiment 20000794 PARAMETER Experiment Name: At_Petals_P Parameter: Age (day) Value: 23-25 days
  misc_feature: MA Experiment 20000794 PARAMETER Experiment Name: At_Petals_P Parameter: Plant Line Value: WS
  misc_feature: MA Experiment 20000794 PARAMETER Experiment Name: At_Petals_P Parameter: Tissue Value: Petals vs. Whole plant
  misc_feature: MA Experiment ID: 20001556 Result: Up-regulated in Transcription
  misc_feature: MA Experiment 20001556 PARAMETER Experiment Name: At_Drought_Soil_Dry_P Parameter: Age (day) Value: 26
  misc_feature: MA Experiment 20001556 PARAMETER Experiment Name: At_Drought_Soil_Dry_P Parameter: Organism Value: A. thaliana
  misc_feature: MA Experiment 20001556 PARAMETER Experiment Name: At_Drought_Soil_Dry_P Parameter: Plant Line Value: WS
  misc_feature: MA Experiment 20001556 PARAMETER Experiment Name: At_Drought_Soil_Dry_P Parameter: Post Timepoint (hr) Value: None
  misc_feature: MA Experiment 20001556 PARAMETER Experiment Name: At_Drought_Soil_Dry_P Parameter: Post-Treatment Value: None
  misc_feature: MA Experiment 20001556 PARAMETER Experiment Name: At_Drought_Soil_Dry_P Parameter: Timepoint (day) Value: 12
  misc_feature: MA Experiment 20001556 PARAMETER Experiment Name: At_Drought_Soil_Dry_P Parameter: Treatment Value: Drought vs. No Drought
  misc_feature: MA Experiment ID: 20001558 Result: Up-regulated in Transcription
  misc_feature: MA Experiment 20001558 PARAMETER Experiment Name: At_Drought_Soil_Dry_P Parameter: Age (day) Value: 27
  misc_feature: MA Experiment 20001558 PARAMETER Experiment Name: At_Drought_Soil_Dry_P Parameter: Organism Value: A. thaliana
  misc_feature: MA Experiment 20001558 PARAMETER Experiment Name: At_Drought_Soil_Dry_P Parameter: Plant Line Value: WS
  misc_feature: MA Experiment 20001558 PARAMETER Experiment Name: At_Drought_Soil_Dry_P Parameter: Post Timepoint (hr) Value: 6
  misc_feature: MA Experiment 20001558 PARAMETER Experiment Name: At_Drought_Soil_Dry_P Parameter: Post-Treatment Value: Re-Water vs. No Drought
  misc_feature: MA Experiment 20001558 PARAMETER Experiment Name: At_Drought_Soil_Dry_P Parameter: Timepoint (day) Value: 13
  misc_feature: MA Experiment 20001558 PARAMETER Experiment Name: At_Drought_Soil_Dry_P Parameter: Treatment Value: Drought vs. No Drought
  misc_feature: MA Experiment ID: 20001560 Result: Up-regulated in Transcription
  misc_feature: MA Experiment 20001560 PARAMETER Experiment Name: At_Drought_Soil_Dry_P Parameter: Age (day) Value: 28
  misc_feature: MA Experiment 20001560 PARAMETER Experiment Name: At_Drought_Soil_Dry_P Parameter: Organism Value: A. thaliana
  misc_feature: MA Experiment 20001560 PARAMETER Experiment Name: At_Drought_Soil_Dry_P Parameter: Plant Line Value: WS
  misc_feature: MA Experiment 20001560 PARAMETER Experiment Name: At_Drought_Soil_Dry_P Parameter: Post Timepoint (hr) Value: None
  misc_feature: MA Experiment 20001560 PARAMETER Experiment Name: At_Drought_Soil_Dry_P Parameter: Post-Treatment Value: None
  misc_feature: MA Experiment 20001560 PARAMETER Experiment Name: At_Drought_Soil_Dry_P Parameter: Timepoint (day) Value: 14
  misc_feature: MA Experiment 20001560 PARAMETER Experiment Name: At_Drought_Soil_Dry_P Parameter: Treatment Value: Drought vs. No Drought
  misc_feature: MA Experiment ID: 20001757 Result: Up-regulated in Transcription
  misc_feature: MA Experiment 20001757 PARAMETER Experiment Name: At_50mM_NH4NO3_L-to-H_P Parameter: Timepoint (hr) Value: 6
  misc_feature: MA Experiment 20001757 PARAMETER Experiment Name: At_50mM_NH4NO3_L-to-H_P Parameter: Tissue Value: Leaf
  misc_feature: MA Experiment 20001757 PARAMETER Experiment Name: At_50mM_NH4NO3_L-to-H_P Parameter: Treatment Value: 50mM NH4NO3 vs 100mM Mannitol

SEQ ID NO: 33381 - protein, 345 aa, Arabidopsis thaliana; identical to SEQ ID NO: 29791
  peptide (1)..(345): Ceres Seq. ID no. 12738747
  misc_feature (14)..(61): Pfam Name: Myb-like DNA-binding domain Pfam Description: Myb-like DNA-binding domain
  misc_feature (1)..(175): Homolog of NCBI NO: 15233066 NR Description: myb DNA-binding protein (MYB17); protein id:
  misc_feature (1)..(181): Homolog of NCBI NO: 629737 NR Description: myb-related protein MIXTA - garden snapdragon
  misc_feature (1)..(276): Homolog of NCBI NO: 13346188 NR Description: GHMYB25 [Gossypium hirsutum]
  misc_feature (1)..(341): Homolog of NCBI NO: 282964 NR Description: myb-related protein 1 - garden petunia
  misc_feature (1)..(343): Homolog of NCBI NO: 38344966 NR Description: OSJNBa0072F16.11 [Oryza sativa (japonica
  misc_feature (1)..(336): Homolog of NCBI NO: 27125807 NR Description: MYB27 protein [Oryza sativa (japonica
  misc_feature (1)..(223): Homolog of NCBI NO: 15242272 NR Description: myb family transcription factor
  misc_feature (199)..(341): Homolog of NCBI NO: 28628947 NR Description: MYB1 [Dendrobium sp. XMW-2002-1]
  misc_feature (1)..(169): Homolog of NCBI NO: 28628947 NR Description: MYB1 [Dendrobium sp. XMW-2002-1]
  misc_feature (1)..(345): Homolog of NCBI NO: 15232045 NR Description: myb family transcription factor

SEQ ID NO: 33382 - protein, 227 aa, Arabidopsis thaliana; identical to SEQ ID NO: 29792
  peptide (1)..(227): Ceres Seq. ID no. 12738748
  misc_feature (1)..(57): Homolog of NCBI NO: 15233066 NR Description: myb DNA-binding protein (MYB17); protein id:
  misc_feature (1)..(63): Homolog of NCBI NO: 629737 NR Description: myb-related protein MIXTA - garden snapdragon
  misc_feature (1)..(158): Homolog of NCBI NO: 13346188 NR Description: GHMYB25 [Gossypium hirsutum]
  misc_feature (1)..(223): Homolog of NCBI NO: 282964 NR Description: myb-related protein 1 - garden petunia
  misc_feature (1)..(225): Homolog of NCBI NO: 38344966 NR Description: OSJNBa0072F16.11 [Oryza sativa (japonica
  misc_feature (1)..(218): Homolog of NCBI NO: 27125807 NR Description: MYB27 protein [Oryza sativa (japonica
  misc_feature (1)..(105): Homolog of NCBI NO: 15242272 NR Description: myb family transcription factor
  misc_feature (81)..(223): Homolog of NCBI NO: 28628947 NR Description: MYB1 [Dendrobium sp. XMW-2002-1]
  misc_feature (1)..(51): Homolog of NCBI NO: 28628947 NR Description: MYB1 [Dendrobium sp. XMW-2002-1]
  misc_feature (1)..(227): Homolog of NCBI NO: 15232045 NR Description: myb family transcription factor

SEQ ID NO: 33383 - protein, 197 aa, Arabidopsis thaliana; identical to SEQ ID NO: 29793
  peptide (1)..(197): Ceres Seq. ID no. 12738749
  misc_feature (1)..(27): Homolog of NCBI NO: 15233066 NR Description: myb DNA-binding protein (MYB17); protein id:
  misc_feature (1)..(33): Homolog of NCBI NO: 629737 NR Description: myb-related protein MIXTA - garden snapdragon
  misc_feature (1)..(128): Homolog of NCBI NO: 13346188 NR Description: GHMYB25 [Gossypium hirsutum]
  misc_feature (1)..(193): Homolog of NCBI NO: 282964 NR Description: myb-related protein 1 - garden petunia
  misc_feature (1)..(195): Homolog of NCBI NO: 38344966 NR Description: OSJNBa0072F16.11 [Oryza sativa (japonica
  misc_feature (1)..(188): Homolog of NCBI NO: 27125807 NR Description: MYB27 protein [Oryza sativa (japonica
  misc_feature (1)..(75): Homolog of NCBI NO: 15242272 NR Description: myb family transcription factor
  misc_feature (51)..(193): Homolog of NCBI NO: 28628947 NR Description: MYB1 [Dendrobium sp. XMW-2002-1]
  misc_feature (1)..(21): Homolog of NCBI NO: 28628947 NR Description: MYB1 [Dendrobium sp. XMW-2002-1]
  misc_feature (1)..(197): Homolog of NCBI NO: 15232045 NR Description: myb family transcription factor

SEQ ID NO: 33384 - DNA, 852 bp, Arabidopsis thaliana; identical to SEQ ID NO: 29794
  misc_feature (1)..(852): Ceres Seq. ID no. 12332047
  misc_feature: MA Experiment ID: 108434 Result: Down-regulated in Transcription
  misc_feature: MA Experiment 108434 PARAMETER Experiment Name: At_Root_Tips_cDNA_P Parameter: Tissue Value: Root Tips
  misc_feature: MA Experiment ID: 108469 Result: Up-regulated in Transcription
  misc_feature: MA Experiment ID: 108585 Result: Up-regulated in Transcription
  misc_feature: MA Experiment 108585 PARAMETER Experiment Name: At_5mM_NaNP_cDNA_P Parameter: Timepoint (hr) Value: 6
  misc_feature: MA Experiment 108585 PARAMETER Experiment Name: At_5mM_NaNP_cDNA_P Parameter: Tissue Value: Aerial
  misc_feature: MA Experiment 108585 PARAMETER Experiment Name: At_5mM_NaNP_cDNA_P Parameter: Treatment Value: null
  misc_feature: MA Experiment ID: 108668 Result: Up-regulated in Transcription
  misc_feature: MA Experiment 108668 PARAMETER Experiment Name: At_2mM_SA_cDNA_P Parameter: Plant Line Value: WS
  misc_feature: MA Experiment 108668 PARAMETER Experiment Name: At_2mM_SA_cDNA_P Parameter: Timepoint (hr) Value: 6
  misc_feature: MA Experiment 108668 PARAMETER Experiment Name: At_2mM_SA_cDNA_P Parameter: Treatment Value: 2mM SA vs. No Treatment
  misc_feature: MA Experiment ID: 20000069 Result: Up-regulated in Transcription
  misc_feature: MA Experiment 20000069 PARAMETER Experiment Name: At_100uM_ABA_Mutants_cDNA_P Parameter: Plant Line Value: CS23
  misc_feature: MA Experiment 20000069 PARAMETER Experiment Name: At_100uM_ABA_Mutants_cDNA_P Parameter: Timepoint (hr) Value: 6
  misc_feature: MA Experiment 20000069 PARAMETER Experiment Name: At_100uM_ABA_Mutants_cDNA_P Parameter: Tissue Value: Aerial
  misc_feature: MA Experiment 20000069 PARAMETER Experiment Name: At_100uM_ABA_Mutants_cDNA_P Parameter: Treatment Value: 100uM ABA vs. No Treatment
  misc_feature: MA Experiment ID: 20000070 Result: Up-regulated in Transcription
  misc_feature: MA Experiment 20000070 PARAMETER Experiment Name: At_100uM_ABA_Mutants_cDNA_P Parameter: Plant Line Value: CS24
  misc_feature: MA Experiment 20000070 PARAMETER Experiment Name: At_100uM_ABA_Mutants_cDNA_P Parameter: Timepoint (hr) Value: 6
  misc_feature: MA Experiment 20000070 PARAMETER Experiment Name: At_100uM_ABA_Mutants_cDNA_P Parameter: Tissue Value: Aerial
  misc_feature: MA Experiment 20000070 PARAMETER Experiment Name: At_100uM_ABA_Mutants_cDNA_P Parameter: Treatment Value: 100uM ABA vs. No Treatment
  misc_feature: MA Experiment ID: 20000071 Result: Up-regulated in Transcription
  misc_feature: MA Experiment 20000071 PARAMETER Experiment Name: At_100uM_ABA_Mutants_cDNA_P Parameter: Plant Line Value: CS8104
  misc_feature: MA Experiment 20000071 PARAMETER Experiment Name: At_100uM_ABA_Mutants_cDNA_P Parameter: Timepoint (hr) Value: 6
  misc_feature: MA Experiment 20000071 PARAMETER Experiment Name: At_100uM_ABA_Mutants_cDNA_P Parameter: Tissue Value: Aerial
  misc_feature: MA Experiment 20000071 PARAMETER Experiment Name: At_100uM_ABA_Mutants_cDNA_P Parameter: Treatment Value: 100uM ABA vs. No Treatment
  misc_feature: MA Experiment ID: 20000072 Result: Up-regulated in Transcription
  misc_feature: MA Experiment 20000072 PARAMETER Experiment Name: At_100uM_ABA_Mutants_cDNA_P Parameter: Plant Line Value: CS8105
  misc_feature: MA Experiment 20000072 PARAMETER Experiment Name: At_100uM_ABA_Mutants_cDNA_P Parameter: Timepoint (hr) Value: 6
  misc_feature: MA Experiment 20000072 PARAMETER Experiment Name: At_100uM_ABA_Mutants_cDNA_P Parameter: Tissue Value: Aerial
  misc_feature: MA Experiment 20000072 PARAMETER Experiment Name: At_100uM_ABA_Mutants_cDNA_P Parameter: Treatment Value: 100uM ABA vs. No Treatment
  misc_feature: MA Experiment ID: 20000086 Result: Up-regulated in Transcription
  misc_feature: MA Experiment 20000086 PARAMETER Experiment Name: At_100uM_ABA_Mutants_cDNA_P Parameter: Plant Line Value: CS22
  misc_feature: MA Experiment 20000086 PARAMETER Experiment Name: At_100uM_ABA_Mutants_cDNA_P Parameter: Timepoint (hr) Value: 6
  misc_feature: MA Experiment 20000086 PARAMETER Experiment Name: At_100uM_ABA_Mutants_cDNA_P Parameter: Tissue Value: Aerial
  misc_feature: MA Experiment 20000086 PARAMETER Experiment Name: At_100uM_ABA_Mutants_cDNA_P Parameter: Treatment Value: 100uM ABA vs. No Treatment
  misc_feature: MA Experiment ID: 20000087 Result: Up-regulated in Transcription
  misc_feature: MA Experiment 20000087 PARAMETER Experiment Name: At_100uM_ABA_Mutants_cDNA_P Parameter: Plant Line Value: WS
  misc_feature: MA Experiment 20000087 PARAMETER Experiment Name: At_100uM_ABA_Mutants_cDNA_P Parameter: Timepoint (hr) Value: 6
  misc_feature: MA Experiment 20000087 PARAMETER Experiment Name: At_100uM_ABA_Mutants_cDNA_P Parameter: Tissue Value: Aerial
  misc_feature: MA Experiment 20000087 PARAMETER Experiment Name: At_100uM_ABA_Mutants_cDNA_P Parameter: Treatment Value: 100uM ABA vs. No Treatment
  misc_feature: MA Experiment ID: 20000090 Result: Up-regulated in Transcription
  misc_feature: MA Experiment ID: 20000111 Result: Down-regulated in Transcription
  misc_feature: MA Experiment 20000111 PARAMETER Experiment Name: At_42deg_Heat_cDNA_P Parameter: Temperature (deg C) Value: 42 vs. 22
  misc_feature: MA Experiment 20000111 PARAMETER Experiment Name: At_42deg_Heat_cDNA_P Parameter: Timepoint (hr) Value: 6
  misc_feature: MA Experiment 20000111 PARAMETER Experiment Name: At_42deg_Heat_cDNA_P Parameter: Tissue Value: Aerial
  misc_feature: MA Experiment ID: 20000117 Result: Up-regulated in Transcription
  misc_feature: MA Experiment 20000117 PARAMETER Experiment Name: At_100uM_ABA_Mutants_cDNA_P Parameter: Plant Line Value: Columbia
  misc_feature: MA Experiment 20000117 PARAMETER Experiment Name: At_100uM_ABA_Mutants_cDNA_P Parameter: Timepoint (hr) Value: 6
  misc_feature: MA Experiment 20000117 PARAMETER Experiment Name: At_100uM_ABA_Mutants_cDNA_P Parameter: Tissue Value: Aerial
  misc_feature: MA Experiment 20000117 PARAMETER Experiment Name: At_100uM_ABA_Mutants_cDNA_P Parameter: Treatment Value: 100uM ABA vs. No Treatment
  misc_feature: MA Experiment ID: 20000315 Result: Down-regulated in Transcription
  misc_feature: MA Experiment 20000315 PARAMETER Experiment Name: At_14day_Shoots-Roots_Sub_P Parameter: Age (day) Value: 14
  misc_feature: MA Experiment 20000315 PARAMETER Experiment Name: At_14day_Shoots-Roots_Sub_P Parameter: Organism Value: A. thaliana
  misc_feature: MA Experiment 20000315 PARAMETER Experiment Name: At_14day_Shoots-Roots_Sub_P Parameter: Plant Line Value: WS
  misc_feature: MA Experiment 20000315 PARAMETER Experiment Name: At_14day_Shoots-Roots_Sub_P Parameter: Tissue Value: Shoots vs. Whole Plant
  misc_feature: MA Experiment ID: 20000347 Result: Up-regulated in Transcription
  misc_feature: MA Experiment 20000347 PARAMETER Experiment Name: At_2mM_SA_Sub_P Parameter: Age (day) Value: 14
  misc_feature: MA Experiment 20000347 PARAMETER Experiment Name: At_2mM_SA_Sub_P Parameter: Organism Value: A. thaliana
  misc_feature: MA Experiment 20000347 PARAMETER Experiment Name: At_2mM_SA_Sub_P Parameter: Plant Line Value: WS
  misc_feature: MA Experiment 20000347 PARAMETER Experiment Name: At_2mM_SA_Sub_P Parameter: Timepoint (hr) Value: 6
  misc_feature: MA Experiment 20000347 PARAMETER Experiment Name: At_2mM_SA_Sub_P Parameter: Tissue Value: Aerial
  misc_feature: MA Experiment 20000347 PARAMETER Experiment Name: At_2mM_SA_Sub_P Parameter: Treatment Value: 2mM SA vs. No Treatment
  misc_feature: MA Experiment ID: 20000355 Result: Down-regulated in Transcription
  misc_feature: MA Experiment 20000355 PARAMETER Experiment Name: At_Siliques_Sub_P Parameter: Age (day) Value: 21
  misc_feature: MA Experiment 20000355 PARAMETER Experiment Name: At_Siliques_Sub_P Parameter: Organism Value: A. thaliana
  misc_feature: MA Experiment 20000355 PARAMETER Experiment Name: At_Siliques_Sub_P Parameter: Plant Line Value: WS
  misc_feature: MA Experiment 20000355 PARAMETER Experiment Name: At_Siliques_Sub_P Parameter: Tissue Value: Less Than 5mm Siliques vs. Whole Plant

SEQ ID NO: 33385 - protein, 133 aa, Arabidopsis thaliana; identical to SEQ ID NO: 29795
  peptide (1)..(133): Ceres Seq. ID no. 12332048
  misc_feature (1)..(130): Homolog of NCBI NO: 21593960 NR Description: unknown [Arabidopsis thaliana]
  misc_feature (9)..(132): Homolog of NCBI NO: 18423932 NR Description: putative protein
  misc_feature (9)..(132): Homolog of NCBI NO: 8777446 NR Description: gene_id:MHM17.20~pir||T04261~similar to unknown
  misc_feature (1)..(133): Homolog of NCBI NO: 15236106 NR Description: putative protein
  misc_feature (1)..(133): Homolog of NCBI NO: 21553625 NR Description: unknown [Arabidopsis thaliana]

SEQ ID NO: 33386 - protein, 93 aa, Arabidopsis thaliana; identical to SEQ ID NO: 29796
  peptide (1)..(93): Ceres Seq. ID no. 12332049
  misc_feature (1)..(90): Homolog of NCBI NO: 21593960 NR Description: unknown [Arabidopsis thaliana]
  misc_feature (1)..(92): Homolog of NCBI NO: 18423932 NR Description: putative protein
  misc_feature (1)..(92): Homolog of NCBI NO: 8777446 NR Description: gene_id:MHM17.20~pir||T04261~similar to unknown
  misc_feature (1)..(93): Homolog of NCBI NO: 15236106 NR Description: putative protein
  misc_feature (1)..(93): Homolog of NCBI NO: 21553625 NR Description: unknown [Arabidopsis thaliana]

SEQ ID NO: 33387 - protein, 66 aa, Arabidopsis thaliana; identical to SEQ ID NO: 29797
  peptide (1)..(66): Ceres Seq. ID no. 12332050

SEQ ID NO: 33388 - DNA, 912 bp, Arabidopsis thaliana; identical to SEQ ID NO: 29798
  misc_feature (1)..(912): Ceres Seq. ID no. 12333050
  misc_feature: MA Experiment ID: 108434 Result: Down-regulated in Transcription
  misc_feature: MA Experiment 108434 PARAMETER Experiment Name: At_Root_Tips_cDNA_P Parameter: Tissue Value: Root Tips

SEQ ID NO: 33389 - protein, 219 aa, Arabidopsis thaliana; identical to SEQ ID NO: 29799
  peptide (1)..(219): Ceres Seq. ID no. 12333051
  misc_feature (14)..(175): Pfam Name: Ras family Pfam Description: Ras family
  misc_feature (2)..(218): Homolog of NCBI NO: 1370154 NR Description: RAB11G [Lotus japonicus]
  misc_feature (1)..(217): Homolog of NCBI NO: 15224226 NR Description: Ras-related GTP-binding protein (ARA-4)
  misc_feature (1)..(219): Homolog of NCBI NO: 17380746 NR Description: putative RAS-related protein ARA-1 [Arabidopsis
  misc_feature (1)..(219): Homolog of NCBI NO: 18390575 NR Description: RAS-related GTP-binding protein (ARA-1)
  misc_feature (1)..(219): Homolog of NCBI NO: 29893534 NR Description: putative RAS-related protein ARA-1 [Arabidopsis
  misc_feature (1)..(219): Homolog of NCBI NO: 1076457 NR Description: GTP-binding protein bra - rape
  misc_feature (1)..(219): Homolog of NCBI NO: 15225121 NR Description: GTP-binding protein, putative
  misc_feature (1)..(219): Homolog of NCBI NO: 21553627 NR Description: putative RAS superfamily GTP-binding protein

SEQ ID NO: 33390 - protein, 166 aa, Arabidopsis thaliana; identical to SEQ ID NO: 29800
  peptide (1)..(166): Ceres Seq. ID no. 12333052
  misc_feature (1)..(122): Pfam Name: Ras family Pfam Description: Ras family
  misc_feature (1)..(165): Homolog of NCBI NO: 1370154 NR Description: RAB11G [Lotus japonicus]
  misc_feature (1)..(164): Homolog of NCBI NO: 15224226 NR Description: Ras-related GTP-binding protein (ARA-4)
  misc_feature (1)..(166): Homolog of NCBI NO: 17380746 NR Description: putative RAS-related protein ARA-1 [Arabidopsis
  misc_feature (1)..(166): Homolog of NCBI NO: 18390575 NR Description: RAS-related GTP-binding protein (ARA-1)
  misc_feature (1)..(166): Homolog of NCBI NO: 29893534 NR Description: putative RAS-related protein ARA-1 [Arabidopsis
  misc_feature (1)..(166): Homolog of NCBI NO: 1076457 NR Description: GTP-binding protein bra - rape
  misc_feature (1)..(166): Homolog of NCBI NO: 15225121 NR Description: GTP-binding protein, putative
  misc_feature (1)..(166): Homolog of NCBI NO: 21553627 NR Description: putative RAS superfamily GTP-binding protein

SEQ ID NO: 33391 - DNA, 594 bp, Arabidopsis thaliana; identical to SEQ ID NO: 29801
  misc_feature (1)..(594): Ceres Seq. ID no. 12333048
  misc_feature: MA Experiment ID: 108434 Result: Up-regulated in Transcription
  misc_feature: MA Experiment 108434 PARAMETER Experiment Name: At_Root_Tips_cDNA_P Parameter: Tissue Value: Root Tips
  misc_feature: MA Experiment ID: 108462 Result: Up-regulated in Transcription
  misc_feature: MA Experiment 108462 PARAMETER Experiment Name: At_Germinating_Seeds_cDNA_P Parameter: Age (day) Value: 2 vs. 0
  misc_feature: MA Experiment 108462 PARAMETER Experiment Name: At_Germinating_Seeds_cDNA_P Parameter: Tissue Value: Germinating Seeds
  misc_feature: MA Experiment ID: 108573 Result: Down-regulated in Transcription
  misc_feature: MA Experiment 108573 PARAMETER Experiment Name: At_Drought_cDNA_P Parameter: Timepoint (hr) Value: 6
  misc_feature: MA Experiment 108573 PARAMETER Experiment Name: At_Drought_cDNA_P Parameter: Tissue Value: Aerial
  misc_feature: MA Experiment 108573 PARAMETER Experiment Name: At_Drought_cDNA_P Parameter: Treatment Value: Drought vs. No Drought
  misc_feature: MA Experiment ID: 108577 Result: Down-regulated in Transcription
  misc_feature: MA Experiment 108577 PARAMETER Experiment Name: At_42deg_Heat_cDNA_P Parameter: Temperature (deg C) Value: 42 vs. 22
  misc_feature: MA Experiment 108577 PARAMETER Experiment Name: At_42deg_Heat_cDNA_P Parameter: Timepoint (hr) Value: 6
  misc_feature: MA Experiment 108577 PARAMETER Experiment Name: At_42deg_Heat_cDNA_P Parameter: Tissue Value: Aerial
  misc_feature: MA Experiment ID: 108585 Result: Down-regulated in Transcription
  misc_feature: MA Experiment 108585 PARAMETER Experiment Name: At_5mM_NaNP_cDNA_P Parameter: Timepoint (hr) Value: 6
  misc_feature: MA Experiment 108585 PARAMETER Experiment Name: At_5mM_NaNP_cDNA_P Parameter: Tissue Value: Aerial
  misc_feature: MA Experiment 108585 PARAMETER Experiment Name: At_5mM_NaNP_cDNA_P Parameter: Treatment Value: null
  misc_feature: MA Experiment ID: 20000071 Result: Down-regulated in Transcription
  misc_feature: MA Experiment 20000071 PARAMETER Experiment Name: At_100uM_ABA_Mutants_cDNA_P Parameter: Plant Line Value: CS8104
  misc_feature: MA Experiment 20000071 PARAMETER Experiment Name: At_100uM_ABA_Mutants_cDNA_P Parameter: Timepoint (hr) Value: 6
  misc_feature: MA Experiment 20000071 PARAMETER Experiment Name: At_100uM_ABA_Mutants_cDNA_P Parameter: Tissue Value: Aerial
  misc_feature: MA Experiment 20000071 PARAMETER Experiment Name: At_100uM_ABA_Mutants_cDNA_P Parameter: Treatment Value: 100uM ABA vs. No Treatment
  misc_feature: MA Experiment ID: 20000093 Result: Down-regulated in Transcription
  misc_feature: MA Experiment 20000093 PARAMETER Experiment Name: At_42deg_Heat_cDNA_P Parameter: Temperature (deg C) Value: 42 vs. 22
  misc_feature: MA Experiment 20000093 PARAMETER Experiment Name: At_42deg_Heat_cDNA_P Parameter: Timepoint (hr) Value: 0.5
  misc_feature: MA Experiment 20000093 PARAMETER Experiment Name: At_42deg_Heat_cDNA_P Parameter: Tissue Value: Aerial
  misc_feature: MA Experiment ID: 20000117 Result: Down-regulated in Transcription
  misc_feature: MA Experiment 20000117 PARAMETER Experiment Name: At_100uM_ABA_Mutants_cDNA_P Parameter: Plant Line Value: Columbia
  misc_feature: MA Experiment 20000117 PARAMETER Experiment Name: At_100uM_ABA_Mutants_cDNA_P Parameter: Timepoint (hr) Value: 6
  misc_feature: MA Experiment 20000117 PARAMETER Experiment Name: At_100uM_ABA_Mutants_cDNA_P Parameter: Tissue Value: Aerial
  misc_feature: MA Experiment 20000117 PARAMETER Experiment Name: At_100uM_ABA_Mutants_cDNA_P Parameter: Treatment Value: 100uM ABA vs. No Treatment
  misc_feature: MA Experiment ID: 20000179 Result: Up-regulated in Transcription
  misc_feature: MA Experiment 20000179 PARAMETER Experiment Name: At_Germinating_Seeds_P Parameter: Age (hr) Value: 6 vs. 0
  misc_feature: MA Experiment 20000179 PARAMETER Experiment Name: At_Germinating_Seeds_P Parameter: Tissue Value: Germinating Seeds
  misc_feature: MA Experiment ID: 20000180 Result: Up-regulated in Transcription
  misc_feature: MA Experiment 20000180 PARAMETER Experiment Name: At_Germinating_Seeds_P Parameter: Age (hr) Value: 24 vs. 0
  misc_feature: MA Experiment 20000180 PARAMETER Experiment Name: At_Germinating_Seeds_P Parameter: Tissue Value: Germinating Seeds
  misc_feature: MA Experiment ID: 20000224 Result: Down-regulated in Transcription
  misc_feature: MA Experiment ID: 20000451 Result: Down-regulated in Transcription
  misc_feature: MA Experiment 20000451 PARAMETER Experiment Name: At_CS6879_Shoots-Roots_P Parameter: Age (day) Value: 14
  misc_feature: MA Experiment 20000451 PARAMETER Experiment Name: At_CS6879_Shoots-Roots_P Parameter: Organism Value: A. thaliana
  misc_feature: MA Experiment 20000451 PARAMETER Experiment Name: At_CS6879_Shoots-Roots_P Parameter: Plant Line Value: CS6879 vs. WS
  misc_feature: MA Experiment 20000451 PARAMETER Experiment Name: At_CS6879_Shoots-Roots_P Parameter: Tissue Value: Roots
  misc_feature: MA Experiment ID: 20000794 Result: Down-regulated in Transcription
  misc_feature: MA Experiment 20000794 PARAMETER Experiment Name: At_Petals_P Parameter: Age (day) Value: 23-25 days
  misc_feature: MA Experiment 20000794 PARAMETER Experiment Name: At_Petals_P Parameter: Plant Line Value: WS
  misc_feature: MA Experiment 20000794 PARAMETER Experiment Name: At_Petals_P Parameter: Tissue Value: Petals vs. Whole plant

SEQ ID NO: 33392 - protein, 103 aa, Arabidopsis thaliana; identical to SEQ ID NO: 7737
  peptide (1)..(103): Ceres Seq. ID no. 12333049
  misc_feature (1)..(103): Homolog of NCBI NO: 462242 NR Description: Histone H4
  misc_feature (1)..(103): Homolog of NCBI NO: 37590121 NR Description: Hist1h4h protein [Mus musculus]
  misc_feature (1)..(103): Homolog of NCBI NO: 34858262 NR Description: similar to germinal histone H4 gene [Rattus
  misc_feature (1)..(103): Homolog of NCBI NO: 27692960 NR Description: Similar to germinal histone H4 gene [Mus musculus]
  misc_feature (1)..(103): Homolog of NCBI NO: 27692935 NR Description: Similar to germinal histone H4 gene [Mus musculus]
  misc_feature (1)..(103): Homolog of NCBI NO: 4504301 NR Description: H4 histone family, member A [Homo sapiens]
  misc_feature (1)..(103): Homolog of NCBI NO: 1806283 NR Description: Histone H4 homologue [Sesbania rostrata]
  misc_feature (1)..(103): Homolog of NCBI NO: 462243 NR Description: Histone H4
  misc_feature (1)..(103): Homolog of NCBI NO: 15226944 NR Description: histone H4
  misc_feature (1)..(103): Homolog of NCBI NO: 34876368 NR Description: similar to germinal histone H4 gene [Rattus

SEQ ID NO: 33393 - DNA, 1136 bp, Arabidopsis thaliana; identical to SEQ ID NO: 29803
  misc_feature (1)..(1136): Ceres Seq. ID no. 12330223
  misc_feature: MA Experiment ID: 108434 Result: Up-regulated in Transcription
  misc_feature: MA Experiment 108434 PARAMETER Experiment Name: At_Root_Tips_cDNA_P Parameter: Tissue Value: Root Tips
  misc_feature: MA Experiment ID: 20000185 Result: Up-regulated in Transcription
  misc_feature: MA Experiment 20000185 PARAMETER Experiment Name: At_Roots__P Parameter: Age (day) Value: 7 vs. 21
  misc_feature: MA Experiment 20000185 PARAMETER Experiment Name: At_Roots__P Parameter: Organism Value: A. thaliana
  misc_feature: MA Experiment 20000185 PARAMETER Experiment Name: At_Roots__P Parameter: Tissue Value: Roots vs. Whole Plant
  misc_feature: MA Experiment ID: 20000227 Result: Up-regulated in Transcription
  misc_feature: MA Experiment 20000227 PARAMETER Experiment Name: At_Root-Tips-vs-Tops_P Parameter: Tissue Value: Root Tips vs. Root Tops
  misc_feature: MA Experiment ID: 20000436 Result: Up-regulated in Transcription
  misc_feature: MA Experiment 20000436 PARAMETER Experiment Name: At_Drought_P Parameter: Age (day) Value: 7
  misc_feature: MA Experiment 20000436 PARAMETER Experiment Name: At_Drought_P Parameter: Organism Value: A. thaliana
  misc_feature: MA Experiment 20000436 PARAMETER Experiment Name: At_Drought_P Parameter: Plant Line Value: WS
  misc_feature: MA Experiment 20000436 PARAMETER Experiment Name: At_Drought_P Parameter: Timepoint (hr) Value: 12
  misc_feature: MA Experiment 20000436 PARAMETER Experiment Name: At_Drought_P Parameter: Tissue Value: Whole Plant
  misc_feature: MA Experiment 20000436 PARAMETER Experiment Name: At_Drought_P Parameter: Treatment Value: Drought vs. No Drought
  misc_feature: MA Experiment ID: 20000437 Result: Up-regulated in Transcription
  misc_feature: MA Experiment 20000437 PARAMETER Experiment Name: At_Drought_P Parameter: Age (day) Value: 8
  misc_feature: MA Experiment 20000437 PARAMETER Experiment Name: At_Drought_P Parameter: Organism Value: A. thaliana
  misc_feature: MA Experiment 20000437 PARAMETER Experiment Name: At_Drought_P Parameter: Plant Line Value: WS
  misc_feature: MA Experiment 20000437 PARAMETER Experiment Name: At_Drought_P Parameter: Timepoint (hr) Value: 24
  misc_feature: MA Experiment 20000437 PARAMETER Experiment Name: At_Drought_P Parameter: Tissue Value: Whole Plant
  misc_feature: MA Experiment 20000437 PARAMETER Experiment Name: At_Drought_P Parameter: Treatment Value: Drought vs. No Drought
  misc_feature: MA Experiment ID: 20001557 Result: Up-regulated in Transcription
  misc_feature: MA Experiment 20001557 PARAMETER Experiment Name: At_Drought_Soil_Dry_P Parameter: Age (day) Value: 27
  misc_feature: MA Experiment 20001557 PARAMETER Experiment Name: At_Drought_Soil_Dry_P Parameter: Organism Value: A. thaliana
  misc_feature: MA Experiment 20001557 PARAMETER Experiment Name: At_Drought_Soil_Dry_P Parameter: Plant Line Value: WS
  misc_feature: MA Experiment 20001557 PARAMETER Experiment Name: At_Drought_Soil_Dry_P Parameter: Post Timepoint (hr) Value: 3
  misc_feature: MA Experiment 20001557 PARAMETER Experiment Name: At_Drought_Soil_Dry_P Parameter: Post-Treatment Value: Re-Water vs. No Drought
  misc_feature: MA Experiment 20001557 PARAMETER Experiment Name: At_Drought_Soil_Dry_P Parameter: Timepoint (day) Value: 13
  misc_feature: MA Experiment 20001557 PARAMETER Experiment Name: At_Drought_Soil_Dry_P Parameter: Treatment Value: Drought vs. No Drought
  misc_feature: MA Experiment ID: 20001558 Result: Up-regulated in Transcription
  misc_feature: MA Experiment 20001558 PARAMETER Experiment Name: At_Drought_Soil_Dry_P Parameter: Age (day) Value: 27
  misc_feature: MA Experiment 20001558 PARAMETER Experiment Name: At_Drought_Soil_Dry_P Parameter: Organism Value: A. thaliana
  misc_feature: MA Experiment 20001558 PARAMETER Experiment Name: At_Drought_Soil_Dry_P Parameter: Plant Line Value: WS
  misc_feature: MA Experiment 20001558 PARAMETER Experiment Name: At_Drought_Soil_Dry_P Parameter: Post Timepoint (hr) Value: 6
  misc_feature: MA Experiment 20001558 PARAMETER Experiment Name: At_Drought_Soil_Dry_P Parameter: Post-Treatment Value: Re-Water vs. No Drought
  misc_feature: MA Experiment 20001558 PARAMETER Experiment Name: At_Drought_Soil_Dry_P Parameter: Timepoint (day) Value: 13
  misc_feature: MA Experiment 20001558 PARAMETER Experiment Name: At_Drought_Soil_Dry_P Parameter: Treatment Value: Drought vs. No Drought

SEQ ID NO: 33394 - protein, 343 aa, Arabidopsis thaliana; identical to SEQ ID NO: 29804
  peptide (1)..(343): Ceres Seq. ID no. 12330224
  misc_feature (66)..(340): Homolog of NCBI NO: 34899190 NR Description: alcohol dehydrogenase-like protein
  misc_feature (61)..(336): Homolog of NCBI NO: 34899216 NR Description: alcohol dehydrogenase-like protein
  misc_feature (35)..(341): Homolog of NCBI NO: 34899188 NR Description: similar to alcohol dehydrogenase
  misc_feature (64)..(339): Homolog of NCBI NO: 33146507 NR Description: putative short-chain alcohol dehydrogenase
  misc_feature (74)..(339): Homolog of NCBI NO: 15529184 NR Description: AT3g26770/MDJ14_21 [Arabidopsis thaliana]
  misc_feature (74)..(339): Homolog of NCBI NO: 18405088 NR Description: putative short chain alcohol dehydrogenase
  misc_feature (55)..(338): Homolog of NCBI NO: 30688484 NR Description: short-chain dehydrogenase/reductase family
  misc_feature (177)..(343): Homolog of NCBI NO: 21618306 NR Description: unknown [Arabidopsis thaliana]
  misc_feature (76)..(343): Homolog of NCBI NO: 18412155 NR Description: putative alcohol dehydrogenase; protein id:
  misc_feature (76)..(343): Homolog of NCBI NO: 25283123 NR Description: probable alcohol dehydrogenase [imported] -
  misc_feature (66)..(340): Homolog of NCBI NO: 34899190 NR Description: alcohol dehydrogenase-like protein
  misc_feature (61)..(336): Homolog of NCBI NO: 34899216 NR Description: alcohol dehydrogenase-like protein
  misc_feature (35)..(341): Homolog of NCBI NO: 34899188 NR Description: similar to alcohol dehydrogenase
  misc_feature (64)..(339): Homolog of NCBI NO: 33146507 NR Description: putative short-chain alcohol dehydrogenase
  misc_feature (74)..(339): Homolog of NCBI NO: 15529184 NR Description: AT3g26770/MDJ14_21 [Arabidopsis thaliana]
  misc_feature (74)..(339): Homolog of NCBI NO: 18405088 NR Description: putative short chain alcohol dehydrogenase
  misc_feature (55)..(338): Homolog of NCBI NO: 30688484 NR Description: short-chain dehydrogenase/reductase family
  misc_feature (177)..(343): Homolog of NCBI NO: 21618306 NR Description: unknown [Arabidopsis thaliana]
  misc_feature (76)..(343): Homolog of NCBI NO: 18412155 NR Description: putative alcohol dehydrogenase; protein id:
  misc_feature (76)..(343): Homolog of NCBI NO: 25283123 NR Description: probable alcohol dehydrogenase [imported] -

SEQ ID NO: 33395 - protein, 300 aa, Arabidopsis thaliana; identical to SEQ ID NO: 29805
  peptide (1)..(300): Ceres Seq. ID no. 12330225
  misc_feature (23)..(297): Homolog of NCBI NO: 34899190 NR Description: alcohol dehydrogenase-like protein
  misc_feature (18)..(293): Homolog of NCBI NO: 34899216 NR Description: alcohol dehydrogenase-like protein
  misc_feature (1)..(298): Homolog of NCBI NO: 34899188 NR Description: similar to alcohol dehydrogenase
  misc_feature (21)..(296): Homolog of NCBI NO: 33146507 NR Description: putative short-chain alcohol dehydrogenase
  misc_feature (31)..(296): Homolog of NCBI NO: 15529184 NR Description: AT3g26770/MDJ14_21 [Arabidopsis thaliana]
  misc_feature (31)..(296): Homolog of NCBI NO: 18405088 NR Description: putative short chain alcohol dehydrogenase
  misc_feature (12)..(295): Homolog of NCBI NO: 30688484 NR Description: short-chain dehydrogenase/reductase family
  misc_feature (134)..(300): Homolog of NCBI NO: 21618306 NR Description: unknown [Arabidopsis thaliana]
  misc_feature (33)..(300): Homolog of NCBI NO: 18412155 NR Description: putative alcohol dehydrogenase; protein id:
  misc_feature (33)..(300): Homolog of NCBI NO: 25283123 NR Description: probable alcohol dehydrogenase [imported] -
  misc_feature (23)..(297): Homolog of NCBI NO: 34899190 NR Description: alcohol dehydrogenase-like protein
  misc_feature (18)..(293): Homolog of NCBI NO: 34899216 NR Description: alcohol dehydrogenase-like protein
  misc_feature (1)..(298): Homolog of NCBI NO: 34899188 NR Description: similar to alcohol dehydrogenase
  misc_feature (21)..(296): Homolog of NCBI NO: 33146507 NR Description: putative short-chain alcohol dehydrogenase
  misc_feature (31)..(296): Homolog of NCBI NO: 15529184 NR Description: AT3g26770/MDJ14_21 [Arabidopsis thaliana]
  misc_feature (31)..(296): Homolog of NCBI NO: 18405088 NR Description: putative short chain alcohol dehydrogenase
  misc_feature (12)..(295): Homolog of NCBI NO: 30688484 NR Description: short-chain dehydrogenase/reductase family
  misc_feature (134)..(300): Homolog of NCBI NO: 21618306 NR Description: unknown [Arabidopsis thaliana]
  misc_feature (33)..(300): Homolog of NCBI NO: 18412155 NR Description: putative alcohol dehydrogenase; protein id:
  misc_feature (33)..(300): Homolog of NCBI NO: 25283123 NR Description: probable alcohol dehydrogenase [imported] -

SEQ ID NO: 33396 - protein, 186 aa, Arabidopsis thaliana; identical to SEQ ID NO: 29806
  peptide (1)..(186): Ceres Seq. ID no. 12330226
  misc_feature (1)..(183): Homolog of NCBI NO: 34899190 NR Description: alcohol dehydrogenase-like protein
  misc_feature (1)..(179): Homolog of NCBI NO: 34899216 NR Description: alcohol dehydrogenase-like protein
  misc_feature (1)..(184): Homolog of NCBI NO: 34899188 NR Description: similar to alcohol dehydrogenase
  misc_feature (1)..(182): Homolog of NCBI NO: 33146507 NR Description: putative short-chain alcohol dehydrogenase
  misc_feature (1)..(182): Homolog of NCBI NO: 15529184 NR Description: AT3g26770/MDJ14_21 [Arabidopsis thaliana]
  misc_feature (1)..(182): Homolog of NCBI NO: 18405088 NR Description: putative short chain alcohol dehydrogenase
  misc_feature (1)..(181): Homolog of NCBI NO: 30688484 NR Description: short-chain dehydrogenase/reductase family
  misc_feature (20)..(186): Homolog of NCBI NO: 21618306 NR Description: unknown [Arabidopsis thaliana]
  misc_feature (1)..(186): Homolog of NCBI NO: 18412155 NR Description: putative alcohol dehydrogenase; protein id:
  misc_feature (1)..(186): Homolog of NCBI NO: 25283123 NR Description: probable alcohol dehydrogenase [imported] -
  misc_feature (1)..(183): Homolog of NCBI NO: 34899190 NR Description: alcohol dehydrogenase-like protein
  misc_feature (1)..(179): Homolog of NCBI NO: 34899216 NR Description: alcohol dehydrogenase-like protein
  misc_feature (1)..(184): Homolog of NCBI NO: 34899188 NR Description: similar to alcohol dehydrogenase
  misc_feature (1)..(182): Homolog of NCBI NO: 33146507 NR Description: putative short-chain alcohol dehydrogenase
  misc_feature (1)..(182): Homolog of NCBI NO: 15529184 NR Description: AT3g26770/MDJ14_21 [Arabidopsis thaliana]
  misc_feature (1)..(182): Homolog of NCBI NO: 18405088 NR Description: putative short chain alcohol dehydrogenase
  misc_feature (1)..(181): Homolog of NCBI NO: 30688484 NR Description: short-chain dehydrogenase/reductase family
  misc_feature (20)..(186): Homolog of NCBI NO: 21618306 NR Description: unknown [Arabidopsis thaliana]
  misc_feature (1)..(186): Homolog of NCBI NO: 18412155 NR Description: putative alcohol dehydrogenase; protein id:
  misc_feature (1)..(186): Homolog of NCBI NO: 25283123 NR Description: probable alcohol dehydrogenase [imported] -

SEQ ID NO: 33397 - DNA, 820 bp, Arabidopsis thaliana; identical to SEQ ID NO: 29807
  misc_feature (1)..(820): Ceres Seq. ID no. 13490245
  misc_feature: MA Experiment ID: 108461 Result: Up-regulated in Transcription
  misc_feature: MA Experiment 108461 PARAMETER Experiment Name: At_Germinating_Seeds_cDNA_P Parameter: Age (day) Value: 1 vs. 0
  misc_feature: MA Experiment 108461 PARAMETER Experiment Name: At_Germinating_Seeds_cDNA_P Parameter: Tissue Value: Germinating Seeds
  misc_feature: MA Experiment ID: 108462 Result: Up-regulated in Transcription
  misc_feature: MA Experiment 108462 PARAMETER Experiment Name: At_Germinating_Seeds_cDNA_P Parameter: Age (day) Value: 2 vs. 0
  misc_feature: MA Experiment 108462 PARAMETER Experiment Name: At_Germinating_Seeds_cDNA_P Parameter: Tissue Value: Germinating Seeds
  misc_feature: MA Experiment ID: 108463 Result: Up-regulated in Transcription
  misc_feature: MA Experiment 108463 PARAMETER Experiment Name: At_Germinating_Seeds_cDNA_P Parameter: Age (day) Value: 3 vs. 0
  misc_feature: MA Experiment 108463 PARAMETER Experiment Name: At_Germinating_Seeds_cDNA_P Parameter: Tissue Value: Germinating Seeds
  misc_feature: MA Experiment ID: 20000180 Result: Up-regulated in Transcription
  misc_feature: MA Experiment 20000180 PARAMETER Experiment Name: At_Germinating_Seeds_P Parameter: Age (hr) Value: 24 vs. 0
  misc_feature: MA Experiment 20000180 PARAMETER Experiment Name: At_Germinating_Seeds_P Parameter: Tissue Value: Germinating Seeds
  misc_feature: MA Experiment ID: 20000185 Result: Up-regulated in Transcription
  misc_feature: MA Experiment 20000185 PARAMETER Experiment Name: At_Roots__P Parameter: Age (day) Value: 7 vs. 21
  misc_feature: MA Experiment 20000185 PARAMETER Experiment Name: At_Roots__P Parameter: Organism Value: A. thaliana
  misc_feature: MA Experiment 20000185 PARAMETER Experiment Name: At_Roots__P Parameter: Tissue Value: Roots vs. Whole Plant
  misc_feature: MA Experiment ID: 20000227 Result: Up-regulated in Transcription
  misc_feature: MA Experiment 20000227 PARAMETER Experiment Name: At_Root-Tips-vs-Tops_P Parameter: Tissue Value: Root Tips vs. Root Tops
  misc_feature: MA Experiment ID: 20000264 Result: Up-regulated in Transcription
  misc_feature: MA Experiment 20000264 PARAMETER Experiment Name: At_Open_Flower_P Parameter: Age (day) Value: 21
  misc_feature: MA Experiment 20000264 PARAMETER Experiment Name: At_Open_Flower_P Parameter: Plant Line Value: WS
  misc_feature: MA Experiment 20000264 PARAMETER Experiment Name: At_Open_Flower_P Parameter: Tissue Value: Open Flower vs. Whole Plant
  misc_feature: MA Experiment ID: 20000265 Result: Up-regulated in Transcription
  misc_feature: MA Experiment 20000265 PARAMETER Experiment Name: At_Open_Flower_P Parameter: Age (day) Value: 21
  misc_feature: MA Experiment 20000265 PARAMETER Experiment Name: At_Open_Flower_P Parameter: Plant Line Value: WS
  misc_feature: MA Experiment 20000265 PARAMETER Experiment Name: At_Open_Flower_P Parameter: Tissue Value: Closed Flower vs. Whole Plant
  misc_feature: MA Experiment ID: 20000286 Result: Up-regulated in Transcription
  misc_feature: MA Experiment 20000286 PARAMETER Experiment Name: At_Open_Flower_P Parameter: Age (day) Value: 21
  misc_feature: MA Experiment 20000286 PARAMETER Experiment Name: At_Open_Flower_P Parameter: Plant Line Value: WS
  misc_feature: MA Experiment 20000286 PARAMETER Experiment Name: At_Open_Flower_P Parameter: Tissue Value: Half Open vs. Whole Plant
  misc_feature: MA Experiment ID: 20000439 Result: Up-regulated in Transcription
  misc_feature: MA Experiment 20000439 PARAMETER Experiment Name: At_Roots__P Parameter: Age (day) Value: 14 vs. 21
  misc_feature: MA Experiment 20000439 PARAMETER Experiment Name: At_Roots__P Parameter: Organism Value: A. thaliana
  misc_feature: MA Experiment 20000439 PARAMETER Experiment Name: At_Roots__P Parameter: Tissue Value: Roots vs. Whole Plant

SEQ ID NO: 33398 - protein, 173 aa, Arabidopsis thaliana; identical to SEQ ID NO: 29808
  peptide (1)..(173): Ceres Seq. ID no. 13490246
  misc_feature (88)..(143): Pfam Name: OB-fold nucleic acid binding domain Pfam Description: OB-fold nucleic acid binding domain
  misc_feature (37)..(171): Homolog of NCBI NO: 15235304 NR Description: expressed protein [Arabidopsis thaliana]
  misc_feature (45)..(173): Homolog of NCBI NO: 24413970 NR Description: contains EST AU181579(C50456)~similar to Oryza
  misc_feature (38)..(173): Homolog of NCBI NO: 34904470 NR Description: OSJNBa0086P08.14 [Oryza sativa (japonica
  misc_feature (46)..(173): Homolog of NCBI NO: 18403397 NR Description: expressed protein [Arabidopsis thaliana]
  misc_feature (37)..(171): Homolog of NCBI NO: 34909622 NR Description: P0435B05.31 [Oryza sativa (japonica
  misc_feature (112)..(171): Homolog of NCBI NO: 6573753 NR Description: F20B24.1 [Arabidopsis thaliana]
  misc_feature (33)..(111): Homolog of NCBI NO: 6573753 NR Description: F20B24.1 [Arabidopsis thaliana]
  misc_feature (37)..(171): Homolog of NCBI NO: 18391179 NR Description: expressed protein [Arabidopsis thaliana]
  misc_feature (33)..(171): Homolog of NCBI NO: 30681801 NR Description: expressed protein [Arabidopsis thaliana]
  misc_feature (37)..(173): Homolog of NCBI NO: 18395285 NR Description: expressed protein [Arabidopsis thaliana]

SEQ ID NO: 33399 - protein, 137 aa, Arabidopsis thaliana; identical to SEQ ID NO: 29809
  peptide (1)..(137): Ceres Seq. ID no. 13490247
  misc_feature (52)..(107): Pfam Name: OB-fold nucleic acid binding domain Pfam Description: OB-fold nucleic acid binding domain
  misc_feature (1)..(135): Homolog of NCBI NO: 15235304 NR Description: expressed protein [Arabidopsis thaliana]
  misc_feature (9)..(137): Homolog of NCBI NO: 24413970 NR Description: contains EST AU181579(C50456)~similar to Oryza
  misc_feature (2)..(137): Homolog of NCBI NO: 34904470 NR Description: OSJNBa0086P08.14 [Oryza sativa (japonica
  misc_feature (10)..(137): Homolog of NCBI NO: 18403397 NR Description: expressed protein [Arabidopsis thaliana]
  misc_feature (1)..(135): Homolog of NCBI NO: 34909622 NR Description: P0435B05.31 [Oryza sativa (japonica
  misc_feature (76)..(135): Homolog of NCBI NO: 6573753 NR Description: F20B24.1 [Arabidopsis thaliana]
  misc_feature (1)..(75): Homolog of NCBI NO: 6573753 NR Description: F20B24.1 [Arabidopsis thaliana]
  misc_feature (1)..(135): Homolog of NCBI NO: 18391179 NR Description: expressed protein [Arabidopsis thaliana]
  misc_feature (1)..(135): Homolog of NCBI NO: 30681801 NR Description: expressed protein [Arabidopsis thaliana]
  misc_feature (1)..(137): Homolog of NCBI NO: 18395285 NR Description: expressed protein [Arabidopsis thaliana]

SEQ ID NO: 33400 - protein, 100 aa, Arabidopsis thaliana; identical to SEQ ID NO: 29810
  peptide (1)..(100): Ceres Seq. ID no. 13490248
  misc_feature (15)..(70): Pfam Name: OB-fold nucleic acid binding domain Pfam Description: OB-fold nucleic acid binding domain
  misc_feature (1)..(98): Homolog of NCBI NO: 15235304 NR Description: expressed protein [Arabidopsis thaliana]
  misc_feature (1)..(100): Homolog of NCBI NO: 24413970 NR Description: contains EST AU181579(C50456)~similar to Oryza
  misc_feature (1)..(100): Homolog of NCBI NO: 34904470 NR Description: OSJNBa0086P08.14 [Oryza sativa (japonica
  misc_feature (1)..(100): Homolog of NCBI NO: 18403397 NR Description: expressed protein [Arabidopsis thaliana]
  misc_feature (1)..(98): Homolog of NCBI NO: 34909622 NR Description: P0435B05.31 [Oryza sativa (japonica
  misc_feature (39)..(98): Homolog of NCBI NO: 6573753 NR Description: F20B24.1 [Arabidopsis thaliana]
  misc_feature (1)..(38): Homolog of NCBI NO: 6573753 NR Description: F20B24.1 [Arabidopsis thaliana]
  misc_feature (1)..(98): Homolog of NCBI NO: 18391179 NR Description: expressed protein [Arabidopsis thaliana]
  misc_feature (1)..(98): Homolog of NCBI NO: 30681801 NR Description: expressed protein [Arabidopsis thaliana]
  misc_feature (1)..(100): Homolog of NCBI NO: 18395285 NR Description: expressed protein [Arabidopsis thaliana]

SEQ ID NO: 33401 - DNA, 1026 bp, Arabidopsis thaliana; identical to SEQ ID NO: 29811
  misc_feature (1)..(1026): Ceres Seq. ID no. 13495944
  misc_feature: MA Experiment ID: 20001248 Result: Up-regulated in Transcription
  misc_feature: MA Experiment 20001248 PARAMETER Experiment Name: At_Far-red-induction_P Parameter: Age (day) Value: 7
  misc_feature: MA Experiment 20001248 PARAMETER Experiment Name: At_Far-red-induction_P Parameter: Light Value: Far-red vs. White
  misc_feature: MA Experiment 20001248 PARAMETER Experiment Name: At_Far-red-induction_P Parameter: Organism Value: A. thaliana
  misc_feature: MA Experiment 20001248 PARAMETER Experiment Name: At_Far-red-induction_P Parameter: Plant Line Value: Columbia
  misc_feature: MA Experiment 20001248 PARAMETER Experiment Name: At_Far-red-induction_P Parameter: Timepoint (hr) Value: 4
  misc_feature: MA Experiment 20001248 PARAMETER Experiment Name: At_Far-red-induction_P Parameter: Tissue Value: Whole Plant

SEQ ID NO: 33402 - protein, 232 aa, Arabidopsis thaliana; identical to SEQ ID NO: 29812
  peptide (1)..(232): Ceres Seq. ID no. 13495945
  misc_feature (173)..(232): Homolog of NCBI NO: 7485554 NR Description: hypothetical protein F16G20.180 - Arabidopsis
  misc_feature (185)..(232): Homolog of NCBI NO: 25446695 NR Description: Unknown protein [Oryza sativa (japonica
  misc_feature (1)..(45): Homolog of NCBI NO: 25446695 NR Description: Unknown protein [Oryza sativa (japonica
  misc_feature (64)..(231): Homolog of NCBI NO: 25446695 NR Description: Unknown protein [Oryza sativa (japonica
  misc_feature (5)..(162): Homolog of NCBI NO: 7485553 NR Description: hypothetical protein F16G20.170 - Arabidopsis
  misc_feature (1)..(213): Homolog of NCBI NO: 37536436 NR Description: hypothetical protein [Oryza sativa (japonica
  misc_feature (1)..(201): Homolog of NCBI NO: 15238071 NR Description: hypothetical protein [Arabidopsis thaliana]
  misc_feature (11)..(232): Homolog of NCBI NO: 21554542 NR Description: unknown [Arabidopsis thaliana]
  misc_feature (5)..(232): Homolog of NCBI NO: 22328885 NR Description: proline-rich protein family [Arabidopsis
  misc_feature (1)..(232): Homolog of NCBI NO: 15222552 NR Description: proline-rich protein family [Arabidopsis

SEQ ID NO: 33403 - protein, 222 aa, Arabidopsis thaliana; identical to SEQ ID NO: 29813
  peptide (1)..(222): Ceres Seq. ID no. 13495946
  misc_feature (163)..(222): Homolog of NCBI NO: 7485554 NR Description: hypothetical protein F16G20.180 - Arabidopsis
  misc_feature (175)..(222): Homolog of NCBI NO: 25446695 NR Description: Unknown protein [Oryza sativa (japonica
  misc_feature (1)..(35): Homolog of NCBI NO: 25446695 NR Description: Unknown protein [Oryza sativa (japonica
  misc_feature (54)..(221): Homolog of NCBI NO: 25446695 NR Description: Unknown protein [Oryza sativa (japonica
  misc_feature (1)..(152): Homolog of NCBI NO: 7485553 NR Description: hypothetical protein F16G20.170 - Arabidopsis
  misc_feature (1)..(203): Homolog of NCBI NO: 37536436 NR Description: hypothetical protein [Oryza sativa (japonica
  misc_feature (1)..(191): Homolog of NCBI NO: 15238071 NR Description: hypothetical protein [Arabidopsis thaliana]
  misc_feature (1)..(222): Homolog of NCBI NO: 21554542 NR Description: unknown [Arabidopsis thaliana]
  misc_feature (1)..(222): Homolog of NCBI NO: 22328885 NR Description: proline-rich protein family [Arabidopsis
  misc_feature (1)..(222): Homolog of NCBI NO: 15222552 NR Description: proline-rich protein family [Arabidopsis

SEQ ID NO: 33404 - protein, 207 aa, Arabidopsis thaliana; identical to SEQ ID NO: 29814
  peptide (1)..(207): Ceres Seq. ID no. 13495947
  misc_feature (148)..(207): Homolog of NCBI NO: 7485554 NR Description: hypothetical protein F16G20.180 - Arabidopsis
  misc_feature (160)..(207): Homolog of NCBI NO: 25446695 NR Description: Unknown protein [Oryza sativa (japonica
  misc_feature (1)..(20): Homolog of NCBI NO: 25446695 NR Description: Unknown protein [Oryza sativa (japonica
  misc_feature (39)..(206): Homolog of NCBI NO: 25446695 NR Description: Unknown protein [Oryza sativa (japonica
  misc_feature (1)..(137): Homolog of NCBI NO: 7485553 NR Description: hypothetical protein F16G20.170 - Arabidopsis
  misc_feature (1)..(188): Homolog of NCBI NO: 37536436 NR Description: hypothetical protein [Oryza sativa (japonica
  misc_feature (1)..(176): Homolog of NCBI NO: 15238071 NR Description: hypothetical protein [Arabidopsis thaliana]
  misc_feature (1)..(207): Homolog of NCBI NO: 21554542 NR Description: unknown [Arabidopsis thaliana]
  misc_feature (1)..(207): Homolog of NCBI NO: 22328885 NR Description: proline-rich protein family [Arabidopsis
  misc_feature (1)..(207): Homolog of NCBI NO: 15222552 NR Description: proline-rich protein family [Arabidopsis

SEQ ID NO: 33405 - DNA, 873 bp, Arabidopsis thaliana; identical to SEQ ID NO: 21755
  misc_feature (1)..(873): Ceres Seq. ID no. 13497760
  misc_feature: MA Experiment ID: 108488 Result: Down-regulated in Transcription
  misc_feature: MA Experiment ID: 20000069 Result: Up-regulated in Transcription
  misc_feature: MA Experiment 20000069 PARAMETER Experiment Name: At_100uM_ABA_Mutants_cDNA_P Parameter: Plant Line Value: CS23
  misc_feature: MA Experiment 20000069 PARAMETER Experiment Name: At_100uM_ABA_Mutants_cDNA_P Parameter: Timepoint (hr) Value: 6
  misc_feature: MA Experiment 20000069 PARAMETER Experiment Name: At_100uM_ABA_Mutants_cDNA_P Parameter: Tissue Value: Aerial
  misc_feature: MA Experiment 20000069 PARAMETER Experiment Name: At_100uM_ABA_Mutants_cDNA_P Parameter: Treatment Value: 100uM ABA vs. No Treatment
  misc_feature: MA Experiment ID: 20000070 Result: Up-regulated in Transcription
  misc_feature: MA Experiment 20000070 PARAMETER Experiment Name: At_100uM_ABA_Mutants_cDNA_P Parameter: Plant Line Value: CS24
  misc_feature: MA Experiment 20000070 PARAMETER Experiment Name: At_100uM_ABA_Mutants_cDNA_P Parameter: Timepoint (hr) Value: 6
  misc_feature: MA Experiment 20000070 PARAMETER Experiment Name: At_100uM_ABA_Mutants_cDNA_P Parameter: Tissue Value: Aerial
  misc_feature: MA Experiment 20000070 PARAMETER Experiment Name: At_100uM_ABA_Mutants_cDNA_P Parameter: Treatment Value: 100uM ABA vs. No Treatment
  misc_feature: MA Experiment ID: 20000071 Result: Up-regulated in Transcription
  misc_feature: MA Experiment 20000071 PARAMETER Experiment Name: At_100uM_ABA_Mutants_cDNA_P Parameter: Plant Line Value: CS8104
  misc_feature: MA Experiment 20000071 PARAMETER Experiment Name: At_100uM_ABA_Mutants_cDNA_P Parameter: Timepoint (hr) Value: 6
  misc_feature: MA Experiment 20000071 PARAMETER Experiment Name: At_100uM_ABA_Mutants_cDNA_P Parameter: Tissue Value: Aerial
  misc_feature: MA Experiment 20000071 PARAMETER Experiment Name: At_100uM_ABA_Mutants_cDNA_P Parameter: Treatment Value: 100uM ABA vs. No Treatment
  misc_feature: MA Experiment ID: 20000072 Result: Up-regulated in Transcription
  misc_feature: MA Experiment 20000072 PARAMETER Experiment Name: At_100uM_ABA_Mutants_cDNA_P Parameter: Plant Line Value: CS8105
  misc_feature: MA Experiment 20000072 PARAMETER Experiment Name: At_100uM_ABA_Mutants_cDNA_P Parameter: Timepoint (hr) Value: 6
  misc_feature: MA Experiment 20000072 PARAMETER Experiment Name: At_100uM_ABA_Mutants_cDNA_P Parameter: Tissue Value: Aerial
  misc_feature: MA Experiment 20000072 PARAMETER Experiment Name: At_100uM_ABA_Mutants_cDNA_P Parameter: Treatment Value: 100uM ABA vs. No Treatment
  misc_feature: MA Experiment ID: 20000086 Result: Up-regulated in Transcription
  misc_feature: MA Experiment 20000086 PARAMETER Experiment Name: At_100uM_ABA_Mutants_cDNA_P Parameter: Plant Line Value: CS22
  misc_feature: MA Experiment 20000086 PARAMETER Experiment Name: At_100uM_ABA_Mutants_cDNA_P Parameter: Timepoint (hr) Value: 6
  misc_feature: MA Experiment 20000086 PARAMETER Experiment Name: At_100uM_ABA_Mutants_cDNA_P Parameter: Tissue Value: Aerial
  misc_feature: MA Experiment 20000086 PARAMETER Experiment Name: At_100uM_ABA_Mutants_cDNA_P Parameter: Treatment Value: 100uM ABA vs. No Treatment
  misc_feature: MA Experiment ID: 20000087 Result: Up-regulated in Transcription
  misc_feature: MA Experiment 20000087 PARAMETER Experiment Name: At_100uM_ABA_Mutants_cDNA_P Parameter: Plant Line Value: WS
  misc_feature: MA Experiment 20000087 PARAMETER Experiment Name: At_100uM_ABA_Mutants_cDNA_P Parameter: Timepoint (hr) Value: 6
  misc_feature: MA Experiment 20000087 PARAMETER Experiment Name: At_100uM_ABA_Mutants_cDNA_P Parameter: Tissue Value: Aerial
  misc_feature: MA Experiment 20000087 PARAMETER Experiment Name: At_100uM_ABA_Mutants_cDNA_P Parameter: Treatment Value: 100uM ABA vs. No Treatment
  misc_feature: MA Experiment ID: 20000089 Result: Up-regulated in Transcription
  misc_feature: MA Experiment ID: 20000090 Result: Up-regulated in Transcription
  misc_feature: MA Experiment ID: 20000117 Result: Up-regulated in Transcription
  misc_feature: MA Experiment 20000117 PARAMETER Experiment Name: At_100uM_ABA_Mutants_cDNA_P Parameter: Plant Line Value: Columbia
  misc_feature: MA Experiment 20000117 PARAMETER Experiment Name: At_100uM_ABA_Mutants_cDNA_P Parameter: Timepoint (hr) Value: 6
  misc_feature: MA Experiment 20000117 PARAMETER Experiment Name: At_100uM_ABA_Mutants_cDNA_P Parameter: Tissue Value: Aerial
  misc_feature: MA Experiment 20000117 PARAMETER Experiment Name: At_100uM_ABA_Mutants_cDNA_P Parameter: Treatment Value: 100uM ABA vs. No Treatment
  misc_feature: MA Experiment ID: 20000171 Result: Down-regulated in Transcription
  misc_feature: MA Experiment 20000171 PARAMETER Experiment Name: At_42deg_Heat_P Parameter: Age (day) Value: 14
  misc_feature: MA Experiment 20000171 PARAMETER Experiment Name: At_42deg_Heat_P Parameter: Organism Value: A. thaliana
  misc_feature: MA Experiment 20000171 PARAMETER Experiment Name: At_42deg_Heat_P Parameter: Plant Line Value: WS
  misc_feature: MA Experiment 20000171 PARAMETER Experiment Name: At_42deg_Heat_P Parameter: Temperature (deg C) Value: 42 vs. 22
  misc_feature: MA Experiment 20000171 PARAMETER Experiment Name: At_42deg_Heat_P Parameter: Timepoint (hr) Value: 1
  misc_feature: MA Experiment 20000171 PARAMETER Experiment Name: At_42deg_Heat_P Parameter: Tissue Value: Aerial
  misc_feature: MA Experiment ID: 20000173 Result: Down-regulated in Transcription
  misc_feature: MA Experiment 20000173 PARAMETER Experiment Name: At_42deg_Heat_P Parameter: Age (day) Value: 14
  misc_feature: MA Experiment 20000173 PARAMETER Experiment Name: At_42deg_Heat_P Parameter: Organism Value: A. thaliana
  misc_feature: MA Experiment 20000173 PARAMETER Experiment Name: At_42deg_Heat_P Parameter: Plant Line Value: WS
  misc_feature: MA Experiment 20000173 PARAMETER Experiment Name: At_42deg_Heat_P Parameter: Temperature (deg C) Value: 42 vs. 22
  misc_feature: MA Experiment 20000173 PARAMETER Experiment Name: At_42deg_Heat_P Parameter: Timepoint (hr) Value: 6
  misc_feature: MA Experiment 20000173 PARAMETER Experiment Name: At_42deg_Heat_P Parameter: Tissue Value: Aerial
  misc_feature: MA Experiment ID: 20000184 Result: Down-regulated in Transcription
  misc_feature: MA Experiment 20000184 PARAMETER Experiment Name: At_Shoots__P Parameter: Age (day) Value: 7
  misc_feature: MA Experiment 20000184 PARAMETER Experiment Name: At_Shoots__P Parameter: Tissue Value: Shoots vs. Whole Plant
  misc_feature: MA Experiment ID: 20000234 Result: Down-regulated in Transcription
  misc_feature: MA Experiment 20000234 PARAMETER Experiment Name: At_Siliques_P Parameter: Age (day) Value: 21
  misc_feature: MA Experiment 20000234 PARAMETER Experiment Name: At_Siliques_P Parameter: Organism Value: A. thaliana
  misc_feature: MA Experiment 20000234 PARAMETER Experiment Name: At_Siliques_P Parameter: Plant Line Value: WS
  misc_feature: MA Experiment 20000234 PARAMETER Experiment Name: At_Siliques_P Parameter: Tissue Value: Less Than 5mm Siliques vs. Whole Plant
  misc_feature: MA Experiment ID: 20000235 Result: Down-regulated in Transcription
  misc_feature: MA Experiment 20000235 PARAMETER Experiment Name: At_Siliques_P Parameter: Age (day) Value: 21
  misc_feature: MA Experiment 20000235 PARAMETER Experiment Name: At_Siliques_P Parameter: Organism Value: A. thaliana
  misc_feature: MA Experiment 20000235 PARAMETER Experiment Name: At_Siliques_P Parameter: Plant Line Value: WS
  misc_feature: MA Experiment 20000235 PARAMETER Experiment Name: At_Siliques_P Parameter: Tissue Value: 5-10mm Siliques vs. Whole Plant
  misc_feature: MA Experiment ID: 20000436 Result: Up-regulated in Transcription
  misc_feature: MA Experiment 20000436 PARAMETER Experiment Name: At_Drought_P Parameter: Age (day) Value: 7
  misc_feature: MA Experiment 20000436 PARAMETER Experiment Name: At_Drought_P Parameter: Organism Value: A. thaliana
  misc_feature: MA Experiment 20000436 PARAMETER Experiment Name: At_Drought_P Parameter: Plant Line Value: WS
  misc_feature: MA Experiment 20000436 PARAMETER Experiment Name: At_Drought_P Parameter: Timepoint (hr) Value: 12
  misc_feature: MA Experiment 20000436 PARAMETER Experiment Name: At_Drought_P Parameter: Tissue Value: Whole Plant
  misc_feature: MA Experiment 20000436 PARAMETER Experiment Name: At_Drought_P Parameter: Treatment Value: Drought vs. No Drought
  misc_feature: MA Experiment ID: 20000437 Result: Up-regulated in Transcription
  misc_feature: MA Experiment 20000437 PARAMETER Experiment Name: At_Drought_P Parameter: Age (day) Value: 8
  misc_feature: MA Experiment 20000437 PARAMETER Experiment Name: At_Drought_P Parameter: Organism Value: A. thaliana
  misc_feature: MA Experiment 20000437 PARAMETER Experiment Name: At_Drought_P Parameter: Plant Line Value: WS
  misc_feature: MA Experiment 20000437 PARAMETER Experiment Name: At_Drought_P Parameter: Timepoint (hr) Value: 24
  misc_feature: MA Experiment 20000437 PARAMETER Experiment Name: At_Drought_P Parameter: Tissue Value: Whole Plant
  misc_feature: MA Experiment 20000437 PARAMETER Experiment Name: At_Drought_P Parameter: Treatment Value: Drought vs. No Drought
  misc_feature: MA Experiment ID: 20000438 Result: Down-regulated in Transcription
  misc_feature: MA Experiment 20000438 PARAMETER Experiment Name: At_Shoots__P Parameter: Age (day) Value: 14
  misc_feature: MA Experiment 20000438 PARAMETER Experiment Name: At_Shoots__P Parameter: Tissue Value: Shoots vs. Whole Plant
  misc_feature: MA Experiment ID: 20000439 Result: Down-regulated in Transcription
  misc_feature: MA Experiment 20000439 PARAMETER Experiment Name: At_Roots__P Parameter: Age (day) Value: 14 vs. 21
  misc_feature: MA Experiment 20000439 PARAMETER Experiment Name: At_Roots__P Parameter: Organism Value: A. thaliana
  misc_feature: MA Experiment 20000439 PARAMETER Experiment Name: At_Roots__P Parameter: Tissue Value: Roots vs. Whole Plant
  misc_feature: MA Experiment ID: 20000495 Result: Down-regulated in Transcription
  misc_feature: MA Experiment 20000495 PARAMETER Experiment Name: At_Guard_Cells_P Parameter: Harvest Date Value: 8/2/2002
  misc_feature: MA Experiment 20000495 PARAMETER Experiment Name: At_Guard_Cells_P Parameter: Organism Value: A. thaliana
  misc_feature: MA Experiment 20000495 PARAMETER Experiment Name: At_Guard_Cells_P Parameter: Tissue Value: Guard Cells vs. Leaves
  misc_feature: MA Experiment ID: 20001451 Result: Down-regulated in Transcription
  misc_feature: MA Experiment 20001451 PARAMETER Experiment Name: At_Far-red-induction_P Parameter: Age (day) Value: 7
  misc_feature: MA Experiment 20001451 PARAMETER Experiment Name: At_Far-red-induction_P Parameter: Light Value: Far-red vs. White
  misc_feature: MA Experiment 20001451 PARAMETER Experiment Name: At_Far-red-induction_P Parameter: Organism Value: A. thaliana
  misc_feature: MA Experiment 20001451 PARAMETER Experiment Name: At_Far-red-induction_P Parameter: Plant Line Value: Columbia
  misc_feature: MA Experiment 20001451 PARAMETER Experiment Name: At_Far-red-induction_P Parameter: Timepoint (hr) Value: 24
  misc_feature: MA Experiment 20001451 PARAMETER Experiment Name: At_Far-red-induction_P Parameter: Tissue Value: Whole Plant
  misc_feature: MA Experiment ID: 20001558 Result: Down-regulated in Transcription
  misc_feature: MA Experiment 20001558 PARAMETER Experiment Name: At_Drought_Soil_Dry_P Parameter: Age (day) Value: 27
  misc_feature: MA Experiment 20001558 PARAMETER Experiment Name: At_Drought_Soil_Dry_P Parameter: Organism Value: A. thaliana
  misc_feature: MA Experiment 20001558 PARAMETER Experiment Name: At_Drought_Soil_Dry_P Parameter: Plant Line Value: WS
  misc_feature: MA Experiment 20001558 PARAMETER Experiment Name: At_Drought_Soil_Dry_P Parameter: Post Timepoint (hr) Value: 6
  misc_feature: MA Experiment 20001558 PARAMETER Experiment Name: At_Drought_Soil_Dry_P Parameter: Post-Treatment Value: Re-Water vs. No Drought
  misc_feature: MA Experiment 20001558 PARAMETER Experiment Name: At_Drought_Soil_Dry_P Parameter: Timepoint (day) Value: 13
  misc_feature: MA Experiment 20001558 PARAMETER Experiment Name: At_Drought_Soil_Dry_P Parameter: Treatment Value: Drought vs. No Drought
  misc_feature: MA Experiment ID: 20001560 Result: Down-regulated in Transcription
  misc_feature: MA Experiment 20001560 PARAMETER Experiment Name: At_Drought_Soil_Dry_P Parameter: Age (day) Value: 28
  misc_feature: MA Experiment 20001560 PARAMETER Experiment Name: At_Drought_Soil_Dry_P Parameter: Organism Value: A. thaliana
  misc_feature: MA Experiment 20001560 PARAMETER Experiment Name: At_Drought_Soil_Dry_P Parameter: Plant Line Value: WS
  misc_feature: MA Experiment 20001560 PARAMETER Experiment Name: At_Drought_Soil_Dry_P Parameter: Post Timepoint (hr) Value: None
  misc_feature: MA Experiment 20001560 PARAMETER Experiment Name: At_Drought_Soil_Dry_P Parameter: Post-Treatment Value: None
  misc_feature: MA Experiment 20001560 PARAMETER Experiment Name: At_Drought_Soil_Dry_P Parameter: Timepoint (day) Value: 14
  misc_feature: MA Experiment 20001560 PARAMETER Experiment Name: At_Drought_Soil_Dry_P Parameter: Treatment Value: Drought vs. No Drought

SEQ ID NO: 33406 - protein, 200 aa, Arabidopsis thaliana; identical to SEQ ID NO: 21756
  peptide (1)..(200): Ceres Seq. ID no. 13497761
  misc_feature (113)..(154): Pfam Name: Zinc finger, C3HC4 type (RING finger) Pfam Description: Zinc finger, C3HC4 type (RING finger)
  misc_feature (113)..(154): Pfam Name: Zinc finger, C3HC4 type (RING finger) Pfam Description: Zinc finger, C3HC4 type (RING finger)
  misc_feature (113)..(154): Pfam Name: Zinc finger, C3HC4 type (RING finger) Pfam Description: Zinc finger, C3HC4 type (RING finger)
  misc_feature (10)..(182): Homolog of NCBI NO: 15222073 NR Description: RING-H2 finger protein RHA3a -related
  misc_feature (20)..(188): Homolog of NCBI NO: 9293902 NR Description: contains similarity to RING zinc finger
  misc_feature (6)..(167): Homolog of NCBI NO: 21555237 NR Description: putative RING zinc finger protein [Arabidopsis
  misc_feature (6)..(167): Homolog of NCBI NO: 15223041 NR Description: RING zinc finger protein -related [Arabidopsis
  misc_feature (1)..(164): Homolog of NCBI NO: 7489432 NR Description: probable ring finger protein - barley
  misc_feature (10)..(182): Homolog of NCBI NO: 15222073 NR Description: RING-H2 finger protein RHA3a -related
  misc_feature (6)..(167): Homolog of NCBI NO: 21555237 NR Description: putative RING zinc finger protein [Arabidopsis
  misc_feature (1)..(164): Homolog of NCBI NO: 7489432 NR Description: probable ring finger protein - barley
  misc_feature (6)..(167): Homolog of NCBI NO: 15223041 NR Description: RING zinc finger protein -related [Arabidopsis
  misc_feature (6)..(167): Homolog of NCBI NO: 21555237 NR Description: putative RING zinc finger protein [Arabidopsis
  misc_feature (20)..(188): Homolog of NCBI NO: 9293902 NR Description: contains similarity to RING zinc finger
  misc_feature (10)..(182): Homolog of NCBI NO: 15222073 NR Description: RING-H2 finger protein RHA3a -related
  misc_feature (1)..(200): Homolog of NCBI NO: 15237013 NR Description: RING-H2 finger protein RHA3b [Arabidopsis
  misc_feature (1)..(200): Homolog of NCBI NO: 15227839 NR Description: RING zinc finger protein -related [Arabidopsis
  misc_feature (10)..(181): Homolog of NCBI NO: 15218042 NR Description: RING zinc finger protein -related [Arabidopsis
  misc_feature (71)..(166): Homolog of NCBI NO: 37536508 NR Description: putative ring finger protein
  misc_feature (1)..(68): Homolog of NCBI NO: 37536508 NR Description: putative ring finger protein
  misc_feature (1)..(200): Homolog of NCBI NO: 15237013 NR Description: RING-H2 finger protein RHA3b [Arabidopsis
  misc_feature (1)..(200): Homolog of NCBI NO: 15227839 NR Description: RING zinc finger protein -related [Arabidopsis
  misc_feature (10)..(181): Homolog of NCBI NO: 15218042 NR Description: RING zinc finger protein -related [Arabidopsis
  misc_feature (71)..(166): Homolog of NCBI NO: 37536508 NR Description: putative ring finger protein
  misc_feature (1)..(68): Homolog of NCBI NO: 37536508 NR Description: putative ring finger protein
  misc_feature (1)..(164): Homolog of NCBI NO: 7489432 NR Description: probable ring finger protein - barley
  misc_feature (6)..(167): Homolog of NCBI NO: 15223041 NR Description: RING zinc finger protein -related [Arabidopsis
  misc_feature (20)..(188): Homolog of NCBI NO: 9293902 NR Description: contains similarity to RING zinc finger
  misc_feature (1)..(68): Homolog of NCBI NO: 37536508 NR Description: putative ring finger protein
  misc_feature (71)..(166): Homolog of NCBI NO: 37536508 NR Description: putative ring finger protein
  misc_feature (10)..(181): Homolog of NCBI NO: 15218042 NR Description: RING zinc finger protein -related [Arabidopsis
  misc_feature (1)..(200): Homolog of NCBI NO: 15227839 NR Description: RING zinc finger protein -related [Arabidopsis
  misc_feature (1)..(200): Homolog of NCBI NO: 15237013 NR Description: RING-H2 finger protein RHA3b [Arabidopsis

SEQ ID NO: 33407 - protein, 175 aa, Arabidopsis thaliana; identical to SEQ ID NO: 21757
  peptide (1)..(175): Ceres Seq. ID no. 13497762
  misc_feature (88)..(129): Pfam Name: Zinc finger, C3HC4 type (RING finger) Pfam Description: Zinc finger, C3HC4 type (RING finger)
  misc_feature (88)..(129): Pfam Name: Zinc finger, C3HC4 type (RING finger) Pfam Description: Zinc finger, C3HC4 type (RING finger)
  misc_feature (88)..(129): Pfam Name: Zinc finger, C3HC4 type (RING finger) Pfam Description: Zinc finger, C3HC4 type (RING finger)
  misc_feature (1)..(157): Homolog of NCBI NO: 15222073 NR Description: RING-H2 finger protein RHA3a -related
  misc_feature (1)..(163): Homolog of NCBI NO: 9293902 NR Description: contains similarity to RING zinc finger
  misc_feature (1)..(142): Homolog of NCBI NO: 21555237 NR Description: putative RING zinc finger protein [Arabidopsis
  misc_feature (1)..(142): Homolog of NCBI NO: 15223041 NR Description: RING zinc finger protein -related [Arabidopsis
  misc_feature (1)..(139): Homolog of NCBI NO: 7489432 NR Description: probable ring finger protein - barley
  misc_feature (1)..(157): Homolog of NCBI NO: 15222073 NR Description: RING-H2 finger protein RHA3a -related
  misc_feature (1)..(142): Homolog of NCBI NO: 21555237 NR Description: putative RING zinc finger protein [Arabidopsis
  misc_feature (1)..(139): Homolog of NCBI NO: 7489432 NR Description: probable ring finger protein - barley
  misc_feature (1)..(142): Homolog of NCBI NO: 15223041 NR Description: RING zinc finger protein -related [Arabidopsis
  misc_feature (1)..(142): Homolog of NCBI NO: 21555237 NR Description: putative RING zinc finger protein [Arabidopsis
  misc_feature (1)..(163): Homolog of NCBI NO: 9293902 NR Description: contains similarity to RING zinc finger
  misc_feature (1)..(157): Homolog of NCBI NO: 15222073 NR Description: RING-H2 finger protein RHA3a -related
  misc_feature (1)..(175): Homolog of NCBI NO: 15237013 NR Description: RING-H2 finger protein RHA3b [Arabidopsis
  misc_feature (1)..(175): Homolog of NCBI NO: 15227839 NR Description: RING zinc finger protein -related [Arabidopsis
  misc_feature (1)..(156): Homolog of NCBI NO: 15218042 NR Description: RING zinc finger protein -related [Arabidopsis
  misc_feature (46)..(141): Homolog of NCBI NO: 37536508 NR Description: putative ring finger protein
  misc_feature (1)..(43): Homolog of NCBI NO: 37536508 NR Description: putative ring finger protein
  misc_feature (1)..(175): Homolog of NCBI NO: 15237013 NR Description: RING-H2 finger protein RHA3b [Arabidopsis
  misc_feature (1)..(175): Homolog of NCBI NO: 15227839 NR Description: RING zinc finger protein -related [Arabidopsis
  misc_feature (1)..(156): Homolog of NCBI NO: 15218042 NR Description: RING zinc finger protein -related [Arabidopsis
  misc_feature (46)..(141): Homolog of NCBI NO: 37536508 NR Description: putative ring finger protein
  misc_feature (1)..(43): Homolog of NCBI NO: 37536508 NR Description: putative ring finger protein
  misc_feature (1)..(139): Homolog of NCBI NO: 7489432 NR Description: probable ring finger protein - barley
  misc_feature (1)..(142): Homolog of NCBI NO: 15223041 NR Description: RING zinc finger protein -related [Arabidopsis
  misc_feature (1)..(163): Homolog of NCBI NO: 9293902 NR Description: contains similarity to RING zinc finger
  misc_feature (1)..(43): Homolog of NCBI NO: 37536508 NR Description: putative ring finger protein
  misc_feature (46)..(141): Homolog of NCBI NO: 37536508 NR Description: putative ring finger protein
  misc_feature (1)..(156): Homolog of NCBI NO: 15218042 NR Description: RING zinc finger protein -related [Arabidopsis
  misc_feature (1)..(175): Homolog of NCBI NO: 15227839 NR Description: RING zinc finger protein -related [Arabidopsis
  misc_feature (1)..(175): Homolog of NCBI NO: 15237013 NR Description: RING-H2 finger protein RHA3b [Arabidopsis

SEQ ID NO: 33408 - DNA, 608 bp, Arabidopsis thaliana; identical to SEQ ID NO: 29818
  misc_feature (1)..(608): Ceres Seq. ID no. 12397109
  misc_feature: MA Experiment ID: 108434 Result: Down-regulated in Transcription
  misc_feature: MA Experiment 108434 PARAMETER Experiment Name: At_Root_Tips_cDNA_P Parameter: Tissue Value: Root Tips
  misc_feature: MA Experiment ID: 108461 Result: Up-regulated in Transcription
  misc_feature: MA Experiment 108461 PARAMETER Experiment Name: At_Germinating_Seeds_cDNA_P Parameter: Age (day) Value: 1 vs. 0
  misc_feature: MA Experiment 108461 PARAMETER Experiment Name: At_Germinating_Seeds_cDNA_P Parameter: Tissue Value: Germinating Seeds
  misc_feature: MA Experiment ID: 108462 Result: Up-regulated in Transcription
  misc_feature: MA Experiment 108462 PARAMETER Experiment Name: At_Germinating_Seeds_cDNA_P Parameter: Age (day) Value: 2 vs. 0
  misc_feature: MA Experiment 108462 PARAMETER Experiment Name: At_Germinating_Seeds_cDNA_P Parameter: Tissue Value: Germinating Seeds
  misc_feature: MA Experiment ID: 108463 Result: Up-regulated in Transcription
  misc_feature: MA Experiment 108463 PARAMETER Experiment Name: At_Germinating_Seeds_cDNA_P Parameter: Age (day) Value: 3 vs. 0
  misc_feature: MA Experiment 108463 PARAMETER Experiment Name: At_Germinating_Seeds_cDNA_P Parameter: Tissue Value: Germinating Seeds
  misc_feature: MA Experiment ID: 108464 Result: Up-regulated in Transcription
  misc_feature: MA Experiment 108464 PARAMETER Experiment Name: At_Germinating_Seeds_cDNA_P Parameter: Age (day) Value: 4 vs. 0
  misc_feature: MA Experiment 108464 PARAMETER Experiment Name: At_Germinating_Seeds_cDNA_P Parameter: Tissue Value: Germinating Seeds
  misc_feature: MA Experiment ID: 108469 Result: Up-regulated in Transcription
  misc_feature: MA Experiment ID: 108488 Result: Down-regulated in Transcription
  misc_feature: MA Experiment ID: 108501 Result: Down-regulated in Transcription
  misc_feature: MA Experiment 108501 PARAMETER Experiment Name: At_ap2_floral_buds_cDNA_P Parameter: Plant Line Value: ap2 (Ler.)
  misc_feature: MA Experiment 108501 PARAMETER Experiment Name: At_ap2_floral_buds_cDNA_P Parameter: Tissue Value: Closed Flower
  misc_feature: MA Experiment ID: 108572 Result: Down-regulated in Transcription
  misc_feature: MA Experiment 108572 PARAMETER Experiment Name: At_Drought_cDNA_P Parameter: Timepoint (hr) Value: 1
  misc_feature: MA Experiment 108572 PARAMETER Experiment Name: At_Drought_cDNA_P Parameter: Tissue Value: Aerial
  misc_feature: MA Experiment 108572 PARAMETER Experiment Name: At_Drought_cDNA_P Parameter: Treatment Value: Drought vs. No Drought
  misc_feature: MA Experiment ID: 108668 Result: Up-regulated in Transcription
  misc_feature: MA Experiment 108668 PARAMETER Experiment Name: At_2mM_SA_cDNA_P Parameter: Plant Line Value: WS
  misc_feature: MA Experiment 108668 PARAMETER Experiment Name: At_2mM_SA_cDNA_P Parameter: Timepoint (hr) Value: 6
  misc_feature: MA Experiment 108668 PARAMETER Experiment Name: At_2mM_SA_cDNA_P Parameter: Treatment Value: 2mM SA vs. No Treatment
  misc_feature: MA Experiment ID: 20000090 Result: Up-regulated in Transcription
  misc_feature: MA Experiment ID: 20000111 Result: Down-regulated in Transcription
  misc_feature: MA Experiment 20000111 PARAMETER Experiment Name: At_42deg_Heat_cDNA_P Parameter: Temperature (deg C) Value: 42 vs. 22
  misc_feature: MA Experiment 20000111 PARAMETER Experiment Name: At_42deg_Heat_cDNA_P Parameter: Timepoint (hr) Value: 6
  misc_feature: MA Experiment 20000111 PARAMETER Experiment Name: At_42deg_Heat_cDNA_P Parameter: Tissue Value: Aerial
  misc_feature: MA Experiment ID: 20000144 Result: Down-regulated in Transcription
  misc_feature: MA Experiment 20000144 PARAMETER Experiment Name: At_42deg_Heat_cDNA_P Parameter: Temperature (deg C) Value: 42 vs. 22
  misc_feature: MA Experiment 20000144 PARAMETER Experiment Name: At_42deg_Heat_cDNA_P Parameter: Timepoint (hr) Value: 1
  misc_feature: MA Experiment 20000144 PARAMETER Experiment Name: At_42deg_Heat_cDNA_P Parameter: Tissue Value: Aerial
  misc_feature: MA Experiment ID: 20000173 Result: Down-regulated in Transcription
  misc_feature: MA Experiment 20000173 PARAMETER Experiment Name: At_42deg_Heat_P Parameter: Age (day) Value: 14
  misc_feature: MA Experiment 20000173 PARAMETER Experiment Name: At_42deg_Heat_P Parameter: Organism Value: A. thaliana
  misc_feature: MA Experiment 20000173 PARAMETER Experiment Name: At_42deg_Heat_P Parameter: Plant Line Value: WS
  misc_feature: MA Experiment 20000173 PARAMETER Experiment Name: At_42deg_Heat_P Parameter: Temperature (deg C) Value: 42 vs. 22
  misc_feature: MA Experiment 20000173 PARAMETER Experiment Name: At_42deg_Heat_P Parameter: Timepoint (hr) Value: 6
  misc_feature: MA Experiment 20000173 PARAMETER Experiment Name: At_42deg_Heat_P Parameter: Tissue Value: Aerial
  misc_feature: MA Experiment ID: 20000182 Result: Up-regulated in Transcription
  misc_feature: MA Experiment 20000182 PARAMETER Experiment Name: At_2mM_SA_P Parameter: Age (day) Value: 14
  misc_feature: MA Experiment 20000182 PARAMETER Experiment Name: At_2mM_SA_P Parameter: Organism Value: A. thaliana
  misc_feature: MA Experiment 20000182 PARAMETER Experiment Name: At_2mM_SA_P Parameter: Plant Line Value: WS
  misc_feature: MA Experiment 20000182 PARAMETER Experiment Name: At_2mM_SA_P Parameter: Timepoint (hr) Value: 6
  misc_feature: MA Experiment 20000182 PARAMETER Experiment Name: At_2mM_SA_P Parameter: Tissue Value: Aerial
  misc_feature: MA Experiment 20000182 PARAMETER Experiment Name: At_2mM_SA_P Parameter: Treatment Value: 2mM SA vs. No Treatment
  misc_feature: MA Experiment ID: 20000185 Result: Up-regulated in Transcription
  misc_feature: MA Experiment 20000185 PARAMETER Experiment Name: At_Roots__P Parameter: Age (day) Value: 7 vs. 21
  misc_feature: MA Experiment 20000185 PARAMETER Experiment Name: At_Roots__P Parameter: Organism Value: A. thaliana
  misc_feature: MA Experiment 20000185 PARAMETER Experiment Name: At_Roots__P Parameter: Tissue Value: Roots vs. Whole Plant
  misc_feature: MA Experiment ID: 20000439 Result: Up-regulated in Transcription
  misc_feature: MA Experiment 20000439 PARAMETER Experiment Name: At_Roots__P Parameter: Age (day) Value: 14 vs. 21
  misc_feature: MA Experiment 20000439 PARAMETER Experiment Name: At_Roots__P Parameter: Organism Value: A. thaliana
  misc_feature: MA Experiment 20000439 PARAMETER Experiment Name: At_Roots__P Parameter: Tissue Value: Roots vs. Whole Plant
  misc_feature: MA Experiment ID: 20001556 Result: Down-regulated in Transcription
  misc_feature: MA Experiment 20001556 PARAMETER Experiment Name: At_Drought_Soil_Dry_P Parameter: Age (day) Value: 26
  misc_feature: MA Experiment 20001556 PARAMETER Experiment Name: At_Drought_Soil_Dry_P Parameter: Organism Value: A. thaliana
  misc_feature: MA Experiment 20001556 PARAMETER Experiment Name: At_Drought_Soil_Dry_P Parameter: Plant Line Value: WS
  misc_feature: MA Experiment 20001556 PARAMETER Experiment Name: At_Drought_Soil_Dry_P Parameter: Post Timepoint (hr) Value: None
  misc_feature: MA Experiment 20001556 PARAMETER Experiment Name: At_Drought_Soil_Dry_P Parameter: Post-Treatment Value: None
  misc_feature: MA Experiment 20001556 PARAMETER Experiment Name: At_Drought_Soil_Dry_P Parameter: Timepoint (day) Value: 12
  misc_feature: MA Experiment 20001556 PARAMETER Experiment Name: At_Drought_Soil_Dry_P Parameter: Treatment Value: Drought vs. No Drought

SEQ ID NO: 33409 - protein, 150 aa, Arabidopsis thaliana; identical to SEQ ID NO: 29819
  peptide (1)..(150): Ceres Seq. ID no. 12397110
  misc_feature (8)..(150): Pfam Name: Protein of unknown function, DUF538 Pfam Description: Protein of unknown function, DUF538
  misc_feature (8)..(150): Homolog of NCBI NO: 34915378 NR Description: hypothetical protein~similar to Oryza sativa
  misc_feature (8)..(146): Homolog of NCBI NO: 34915376 NR Description: hypothetical protein~similar to Oryza sativa
  misc_feature (8)..(146): Homolog of NCBI NO: 34915426 NR Description: hypothetical protein~similar to Arabidopsis
  misc_feature (8)..(146): Homolog of NCBI NO: 34915422 NR Description: hypothetical protein~similar to Arabidopsis
  misc_feature (8)..(146): Homolog of NCBI NO: 34915418 NR Description: hypothetical protein~similar to Arabidopsis
  misc_feature (8)..(146): Homolog of NCBI NO: 33146557 NR Description: unknown protein [Oryza sativa (japonica
  misc_feature (8)..(146): Homolog of NCBI NO: 34915410 NR Description: hypothetical protein~similar to Arabidopsis
  misc_feature (18)..(146): Homolog of NCBI NO: 18391006 NR Description: expressed protein
  misc_feature (8)..(150): Homolog of NCBI NO: 34903866 NR Description: unnamed protein product [Oryza sativa (japonica
  misc_feature (8)..(150): Homolog of NCBI NO: 18422648 NR Description: expressed protein

SEQ ID NO: 33410 - protein, 143 aa, Arabidopsis thaliana; identical to SEQ ID NO: 29820
  peptide (1)..(143): Ceres Seq. ID no. 12397111
  misc_feature (1)..(143): Pfam Name: Protein of unknown function, DUF538 Pfam Description: Protein of unknown function, DUF538
  misc_feature (1)..(143): Homolog of NCBI NO: 34915378 NR Description: hypothetical protein~similar to Oryza sativa
  misc_feature (1)..(139): Homolog of NCBI NO: 34915376 NR Description: hypothetical protein~similar to Oryza sativa
  misc_feature (1)..(139): Homolog of NCBI NO: 34915426 NR Description: hypothetical protein~similar to Arabidopsis
  misc_feature (1)..(139): Homolog of NCBI NO: 34915422 NR Description: hypothetical protein~similar to Arabidopsis
  misc_feature (1)..(139): Homolog of NCBI NO: 34915418 NR Description: hypothetical protein~similar to Arabidopsis
  misc_feature (1)..(139): Homolog of NCBI NO: 33146557 NR Description: unknown protein [Oryza sativa (japonica
  misc_feature (1)..(139): Homolog of NCBI NO: 34915410 NR Description: hypothetical protein~similar to Arabidopsis
  misc_feature (11)..(139): Homolog of NCBI NO: 18391006 NR Description: expressed protein
  misc_feature (1)..(143): Homolog of NCBI NO: 34903866 NR Description: unnamed protein product [Oryza sativa (japonica
  misc_feature (1)..(143): Homolog of NCBI NO: 18422648 NR Description: expressed protein

SEQ ID NO: 33411 - protein, 110 aa, Arabidopsis thaliana; identical to SEQ ID NO: 29821
  peptide (1)..(110): Ceres Seq. ID no. 12397112
  misc_feature (1)..(110): Pfam Name: Protein of unknown function, DUF538 Pfam Description: Protein of unknown function, DUF538
  misc_feature (1)..(110): Homolog of NCBI NO: 34915378 NR Description: hypothetical protein~similar to Oryza sativa
  misc_feature (1)..(106): Homolog of NCBI NO: 34915376 NR Description: hypothetical protein~similar to Oryza sativa
  misc_feature (1)..(106): Homolog of NCBI NO: 34915426 NR Description: hypothetical protein~similar to Arabidopsis
  misc_feature (1)..(106): Homolog of NCBI NO: 34915422 NR Description: hypothetical protein~similar to Arabidopsis
  misc_feature (1)..(106): Homolog of NCBI NO: 34915418 NR Description: hypothetical protein~similar to Arabidopsis
  misc_feature (1)..(106): Homolog of NCBI NO: 33146557 NR Description: unknown protein [Oryza sativa (japonica
  misc_feature (1)..(106): Homolog of NCBI NO: 34915410 NR Description: hypothetical protein~similar to Arabidopsis
  misc_feature (1)..(106): Homolog of NCBI NO: 18391006 NR Description: expressed protein
  misc_feature (1)..(110): Homolog of NCBI NO: 34903866 NR Description: unnamed protein product [Oryza sativa (japonica
  misc_feature (1)..(110): Homolog of NCBI NO: 18422648 NR Description: expressed protein

SEQ ID NO: 33412 - DNA, 971 bp, Arabidopsis thaliana; identical to SEQ ID NO: 29822
  misc_feature (1)..(971): Ceres Seq. ID no. 12372139
  misc_feature: MA Experiment ID: 108434 Result: Up-regulated in Transcription
  misc_feature: MA Experiment 108434 PARAMETER Experiment Name: At_Root_Tips_cDNA_P Parameter: Tissue Value: Root Tips
  misc_feature: MA Experiment ID: 108462 Result: Down-regulated in Transcription
  misc_feature: MA Experiment 108462 PARAMETER Experiment Name: At_Germinating_Seeds_cDNA_P Parameter: Age (day) Value: 2 vs. 0
  misc_feature: MA Experiment 108462 PARAMETER Experiment Name: At_Germinating_Seeds_cDNA_P Parameter: Tissue Value: Germinating Seeds
  misc_feature: MA Experiment ID: 20000113 Result: Up-regulated in Transcription
  misc_feature: MA Experiment 20000113 PARAMETER Experiment Name: At_42deg_Heat_cDNA_P Parameter: Temperature (deg C) Value: 42 vs. 22
  misc_feature: MA Experiment 20000113 PARAMETER Experiment Name: At_42deg_Heat_cDNA_P Parameter: Timepoint (hr) Value: 8
  misc_feature: MA Experiment 20000113 PARAMETER Experiment Name: At_42deg_Heat_cDNA_P Parameter: Tissue Value: Aerial
  misc_feature: MA Experiment ID: 20000573 Result: Down-regulated in Transcription
  misc_feature: MA Experiment 20000573 PARAMETER Experiment Name: At_100uM_ABA_Mutants__P Parameter: Organism Value: A. thaliana
  misc_feature: MA Experiment 20000573 PARAMETER Experiment Name: At_100uM_ABA_Mutants__P Parameter: Plant Line Value: CS22 vs. Ler wt
  misc_feature: MA Experiment 20000573 PARAMETER Experiment Name: At_100uM_ABA_Mutants__P Parameter: Timepoint (hr) Value: N/A
  misc_feature: MA Experiment 20000573 PARAMETER Experiment Name: At_100uM_ABA_Mutants__P Parameter: Tissue Value: Whole Plant
  misc_feature: MA Experiment 20000573 PARAMETER Experiment Name: At_100uM_ABA_Mutants__P Parameter: Treatment Value: None

SEQ ID NO: 33413 - protein, 263 aa, Arabidopsis thaliana; identical to SEQ ID NO: 29823
  peptide (1)..(263): Ceres Seq. ID no. 12372140
  misc_feature (194)..(261): Pfam Name: Mpv17 / PMP22 family Pfam Description: Mpv17 / PMP22 family
  misc_feature (80)..(256): Homolog of NCBI NO: 15233520 NR Description: PEROXISOMAL MEMBRANE PROTEIN PMP22; protein id:
  misc_feature (78)..(258): Homolog of NCBI NO: 16648746 NR Description: AT5g19750/T29J13_170 [Arabidopsis thaliana]
  misc_feature (78)..(258): Homolog of NCBI NO: 15241166 NR Description: putative protein
  misc_feature (78)..(258): Homolog of NCBI NO: 21594286 NR Description: unknown [Arabidopsis thaliana]
  misc_feature (68)..(239): Homolog of NCBI NO: 7485624 NR Description: hypothetical protein F17I5.90 - Arabidopsis
  misc_feature (77)..(260): Homolog of NCBI NO: 15226016 NR Description: 22 kDa peroxisomal membrane protein; protein id:
  misc_feature (68)..(258): Homolog of NCBI NO: 18418319 NR Description: Expressed protein
  misc_feature (9)..(237): Homolog of NCBI NO: 9757841 NR Description: contains similarity to 22 kDa peroxisomal
  misc_feature (9)..(263): Homolog of NCBI NO: 18422298 NR Description: putative protein
  misc_feature (9)..(263): Homolog of NCBI NO: 21553640 NR Description: contains similarity to 22 kDa peroxisomal

SEQ ID NO: 33414 - protein, 255 aa, Arabidopsis thaliana; identical to SEQ ID NO: 29824
  peptide (1)..(255): Ceres Seq. ID no. 12372141
  misc_feature (186)..(253): Pfam Name: Mpv17 / PMP22 family Pfam Description: Mpv17 / PMP22 family
  misc_feature (72)..(248): Homolog of NCBI NO: 15233520 NR Description: PEROXISOMAL MEMBRANE PROTEIN PMP22; protein id:
  misc_feature (70)..(250): Homolog of NCBI NO: 16648746 NR Description: AT5g19750/T29J13_170 [Arabidopsis thaliana]
  misc_feature (70)..(250): Homolog of NCBI NO: 15241166 NR Description: putative protein
  misc_feature (70)..(250): Homolog of NCBI NO: 21594286 NR Description: unknown [Arabidopsis thaliana]
  misc_feature (60)..(231): Homolog of NCBI NO: 7485624 NR Description: hypothetical protein F17I5.90 - Arabidopsis
  misc_feature (69)..(252): Homolog of NCBI NO: 15226016 NR Description: 22 kDa peroxisomal membrane protein; protein id:
  misc_feature (60)..(250): Homolog of NCBI NO: 18418319 NR Description: Expressed protein
  misc_feature (1)..(229): Homolog of NCBI NO: 9757841 NR Description: contains similarity to 22 kDa peroxisomal
  misc_feature (1)..(255): Homolog of NCBI NO: 18422298 NR Description: putative protein
  misc_feature (1)..(255): Homolog of NCBI NO: 21553640 NR Description: contains similarity to 22 kDa peroxisomal

SEQ ID NO: 33415 - protein, 163 aa, Arabidopsis thaliana; identical to SEQ ID NO: 29825
  peptide (1)..(163): Ceres Seq. ID no. 12372142
  misc_feature (94)..(161): Pfam Name: Mpv17 / PMP22 family Pfam Description: Mpv17 / PMP22 family
  misc_feature (1)..(156): Homolog of NCBI NO: 15233520 NR Description: PEROXISOMAL MEMBRANE PROTEIN PMP22; protein id:
  misc_feature (1)..(158): Homolog of NCBI NO: 16648746 NR Description: AT5g19750/T29J13_170 [Arabidopsis thaliana]
  misc_feature (1)..(158): Homolog of NCBI NO: 15241166 NR Description: putative protein
  misc_feature (1)..(158): Homolog of NCBI NO: 21594286 NR Description: unknown [Arabidopsis thaliana]
  misc_feature (1)..(139): Homolog of NCBI NO: 7485624 NR Description: hypothetical protein F17I5.90 - Arabidopsis
  misc_feature (1)..(160): Homolog of NCBI NO: 15226016 NR Description: 22 kDa peroxisomal membrane protein; protein id:
  misc_feature (1)..(158): Homolog of NCBI NO: 18418319 NR Description: Expressed protein
  misc_feature (1)..(137): Homolog of NCBI NO: 9757841 NR Description: contains similarity to 22 kDa peroxisomal
  misc_feature (1)..(163): Homolog of NCBI NO: 18422298 NR Description: putative protein
  misc_feature (1)..(163): Homolog of NCBI NO: 21553640 NR Description: contains similarity to 22 kDa peroxisomal

SEQ ID NO: 33416 - DNA, 1717 bp, Arabidopsis thaliana; identical to SEQ ID NO: 29826
  misc_feature (1)..(1717): Ceres Seq. ID no. 12423026
  misc_feature: MA Experiment ID: 108577 Result: Up-regulated in Transcription
  misc_feature: MA Experiment 108577 PARAMETER Experiment Name: At_42deg_Heat_cDNA_P Parameter: Temperature (deg C) Value: 42 vs. 22
  misc_feature: MA Experiment 108577 PARAMETER Experiment Name: At_42deg_Heat_cDNA_P Parameter: Timepoint (hr) Value: 6
  misc_feature: MA Experiment 108577 PARAMETER Experiment Name: At_42deg_Heat_cDNA_P Parameter: Tissue Value: Aerial
  misc_feature: MA Experiment ID: 20000069 Result: Down-regulated in Transcription
  misc_feature: MA Experiment 20000069 PARAMETER Experiment Name: At_100uM_ABA_Mutants_cDNA_P Parameter: Plant Line Value: CS23
  misc_feature: MA Experiment 20000069 PARAMETER Experiment Name: At_100uM_ABA_Mutants_cDNA_P Parameter: Timepoint (hr) Value: 6
  misc_feature: MA Experiment 20000069 PARAMETER Experiment Name: At_100uM_ABA_Mutants_cDNA_P Parameter: Tissue Value: Aerial
  misc_feature: MA Experiment 20000069 PARAMETER Experiment Name: At_100uM_ABA_Mutants_cDNA_P Parameter: Treatment Value: 100uM ABA vs. No Treatment
  misc_feature: MA Experiment ID: 20000087 Result: Down-regulated in Transcription
  misc_feature: MA Experiment 20000087 PARAMETER Experiment Name: At_100uM_ABA_Mutants_cDNA_P Parameter: Plant Line Value: WS
  misc_feature: MA Experiment 20000087 PARAMETER Experiment Name: At_100uM_ABA_Mutants_cDNA_P Parameter: Timepoint (hr) Value: 6
  misc_feature: MA Experiment 20000087 PARAMETER Experiment Name: At_100uM_ABA_Mutants_cDNA_P Parameter: Tissue Value: Aerial
  misc_feature: MA Experiment 20000087 PARAMETER Experiment Name: At_100uM_ABA_Mutants_cDNA_P Parameter: Treatment Value: 100uM ABA vs. No Treatment
  misc_feature: MA Experiment ID: 20000111 Result: Up-regulated in Transcription
  misc_feature: MA Experiment 20000111 PARAMETER Experiment Name: At_42deg_Heat_cDNA_P Parameter: Temperature (deg C) Value: 42 vs. 22
  misc_feature: MA Experiment 20000111 PARAMETER Experiment Name: At_42deg_Heat_cDNA_P Parameter: Timepoint (hr) Value: 6
  misc_feature: MA Experiment 20000111 PARAMETER Experiment Name: At_42deg_Heat_cDNA_P Parameter: Tissue Value: Aerial
  misc_feature: MA Experiment ID: 20000315 Result: Up-regulated in Transcription
  misc_feature: MA Experiment 20000315 PARAMETER Experiment Name: At_14day_Shoots-Roots_Sub_P Parameter: Age (day) Value: 14
  misc_feature: MA Experiment 20000315 PARAMETER Experiment Name: At_14day_Shoots-Roots_Sub_P Parameter: Organism Value: A. thaliana
  misc_feature: MA Experiment 20000315 PARAMETER Experiment Name: At_14day_Shoots-Roots_Sub_P Parameter: Plant Line Value: WS
  misc_feature: MA Experiment 20000315 PARAMETER Experiment Name: At_14day_Shoots-Roots_Sub_P Parameter: Tissue Value: Shoots vs. Whole Plant
  misc_feature: MA Experiment ID: 20000328 Result: Up-regulated in Transcription
  misc_feature: MA Experiment 20000328 PARAMETER Experiment Name: At_42deg_Heat_Sub_P Parameter: Age (day) Value: 14
  misc_feature: MA Experiment 20000328 PARAMETER Experiment Name: At_42deg_Heat_Sub_P Parameter: Organism Value: A. thaliana
  misc_feature: MA Experiment 20000328 PARAMETER Experiment Name: At_42deg_Heat_Sub_P Parameter: Plant Line Value: WS
  misc_feature: MA Experiment 20000328 PARAMETER Experiment Name: At_42deg_Heat_Sub_P Parameter: Temperature (deg C) Value: 42 vs. 22
  misc_feature: MA Experiment 20000328 PARAMETER Experiment Name: At_42deg_Heat_Sub_P Parameter: Timepoint (hr) Value: 6
  misc_feature: MA Experiment 20000328 PARAMETER Experiment Name: At_42deg_Heat_Sub_P Parameter: Tissue Value: Aerial

SEQ ID NO: 33417 - protein, 449 aa, Arabidopsis thaliana; identical to SEQ ID NO: 27284
  peptide (1)..(449): Ceres Seq. ID no. 12423027
  misc_feature (5)..(227): Pfam Name: Elongation factor Tu GTP binding domain Pfam Description: Elongation factor Tu GTP binding domain
  misc_feature (1)..(449): Homolog of NCBI NO: 15081765 NR Description: At1g07930/T6D22_3 [Arabidopsis thaliana]
  misc_feature (1)..(449): Homolog of NCBI NO: 17064954 NR Description: putative elongation factor 1-a [Arabidopsis
  misc_feature (1)..(449): Homolog of NCBI NO: 18086389 NR Description: At1g07930/T6D22_3 [Arabidopsis thaliana]
  misc_feature (1)..(449): Homolog of NCBI NO: 23397097 NR Description: putative translation elongation factor eEF-1
  misc_feature (1)..(449): Homolog of NCBI NO: 13430510 NR Description: putative translation elongation factor eEF-1
  misc_feature (1)..(449): Homolog of NCBI NO: 13605682 NR Description: At1g07930/T6D22_3 [Arabidopsis thaliana]
  misc_feature (1)..(449): Homolog of NCBI NO: 99688 NR Description: translation elongation factor eEF-1 alpha chain
  misc_feature (1)..(449): Homolog of NCBI NO: 15239308 NR Description: elongation factor 1-alpha (EF-1-alpha)
  misc_feature (1)..(449): Homolog of NCBI NO: 25407012 NR Description: protein T6D22.2 [imported] - Arabidopsis thaliana
  misc_feature (1)..(449): Homolog of NCBI NO: 25407012 NR Description: protein T6D22.2 [imported] - Arabidopsis thaliana

SEQ ID NO: 33418 - protein, 401 aa, Arabidopsis thaliana; identical to SEQ ID NO: 21437
  peptide (1)..(401): Ceres Seq. ID no. 12423028
  misc_feature (1)..(179): Pfam Name: Elongation factor Tu GTP binding domain Pfam Description: Elongation factor Tu GTP binding domain
  misc_feature (1)..(401): Homolog of NCBI NO: 15081765 NR Description: At1g07930/T6D22_3 [Arabidopsis thaliana]
  misc_feature (1)..(401): Homolog of NCBI NO: 17064954 NR Description: putative elongation factor 1-a [Arabidopsis
  misc_feature (1)..(401): Homolog of NCBI NO: 18086389 NR Description: At1g07930/T6D22_3 [Arabidopsis thaliana]
  misc_feature (1)..(401): Homolog of NCBI NO: 23397097 NR Description: putative translation elongation factor eEF-1
  misc_feature (1)..(401): Homolog of NCBI NO: 13430510 NR Description: putative translation elongation factor eEF-1
  misc_feature (1)..(401): Homolog of NCBI NO: 13605682 NR Description: At1g07930/T6D22_3 [Arabidopsis thaliana]
  misc_feature (1)..(401): Homolog of NCBI NO: 99688 NR Description: translation elongation factor eEF-1 alpha chain
  misc_feature (1)..(401): Homolog of NCBI NO: 15239308 NR Description: elongation factor 1-alpha (EF-1-alpha)
  misc_feature (1)..(401): Homolog of NCBI NO: 25407012 NR Description: protein T6D22.2 [imported] - Arabidopsis thaliana
  misc_feature (1)..(401): Homolog of NCBI NO: 25407012 NR Description: protein T6D22.2 [imported] - Arabidopsis thaliana

SEQ ID NO: 33419 - protein, 348 aa, Arabidopsis thaliana; identical to SEQ ID NO: 21438
  peptide (1)..(348): Ceres Seq. ID no. 12423029
  misc_feature (1)..(126): Pfam Name: Elongation factor Tu GTP binding domain Pfam Description: Elongation factor Tu GTP binding domain
  misc_feature (1)..(348): Homolog of NCBI NO: 15081765 NR Description: At1g07930/T6D22_3 [Arabidopsis thaliana]
  misc_feature (1)..(348): Homolog of NCBI NO: 17064954 NR Description: putative elongation factor 1-a [Arabidopsis
  misc_feature (1)..(348): Homolog of NCBI NO: 18086389 NR Description: At1g07930/T6D22_3 [Arabidopsis thaliana]
  misc_feature (1)..(348): Homolog of NCBI NO: 23397097 NR Description: putative translation elongation factor eEF-1
  misc_feature (1)..(348): Homolog of NCBI NO: 13430510 NR Description: putative translation elongation factor eEF-1
  misc_feature (1)..(348): Homolog of NCBI NO: 13605682 NR Description: At1g07930/T6D22_3 [Arabidopsis thaliana]
  misc_feature (1)..(348): Homolog of NCBI NO: 99688 NR Description: translation elongation factor eEF-1 alpha chain
  misc_feature (1)..(348): Homolog of NCBI NO: 15239308 NR Description: elongation factor 1-alpha (EF-1-alpha)
  misc_feature (1)..(348): Homolog of NCBI NO: 25407012 NR Description: protein T6D22.2 [imported] - Arabidopsis thaliana
  misc_feature (1)..(348): Homolog of NCBI NO: 25407012 NR Description: protein T6D22.2 [imported] - Arabidopsis thaliana

SEQ ID NO: 33420 - DNA, 2004 bp, Arabidopsis thaliana; identical to SEQ ID NO: 29830
  misc_feature (1)..(2004): Ceres Seq. ID no. 12558495
  misc_feature: MA Experiment ID: 108488 Result: Up-regulated in Transcription
  misc_feature: MA Experiment ID: 108595 Result: Down-regulated in Transcription
  misc_feature: MA Experiment 108595 PARAMETER Experiment Name: At_Ler-pi_Ovule_cDNA_P Parameter: Plant Line Value: null
  misc_feature: MA Experiment ID: 20000113 Result: Down-regulated in Transcription
  misc_feature: MA Experiment 20000113 PARAMETER Experiment Name: At_42deg_Heat_cDNA_P Parameter: Temperature (deg C) Value: 42 vs. 22
  misc_feature: MA Experiment 20000113 PARAMETER Experiment Name: At_42deg_Heat_cDNA_P Parameter: Timepoint (hr) Value: 8
  misc_feature: MA Experiment 20000113 PARAMETER Experiment Name: At_42deg_Heat_cDNA_P Parameter: Tissue Value: Aerial
  misc_feature: MA Experiment ID: 20000496 Result: Up-regulated in Transcription
  misc_feature: MA Experiment 20000496 PARAMETER Experiment Name: At_Guard_Cells_P Parameter: Harvest Date Value: 7/19/2002
  misc_feature: MA Experiment 20000496 PARAMETER Experiment Name: At_Guard_Cells_P Parameter: Organism Value: Canola
  misc_feature: MA Experiment 20000496 PARAMETER Experiment Name: At_Guard_Cells_P Parameter: Tissue Value: Guard Cells vs. Leaves
  misc_feature: MA Experiment ID: 20001560 Result: Up-regulated in Transcription
  misc_feature: MA Experiment 20001560 PARAMETER Experiment Name: At_Drought_Soil_Dry_P Parameter: Age (day) Value: 28
  misc_feature: MA Experiment 20001560 PARAMETER Experiment Name: At_Drought_Soil_Dry_P Parameter: Organism Value: A. thaliana
  misc_feature: MA Experiment 20001560 PARAMETER Experiment Name: At_Drought_Soil_Dry_P Parameter: Plant Line Value: WS
  misc_feature: MA Experiment 20001560 PARAMETER Experiment Name: At_Drought_Soil_Dry_P Parameter: Post Timepoint (hr) Value: None
  misc_feature: MA Experiment 20001560 PARAMETER Experiment Name: At_Drought_Soil_Dry_P Parameter: Post-Treatment Value: None
  misc_feature: MA Experiment 20001560 PARAMETER Experiment Name: At_Drought_Soil_Dry_P Parameter: Timepoint (day) Value: 14
  misc_feature: MA Experiment 20001560 PARAMETER Experiment Name: At_Drought_Soil_Dry_P Parameter: Treatment Value: Drought vs. No Drought

SEQ ID NO: 33421 - protein, 484 aa, Arabidopsis thaliana; identical to SEQ ID NO: 29831
  peptide (1)..(484): Ceres Seq. ID no. 12558496
  misc_feature (166)..(437): Pfam Name: Protein kinase domain Pfam Description: Protein kinase domain
  misc_feature (110)..(442): Homolog of NCBI NO: 34912364 NR Description: putative receptor-like protein kinase
  misc_feature (21)..(482): Homolog of NCBI NO: 15231637 NR Description: receptor-like protein kinase; protein id:
  misc_feature (3)..(455): Homolog of NCBI NO: 15228043 NR Description: putative protein kinase; protein id: At2g42960.1
  misc_feature (15)..(474): Homolog of NCBI NO: 15217511 NR Description: putative ser/thr protein kinase; protein id:
  misc_feature (22)..(481): Homolog of NCBI NO: 34894708 NR Description: Putative protein kinase [Oryza sativa (japonica
  misc_feature (1)..(475): Homolog of NCBI NO: 25404144 NR Description: probable protein kinase F25P12.84
  misc_feature (1)..(475): Homolog of NCBI NO: 21593085 NR Description: Putative protein kinase [Arabidopsis thaliana]
  misc_feature (1)..(475): Homolog of NCBI NO: 18405946 NR Description: expressed protein
  misc_feature (1)..(473): Homolog of NCBI NO: 22331140 NR Description: serine/threonine protein kinase, putative
  misc_feature (1)..(484): Homolog of NCBI NO: 15238840 NR Description: Ser/Thr specific protein kinase - like protein

SEQ ID NO: 33422 - protein, 324 aa, Arabidopsis thaliana; identical to SEQ ID NO: 29832
  peptide (1)..(324): Ceres Seq. ID no. 12558497
  misc_feature (6)..(277): Pfam Name: Protein kinase domain Pfam Description: Protein kinase domain
  misc_feature (1)..(282): Homolog of NCBI NO: 34912364 NR Description: putative receptor-like protein kinase
  misc_feature (1)..(322): Homolog of NCBI NO: 15231637 NR Description: receptor-like protein kinase; protein id:
  misc_feature (1)..(295): Homolog of NCBI NO: 15228043 NR Description: putative protein kinase; protein id: At2g42960.1
  misc_feature (1)..(314): Homolog of NCBI NO: 15217511 NR Description: putative ser/thr protein kinase; protein id:
  misc_feature (1)..(321): Homolog of NCBI NO: 34894708 NR Description: Putative protein kinase [Oryza sativa (japonica
  misc_feature (1)..(315): Homolog of NCBI NO: 25404144 NR Description: probable protein kinase F25P12.84
  misc_feature (1)..(315): Homolog of NCBI NO: 21593085 NR Description: Putative protein kinase [Arabidopsis thaliana]
  misc_feature (1)..(315): Homolog of NCBI NO: 18405946 NR Description: expressed protein
  misc_feature (1)..(313): Homolog of NCBI NO: 22331140 NR Description: serine/threonine protein kinase, putative
  misc_feature (1)..(324): Homolog of NCBI NO: 15238840 NR Description: Ser/Thr specific protein kinase - like protein

SEQ ID NO: 33423 - protein, 255 aa, Arabidopsis thaliana; identical to SEQ ID NO: 29833
  peptide (1)..(255): Ceres Seq. ID no. 12558498
  misc_feature (1)..(208): Pfam Name: Protein kinase domain Pfam Description: Protein kinase domain
  misc_feature (1)..(213): Homolog of NCBI NO: 34912364 NR Description: putative receptor-like protein kinase
  misc_feature (1)..(253): Homolog of NCBI NO: 15231637 NR Description: receptor-like protein kinase; protein id:
  misc_feature (1)..(226): Homolog of NCBI NO: 15228043 NR Description: putative protein kinase; protein id: At2g42960.1
  misc_feature (1)..(245): Homolog of NCBI NO: 15217511 NR Description: putative ser/thr protein kinase; protein id:
  misc_feature (1)..(252): Homolog of NCBI NO: 34894708 NR Description: Putative protein kinase [Oryza sativa (japonica
  misc_feature (1)..(246): Homolog of NCBI NO: 25404144 NR Description: probable protein kinase F25P12.84
  misc_feature (1)..(246): Homolog of NCBI NO: 21593085 NR Description: Putative protein kinase [Arabidopsis thaliana]
  misc_feature (1)..(246): Homolog of NCBI NO: 18405946 NR Description: expressed protein
  misc_feature (1)..(244): Homolog of NCBI NO: 22331140 NR Description: serine/threonine protein kinase, putative
  misc_feature (1)..(255): Homolog of NCBI NO: 15238840 NR Description: Ser/Thr specific protein kinase - like protein

SEQ ID NO: 33424 - DNA, 1239 bp, Arabidopsis thaliana; identical to SEQ ID NO: 29834
  misc_feature (1)..(1239): Ceres Seq. ID no. 6443802
  misc_feature: MA Experiment ID: 108464 Result: Up-regulated in Transcription
  misc_feature: MA Experiment 108464 PARAMETER Experiment Name: At_Germinating_Seeds_cDNA_P Parameter: Age (day) Value: 4 vs. 0
  misc_feature: MA Experiment 108464 PARAMETER Experiment Name: At_Germinating_Seeds_cDNA_P Parameter: Tissue Value: Germinating Seeds
  misc_feature: MA Experiment ID: 108488 Result: Down-regulated in Transcription
  misc_feature: MA Experiment ID: 108489 Result: Up-regulated in Transcription
  misc_feature: MA Experiment ID: 108561 Result: Up-regulated in Transcription
  misc_feature: MA Experiment 108561 PARAMETER Experiment Name: At_100uM_ABA_cDNA_P Parameter: Timepoint (hr) Value: 6
  misc_feature: MA Experiment 108561 PARAMETER Experiment Name: At_100uM_ABA_cDNA_P Parameter: Tissue Value: Aerial
  misc_feature: MA Experiment 108561 PARAMETER Experiment Name: At_100uM_ABA_cDNA_P Parameter: Treatment Value: 100uM ABA vs. No Treatment
  misc_feature: MA Experiment ID: 108572 Result: Up-regulated in Transcription
  misc_feature: MA Experiment 108572 PARAMETER Experiment Name: At_Drought_cDNA_P Parameter: Timepoint (hr) Value: 1
  misc_feature: MA Experiment 108572 PARAMETER Experiment Name: At_Drought_cDNA_P Parameter: Tissue Value: Aerial
  misc_feature: MA Experiment 108572 PARAMETER Experiment Name: At_Drought_cDNA_P Parameter: Treatment Value: Drought vs. No Drought
  misc_feature: MA Experiment ID: 108573 Result: Up-regulated in Transcription
  misc_feature: MA Experiment 108573 PARAMETER Experiment Name: At_Drought_cDNA_P Parameter: Timepoint (hr) Value: 6
  misc_feature: MA Experiment 108573 PARAMETER Experiment Name: At_Drought_cDNA_P Parameter: Tissue Value: Aerial
  misc_feature: MA Experiment 108573 PARAMETER Experiment Name: At_Drought_cDNA_P Parameter: Treatment Value: Drought vs. No Drought
  misc_feature: MA Experiment ID: 108574 Result: Up-regulated in Transcription
  misc_feature: MA Experiment 108574 PARAMETER Experiment Name: At_Wounding__cDNA_P Parameter: Timepoint (hr) Value: 1
  misc_feature: MA Experiment 108574 PARAMETER Experiment Name: At_Wounding__cDNA_P Parameter: Tissue Value: Aerial
  misc_feature: MA Experiment 108574 PARAMETER Experiment Name: At_Wounding__cDNA_P Parameter: Treatment Value: Wounding vs. No Wounding
  misc_feature: MA Experiment ID: 108585 Result: Up-regulated in Transcription
  misc_feature: MA Experiment 108585 PARAMETER Experiment Name: At_5mM_NaNP_cDNA_P Parameter: Timepoint (hr) Value: 6
  misc_feature: MA Experiment 108585 PARAMETER Experiment Name: At_5mM_NaNP_cDNA_P Parameter: Tissue Value: Aerial
  misc_feature: MA Experiment 108585 PARAMETER Experiment Name: At_5mM_NaNP_cDNA_P Parameter: Treatment Value: null
  misc_feature: MA Experiment ID: 108595 Result: Down-regulated in Transcription
  misc_feature: MA Experiment 108595 PARAMETER Experiment Name: At_Ler-pi_Ovule_cDNA_P Parameter: Plant Line Value: null
  misc_feature: MA Experiment ID: 108605 Result: Up-regulated in Transcription
  misc_feature: MA Experiment 108605 PARAMETER Experiment Name: At_100uM_ABA_cDNA_P Parameter: Timepoint (hr) Value: 6
  misc_feature: MA Experiment 108605 PARAMETER Experiment Name: At_100uM_ABA_cDNA_P Parameter: Tissue Value: Aerial
  misc_feature: MA Experiment 108605 PARAMETER Experiment Name: At_100uM_ABA_cDNA_P Parameter: Treatment Value: 100uM ABA vs. No Treatment
  misc_feature: MA Experiment ID: 108607 Result: Up-regulated in Transcription
  misc_feature: MA Experiment 108607 PARAMETER Experiment Name: At_100uM_ABA_cDNA_P Parameter: Timepoint (hr) Value: 4
  misc_feature: MA Experiment 108607 PARAMETER Experiment Name: At_100uM_ABA_cDNA_P Parameter: Tissue Value: Aerial
  misc_feature: MA Experiment 108607 PARAMETER Experiment Name: At_100uM_ABA_cDNA_P Parameter: Treatment Value: 100uM ABA vs. No Treatment
  misc_feature: MA Experiment ID: 108668 Result: Up-regulated in Transcription
  misc_feature: MA Experiment 108668 PARAMETER Experiment Name: At_2mM_SA_cDNA_P Parameter: Plant Line Value: WS
  misc_feature: MA Experiment 108668 PARAMETER Experiment Name: At_2mM_SA_cDNA_P Parameter: Timepoint (hr) Value: 6
  misc_feature: MA Experiment 108668 PARAMETER Experiment Name: At_2mM_SA_cDNA_P Parameter: Treatment Value: 2mM SA vs. No Treatment
  misc_feature: MA Experiment ID: 20000069 Result: Up-regulated in Transcription
  misc_feature: MA Experiment 20000069 PARAMETER Experiment Name: At_100uM_ABA_Mutants_cDNA_P Parameter: Plant Line Value: CS23
  misc_feature: MA Experiment 20000069 PARAMETER Experiment Name: At_100uM_ABA_Mutants_cDNA_P Parameter: Timepoint (hr) Value: 6
  misc_feature: MA Experiment 20000069 PARAMETER Experiment Name: At_100uM_ABA_Mutants_cDNA_P Parameter: Tissue Value: Aerial
  misc_feature: MA Experiment 20000069 PARAMETER Experiment Name: At_100uM_ABA_Mutants_cDNA_P Parameter: Treatment Value: 100uM ABA vs. No Treatment
  misc_feature: MA Experiment ID: 20000070 Result: Up-regulated in Transcription
  misc_feature: MA Experiment 20000070 PARAMETER Experiment Name: At_100uM_ABA_Mutants_cDNA_P Parameter: Plant Line Value: CS24
  misc_feature: MA Experiment 20000070 PARAMETER Experiment Name: At_100uM_ABA_Mutants_cDNA_P Parameter: Timepoint (hr) Value: 6
  misc_feature: MA Experiment 20000070 PARAMETER Experiment Name: At_100uM_ABA_Mutants_cDNA_P Parameter: Tissue Value: Aerial
  misc_feature: MA Experiment 20000070 PARAMETER Experiment Name: At_100uM_ABA_Mutants_cDNA_P Parameter: Treatment Value: 100uM ABA vs. No Treatment
  misc_feature: MA Experiment ID: 20000071 Result: Up-regulated in Transcription
  misc_feature: MA Experiment 20000071 PARAMETER Experiment Name: At_100uM_ABA_Mutants_cDNA_P Parameter: Plant Line Value: CS8104
  misc_feature: MA Experiment 20000071 PARAMETER Experiment Name: At_100uM_ABA_Mutants_cDNA_P Parameter: Timepoint (hr) Value: 6
  misc_feature: MA Experiment 20000071 PARAMETER Experiment Name: At_100uM_ABA_Mutants_cDNA_P Parameter: Tissue Value: Aerial
  misc_feature: MA Experiment 20000071 PARAMETER Experiment Name: At_100uM_ABA_Mutants_cDNA_P Parameter: Treatment Value: 100uM ABA vs. No Treatment
  misc_feature: MA Experiment ID: 20000072 Result: Up-regulated in Transcription
  misc_feature: MA Experiment 20000072 PARAMETER Experiment Name: At_100uM_ABA_Mutants_cDNA_P Parameter: Plant Line Value: CS8105
  misc_feature: MA Experiment 20000072 PARAMETER Experiment Name: At_100uM_ABA_Mutants_cDNA_P Parameter: Timepoint (hr) Value: 6
  misc_feature: MA Experiment 20000072 PARAMETER Experiment Name: At_100uM_ABA_Mutants_cDNA_P Parameter: Tissue Value: Aerial
  misc_feature: MA Experiment 20000072 PARAMETER Experiment Name: At_100uM_ABA_Mutants_cDNA_P Parameter: Treatment Value: 100uM ABA vs. No Treatment
  misc_feature: MA Experiment ID: 20000087 Result: Up-regulated in Transcription
  misc_feature: MA Experiment 20000087 PARAMETER Experiment Name: At_100uM_ABA_Mutants_cDNA_P Parameter: Plant Line Value: WS
  misc_feature: MA Experiment 20000087 PARAMETER Experiment Name: At_100uM_ABA_Mutants_cDNA_P Parameter: Timepoint (hr) Value: 6
  misc_feature: MA Experiment 20000087 PARAMETER Experiment Name: At_100uM_ABA_Mutants_cDNA_P Parameter: Tissue Value: Aerial
  misc_feature: MA Experiment 20000087 PARAMETER Experiment Name: At_100uM_ABA_Mutants_cDNA_P Parameter: Treatment Value: 100uM ABA vs. No Treatment
  misc_feature: MA Experiment ID: 20000088 Result: Up-regulated in Transcription
  misc_feature: MA Experiment 20000088 PARAMETER Experiment Name: At_100uM_ABA_Mutants_cDNA_P Parameter: Plant Line Value: Landsberg
  misc_feature: MA Experiment 20000088 PARAMETER Experiment Name: At_100uM_ABA_Mutants_cDNA_P Parameter: Timepoint (hr) Value: 6
  misc_feature: MA Experiment 20000088 PARAMETER Experiment Name: At_100uM_ABA_Mutants_cDNA_P Parameter: Tissue Value: Aerial
  misc_feature: MA Experiment 20000088 PARAMETER Experiment Name: At_100uM_ABA_Mutants_cDNA_P Parameter: Treatment Value: 100uM ABA vs. No Treatment
  misc_feature: MA Experiment ID: 20000117 Result: Up-regulated in Transcription
  misc_feature: MA Experiment 20000117 PARAMETER Experiment Name: At_100uM_ABA_Mutants_cDNA_P Parameter: Plant Line Value: Columbia
  misc_feature: MA Experiment 20000117 PARAMETER Experiment Name: At_100uM_ABA_Mutants_cDNA_P Parameter: Timepoint (hr) Value: 6
  misc_feature: MA Experiment 20000117 PARAMETER Experiment Name: At_100uM_ABA_Mutants_cDNA_P Parameter: Tissue Value: Aerial
  misc_feature: MA Experiment 20000117 PARAMETER Experiment Name: At_100uM_ABA_Mutants_cDNA_P Parameter: Treatment Value: 100uM ABA vs. No Treatment
  misc_feature: MA Experiment ID: 20000166 Result: Up-regulated in Transcription
  misc_feature: MA Experiment 20000166 PARAMETER Experiment Name: At_100uM_ABA_P Parameter: Age (day) Value: 14
  misc_feature: MA Experiment 20000166 PARAMETER Experiment Name: At_100uM_ABA_P Parameter: Organism Value: A. thaliana
  misc_feature: MA Experiment 20000166 PARAMETER Experiment Name: At_100uM_ABA_P Parameter: Plant Line Value: WS
  misc_feature: MA Experiment 20000166 PARAMETER Experiment Name: At_100uM_ABA_P Parameter: Timepoint (hr) Value: 1
  misc_feature: MA Experiment 20000166 PARAMETER Experiment Name: At_100uM_ABA_P Parameter: Tissue Value: Aerial
  misc_feature: MA Experiment 20000166 PARAMETER Experiment Name: At_100uM_ABA_P Parameter: Treatment Value: 100uM ABA vs. No Treatment
  misc_feature: MA Experiment ID: 20000169 Result: Up-regulated in Transcription
  misc_feature: MA Experiment 20000169 PARAMETER Experiment Name: At_100uM_ABA_P Parameter: Age (day) Value: 14
  misc_feature: MA Experiment 20000169 PARAMETER Experiment Name: At_100uM_ABA_P Parameter: Organism Value: A. thaliana
  misc_feature: MA Experiment 20000169 PARAMETER Experiment Name: At_100uM_ABA_P Parameter: Plant Line Value: WS
  misc_feature: MA Experiment 20000169 PARAMETER Experiment Name: At_100uM_ABA_P Parameter: Timepoint (hr) Value: 6
  misc_feature: MA Experiment 20000169 PARAMETER Experiment Name: At_100uM_ABA_P Parameter: Tissue Value: Aerial
  misc_feature: MA Experiment 20000169 PARAMETER Experiment Name: At_100uM_ABA_P Parameter: Treatment Value: 100uM ABA vs. No Treatment
  misc_feature: MA Experiment ID: 20000182 Result: Up-regulated in Transcription
  misc_feature: MA Experiment 20000182 PARAMETER Experiment Name: At_2mM_SA_P Parameter: Age (day) Value: 14
  misc_feature: MA Experiment 20000182 PARAMETER Experiment Name: At_2mM_SA_P Parameter: Organism Value: A. thaliana
  misc_feature: MA Experiment 20000182 PARAMETER Experiment Name: At_2mM_SA_P Parameter: Plant Line Value: WS
  misc_feature: MA Experiment 20000182 PARAMETER Experiment Name: At_2mM_SA_P Parameter: Timepoint (hr) Value: 6
  misc_feature: MA Experiment 20000182 PARAMETER Experiment Name: At_2mM_SA_P Parameter: Tissue Value: Aerial
  misc_feature: MA Experiment 20000182 PARAMETER Experiment Name: At_2mM_SA_P Parameter: Treatment Value: 2mM SA vs. No Treatment
  misc_feature: MA Experiment ID: 20000184 Result: Down-regulated in Transcription
  misc_feature: MA Experiment 20000184 PARAMETER Experiment Name: At_Shoots__P Parameter: Age (day) Value: 7
  misc_feature: MA Experiment 20000184 PARAMETER Experiment Name: At_Shoots__P Parameter: Tissue Value: Shoots vs. Whole Plant
  misc_feature: MA Experiment ID: 20000213 Result: Up-regulated in Transcription
  misc_feature: MA Experiment 20000213 PARAMETER Experiment Name: At_4deg_Cold_P Parameter: Timepoint (hr) Value: 2
  misc_feature: MA Experiment ID: 20000224 Result: Up-regulated in Transcription
  misc_feature: MA Experiment ID: 20000234 Result: Down-regulated in Transcription
  misc_feature: MA Experiment 20000234 PARAMETER Experiment Name: At_Siliques_P Parameter: Age (day) Value: 21
  misc_feature: MA Experiment 20000234 PARAMETER Experiment Name: At_Siliques_P Parameter: Organism Value: A. thaliana
  misc_feature: MA Experiment 20000234 PARAMETER Experiment Name: At_Siliques_P Parameter: Plant Line Value: WS
  misc_feature: MA Experiment 20000234 PARAMETER Experiment Name: At_Siliques_P Parameter: Tissue Value: Less Than 5mm Siliques vs. Whole Plant
  misc_feature: MA Experiment ID: 20000235 Result: Down-regulated in Transcription
  misc_feature: MA Experiment 20000235 PARAMETER Experiment Name: At_Siliques_P Parameter: Age (day) Value: 21
  misc_feature: MA Experiment 20000235 PARAMETER Experiment Name: At_Siliques_P Parameter: Organism Value: A. thaliana
  misc_feature: MA Experiment 20000235 PARAMETER Experiment Name: At_Siliques_P Parameter: Plant Line Value: WS
  misc_feature: MA Experiment 20000235 PARAMETER Experiment Name: At_Siliques_P Parameter: Tissue Value: 5-10mm Siliques vs. Whole Plant
  misc_feature: MA Experiment ID: 20000286 Result: Down-regulated in Transcription
  misc_feature: MA Experiment 20000286 PARAMETER Experiment Name: At_Open_Flower_P Parameter: Age (day) Value: 21
  misc_feature: MA Experiment 20000286 PARAMETER Experiment Name: At_Open_Flower_P Parameter: Plant Line Value: WS
  misc_feature: MA Experiment 20000286 PARAMETER Experiment Name: At_Open_Flower_P Parameter: Tissue Value: Half Open vs. Whole Plant
  misc_feature: MA Experiment ID: 20000437 Result: Up-regulated in Transcription
  misc_feature: MA Experiment 20000437 PARAMETER Experiment Name: At_Drought_P Parameter: Age (day) Value: 8
  misc_feature: MA Experiment 20000437 PARAMETER Experiment Name: At_Drought_P Parameter: Organism Value: A. thaliana
  misc_feature: MA Experiment 20000437 PARAMETER Experiment Name: At_Drought_P Parameter: Plant Line Value: WS
  misc_feature: MA Experiment 20000437 PARAMETER Experiment Name: At_Drought_P Parameter: Timepoint (hr) Value: 24
  misc_feature: MA Experiment 20000437 PARAMETER Experiment Name: At_Drought_P Parameter: Tissue Value: Whole Plant
  misc_feature: MA Experiment 20000437 PARAMETER Experiment Name: At_Drought_P Parameter: Treatment Value: Drought vs. No Drought
  misc_feature: MA Experiment ID: 20000495 Result: Down-regulated in Transcription
  misc_feature: MA Experiment 20000495 PARAMETER Experiment Name: At_Guard_Cells_P Parameter: Harvest Date Value: 8/2/2002
  misc_feature: MA Experiment 20000495 PARAMETER Experiment Name: At_Guard_Cells_P Parameter: Organism Value: A. thaliana
  misc_feature: MA Experiment 20000495 PARAMETER Experiment Name: At_Guard_Cells_P Parameter: Tissue Value: Guard Cells vs. Leaves
  misc_feature: MA Experiment ID: 20001247 Result: Up-regulated in Transcription
  misc_feature: MA Experiment 20001247 PARAMETER Experiment Name: At_Far-red-induction_P Parameter: Age (day) Value: 7
  misc_feature: MA Experiment 20001247 PARAMETER Experiment Name: At_Far-red-induction_P Parameter: Light Value: Far-red vs. White
  misc_feature: MA Experiment 20001247 PARAMETER Experiment Name: At_Far-red-induction_P Parameter: Organism Value: A. thaliana
  misc_feature: MA Experiment 20001247 PARAMETER Experiment Name: At_Far-red-induction_P Parameter: Plant Line Value: Columbia
  misc_feature: MA Experiment 20001247 PARAMETER Experiment Name: At_Far-red-induction_P Parameter: Timepoint (hr) Value: 1
  misc_feature: MA Experiment 20001247 PARAMETER Experiment Name: At_Far-red-induction_P Parameter: Tissue Value: Whole Plant
  misc_feature: MA Experiment ID: 20001560 Result: Down-regulated in Transcription
  misc_feature: MA Experiment 20001560 PARAMETER Experiment Name: At_Drought_Soil_Dry_P Parameter: Age (day) Value: 28
  misc_feature: MA Experiment 20001560 PARAMETER Experiment Name: At_Drought_Soil_Dry_P Parameter: Organism Value: A. thaliana
  misc_feature: MA Experiment 20001560 PARAMETER Experiment Name: At_Drought_Soil_Dry_P Parameter: Plant Line Value: WS
  misc_feature: MA Experiment 20001560 PARAMETER Experiment Name: At_Drought_Soil_Dry_P Parameter: Post Timepoint (hr) Value: None
  misc_feature: MA Experiment 20001560 PARAMETER Experiment Name: At_Drought_Soil_Dry_P Parameter: Post-Treatment Value: None
  misc_feature: MA Experiment 20001560 PARAMETER Experiment Name: At_Drought_Soil_Dry_P Parameter: Timepoint (day) Value: 14
  misc_feature: MA Experiment 20001560 PARAMETER Experiment Name: At_Drought_Soil_Dry_P Parameter: Treatment Value: Drought vs. No Drought
  misc_feature: MA Experiment ID: 20001904 Result: Up-regulated in Transcription
  misc_feature: MA Experiment 20001904 PARAMETER Experiment Name: At_Drought_Reproduction_P Parameter: Age (day) Value: 37
  misc_feature: MA Experiment 20001904 PARAMETER Experiment Name: At_Drought_Reproduction_P Parameter: Organism Value: A. thaliana
  misc_feature: MA Experiment 20001904 PARAMETER Experiment Name: At_Drought_Reproduction_P Parameter: Plant Line Value: WS
  misc_feature: MA Experiment 20001904 PARAMETER Experiment Name: At_Drought_Reproduction_P Parameter: Timepoint (day) Value: 7
  misc_feature: MA Experiment 20001904 PARAMETER Experiment Name: At_Drought_Reproduction_P Parameter: Tissue Value: Rosettes
  misc_feature: MA Experiment 20001904 PARAMETER Experiment Name: At_Drought_Reproduction_P Parameter: Treatment Value: Drought vs. No Drought
  misc_feature: MA Experiment ID: 20001905 Result: Up-regulated in Transcription
  misc_feature: MA Experiment 20001905 PARAMETER Experiment Name: At_Drought_Reproduction_P Parameter: Age (day) Value: 40
  misc_feature: MA Experiment 20001905 PARAMETER Experiment Name: At_Drought_Reproduction_P Parameter: Organism Value: A. thaliana
  misc_feature: MA Experiment 20001905 PARAMETER Experiment Name: At_Drought_Reproduction_P Parameter: Plant Line Value: WS
  misc_feature: MA Experiment 20001905 PARAMETER Experiment Name: At_Drought_Reproduction_P Parameter: Timepoint (day) Value: 10
  misc_feature: MA Experiment 20001905 PARAMETER Experiment Name: At_Drought_Reproduction_P Parameter: Tissue Value: Rosettes
  misc_feature: MA Experiment 20001905 PARAMETER Experiment Name: At_Drought_Reproduction_P Parameter: Treatment Value: Drought vs. No Drought

SEQ ID NO: 33425 - protein, 278 aa, Arabidopsis thaliana; identical to SEQ ID NO: 29835
  peptide (1)..(278): Ceres Seq. ID no. 6443803
  misc_feature (58)..(278): Pfam Name: TCP family transcription factor Pfam Description: TCP family transcription factor
  misc_feature (70)..(187): Homolog of NCBI NO: 20975255 NR Description: transcription factor PCF6 [Oryza sativa (japonica
  misc_feature (64)..(135): Homolog of NCBI NO: 25369264 NR Description: probable basic helix-loop-helix DNA binding
  misc_feature (50)..(135): Homolog of NCBI NO: 18415079 NR Description: teosinte branched1 - like protein
  misc_feature (50)..(135): Homolog of NCBI NO: 7486304 NR Description: hypothetical protein F28J12.50 - Arabidopsis
  misc_feature (56)..(150): Homolog of NCBI NO: 18397402 NR Description: expressed protein
  misc_feature (43)..(271): Homolog of NCBI NO: 15241512 NR Description: putative helix-loop-helix DNA binding protein
  misc_feature (43)..(148): Homolog of NCBI NO: 34909780 NR Description: P0512C01.32 [Oryza sativa (japonica
  misc_feature (16)..(185): Homolog of NCBI NO: 15239489 NR Description: DNA binding protein - like; protein id:
  misc_feature (1)..(278): Homolog of NCBI NO: 18396089 NR Description: expressed protein
  misc_feature (1)..(278): Homolog of NCBI NO: 30678498 NR Description: TCP family transcription factor TFPD [Arabidopsis

SEQ ID NO: 33426 - protein, 221 aa, Arabidopsis thaliana; identical to SEQ ID NO: 29836
  peptide (1)..(221): Ceres Seq. ID no. 6443804
  misc_feature (1)..(221): Pfam Name: TCP family transcription factor Pfam Description: TCP family transcription factor
  misc_feature (13)..(130): Homolog of NCBI NO: 20975255 NR Description: transcription factor PCF6 [Oryza sativa (japonica
  misc_feature (7)..(78): Homolog of NCBI NO: 25369264 NR Description: probable basic helix-loop-helix DNA binding
  misc_feature (1)..(78): Homolog of NCBI NO: 18415079 NR Description: teosinte branched1 - like protein
  misc_feature (1)..(78): Homolog of NCBI NO: 7486304 NR Description: hypothetical protein F28J12.50 - Arabidopsis
  misc_feature (1)..(93): Homolog of NCBI NO: 18397402 NR Description: expressed protein
  misc_feature (1)..(214): Homolog of NCBI NO: 15241512 NR Description: putative helix-loop-helix DNA binding protein
  misc_feature (1)..(91): Homolog of NCBI NO: 34909780 NR Description: P0512C01.32 [Oryza sativa (japonica
  misc_feature (1)..(128): Homolog of NCBI NO: 15239489 NR Description: DNA binding protein - like; protein id:
  misc_feature (1)..(221): Homolog of NCBI NO: 18396089 NR Description: expressed protein
  misc_feature (1)..(221): Homolog of NCBI NO: 30678498 NR Description: TCP family transcription factor TFPD [Arabidopsis

SEQ ID NO: 33427 - DNA, 1580 bp, Arabidopsis thaliana; identical to SEQ ID NO: 29837
  misc_feature (1)..(1580): Ceres Seq. ID no. 12385358
  misc_feature: MA Experiment ID: 108435 Result: Up-regulated in Transcription
  misc_feature: MA Experiment 108435 PARAMETER Experiment Name: At_stm_Mutants_cDNA_P Parameter: Plant Line Value: wt Landsburg vs stm
  misc_feature: MA Experiment 108435 PARAMETER Experiment Name: At_stm_Mutants_cDNA_P Parameter: Tissue Value: Shoot Apical Meristem Region
  misc_feature: MA Experiment ID: 108461 Result: Up-regulated in Transcription
  misc_feature: MA Experiment 108461 PARAMETER Experiment Name: At_Germinating_Seeds_cDNA_P Parameter: Age (day) Value: 1 vs. 0
  misc_feature: MA Experiment 108461 PARAMETER Experiment Name: At_Germinating_Seeds_cDNA_P Parameter: Tissue Value: Germinating Seeds
  misc_feature: MA Experiment ID: 108462 Result: Up-regulated in Transcription
  misc_feature: MA Experiment 108462 PARAMETER Experiment Name: At_Germinating_Seeds_cDNA_P Parameter: Age (day) Value: 2 vs. 0
  misc_feature: MA Experiment 108462 PARAMETER Experiment Name: At_Germinating_Seeds_cDNA_P Parameter: Tissue Value: Germinating Seeds
  misc_feature: MA Experiment ID: 108463 Result: Up-regulated in Transcription
  misc_feature: MA Experiment 108463 PARAMETER Experiment Name: At_Germinating_Seeds_cDNA_P Parameter: Age (day) Value: 3 vs. 0
  misc_feature: MA Experiment 108463 PARAMETER Experiment Name: At_Germinating_Seeds_cDNA_P Parameter: Tissue Value: Germinating Seeds
  misc_feature: MA Experiment ID: 108464 Result: Up-regulated in Transcription
  misc_feature: MA Experiment 108464 PARAMETER Experiment Name: At_Germinating_Seeds_cDNA_P Parameter: Age (day) Value: 4 vs. 0
  misc_feature: MA Experiment 108464 PARAMETER Experiment Name: At_Germinating_Seeds_cDNA_P Parameter: Tissue Value: Germinating Seeds
  misc_feature: MA Experiment ID: 108501 Result: Up-regulated in Transcription
  misc_feature: MA Experiment 108501 PARAMETER Experiment Name: At_ap2_floral_buds_cDNA_P Parameter: Plant Line Value: ap2 (Ler.)
  misc_feature: MA Experiment 108501 PARAMETER Experiment Name: At_ap2_floral_buds_cDNA_P Parameter: Tissue Value: Closed Flower
  misc_feature: MA Experiment ID: 108594 Result: Down-regulated in Transcription
  misc_feature: MA Experiment 108594 PARAMETER Experiment Name: At_Ler-rhl_Root_cDNA_P Parameter: Plant Line Value: null
  misc_feature: MA Experiment ID: 108595 Result: Up-regulated in Transcription
  misc_feature: MA Experiment 108595 PARAMETER Experiment Name: At_Ler-pi_Ovule_cDNA_P Parameter: Plant Line Value: null
  misc_feature: MA Experiment ID: 108668 Result: Down-regulated in Transcription
  misc_feature: MA Experiment 108668 PARAMETER Experiment Name: At_2mM_SA_cDNA_P Parameter: Plant Line Value: WS
  misc_feature: MA Experiment 108668 PARAMETER Experiment Name: At_2mM_SA_cDNA_P Parameter: Timepoint (hr) Value: 6
  misc_feature: MA Experiment 108668 PARAMETER Experiment Name: At_2mM_SA_cDNA_P Parameter: Treatment Value: 2mM SA vs. No Treatment
  misc_feature: MA Experiment ID: 20000069 Result: Down-regulated in Transcription
  misc_feature: MA Experiment 20000069 PARAMETER Experiment Name: At_100uM_ABA_Mutants_cDNA_P Parameter: Plant Line Value: CS23
  misc_feature: MA Experiment 20000069 PARAMETER Experiment Name: At_100uM_ABA_Mutants_cDNA_P Parameter: Timepoint (hr) Value: 6
  misc_feature: MA Experiment 20000069 PARAMETER Experiment Name: At_100uM_ABA_Mutants_cDNA_P Parameter: Tissue Value: Aerial
  misc_feature: MA Experiment 20000069 PARAMETER Experiment Name: At_100uM_ABA_Mutants_cDNA_P Parameter: Treatment Value: 100uM ABA vs. No Treatment
  misc_feature: MA Experiment ID: 20000093 Result: Down-regulated in Transcription
  misc_feature: MA Experiment 20000093 PARAMETER Experiment Name: At_42deg_Heat_cDNA_P Parameter: Temperature (deg C) Value: 42 vs. 22
  misc_feature: MA Experiment 20000093 PARAMETER Experiment Name: At_42deg_Heat_cDNA_P Parameter: Timepoint (hr) Value: 0.5
  misc_feature: MA Experiment 20000093 PARAMETER Experiment Name: At_42deg_Heat_cDNA_P Parameter: Tissue Value: Aerial
  misc_feature: MA Experiment ID: 20000113 Result: Down-regulated in Transcription
  misc_feature: MA Experiment 20000113 PARAMETER Experiment Name: At_42deg_Heat_cDNA_P Parameter: Temperature (deg C) Value: 42 vs. 22
  misc_feature: MA Experiment 20000113 PARAMETER Experiment Name: At_42deg_Heat_cDNA_P Parameter: Timepoint (hr) Value: 8
  misc_feature: MA Experiment 20000113 PARAMETER Experiment Name: At_42deg_Heat_cDNA_P Parameter: Tissue Value: Aerial
  misc_feature: MA Experiment ID: 20000144 Result: Down-regulated in Transcription
  misc_feature: MA Experiment 20000144 PARAMETER Experiment Name: At_42deg_Heat_cDNA_P Parameter: Temperature (deg C) Value: 42 vs. 22
  misc_feature: MA Experiment 20000144 PARAMETER Experiment Name: At_42deg_Heat_cDNA_P Parameter: Timepoint (hr) Value: 1
  misc_feature: MA Experiment 20000144 PARAMETER Experiment Name: At_42deg_Heat_cDNA_P Parameter: Tissue Value: Aerial
  misc_feature: MA Experiment ID: 20000180 Result: Up-regulated in Transcription
  misc_feature: MA Experiment 20000180 PARAMETER Experiment Name: At_Germinating_Seeds_P Parameter: Age (hr) Value: 24 vs. 0
  misc_feature: MA Experiment 20000180 PARAMETER Experiment Name: At_Germinating_Seeds_P Parameter: Tissue Value: Germinating Seeds
  misc_feature: MA Experiment ID: 20000227 Result: Down-regulated in Transcription
  misc_feature: MA Experiment 20000227 PARAMETER Experiment Name: At_Root-Tips-vs-Tops_P Parameter: Tissue Value: Root Tips vs. Root Tops
  misc_feature: MA Experiment ID: 20000234 Result: Up-regulated in Transcription
  misc_feature: MA Experiment 20000234 PARAMETER Experiment Name: At_Siliques_P Parameter: Age (day) Value: 21
  misc_feature: MA Experiment 20000234 PARAMETER Experiment Name: At_Siliques_P Parameter: Organism Value: A. thaliana
  misc_feature: MA Experiment 20000234 PARAMETER Experiment Name: At_Siliques_P Parameter: Plant Line Value: WS
  misc_feature: MA Experiment 20000234 PARAMETER Experiment Name: At_Siliques_P Parameter: Tissue Value: Less Than 5mm Siliques vs. Whole Plant
  misc_feature: MA Experiment ID: 20000235 Result: Up-regulated in Transcription
  misc_feature: MA Experiment 20000235 PARAMETER Experiment Name: At_Siliques_P Parameter: Age (day) Value: 21
  misc_feature: MA Experiment 20000235 PARAMETER Experiment Name: At_Siliques_P Parameter: Organism Value: A. thaliana
  misc_feature: MA Experiment 20000235 PARAMETER Experiment Name: At_Siliques_P Parameter: Plant Line Value: WS
  misc_feature: MA Experiment 20000235 PARAMETER Experiment Name: At_Siliques_P Parameter: Tissue Value: 5-10mm Siliques vs. Whole Plant
  misc_feature: MA Experiment ID: 20000264 Result: Up-regulated in Transcription
  misc_feature: MA Experiment 20000264 PARAMETER Experiment Name: At_Open_Flower_P Parameter: Age (day) Value: 21
  misc_feature: MA Experiment 20000264 PARAMETER Experiment Name: At_Open_Flower_P Parameter: Plant Line Value: WS
  misc_feature: MA Experiment 20000264 PARAMETER Experiment Name: At_Open_Flower_P Parameter: Tissue Value: Open Flower vs. Whole Plant
  misc_feature: MA Experiment ID: 20000265 Result: Up-regulated in Transcription
  misc_feature: MA Experiment 20000265 PARAMETER Experiment Name: At_Open_Flower_P Parameter: Age (day) Value: 21
  misc_feature: MA Experiment 20000265 PARAMETER Experiment Name: At_Open_Flower_P Parameter: Plant Line Value: WS
  misc_feature: MA Experiment 20000265 PARAMETER Experiment Name: At_Open_Flower_P Parameter: Tissue Value: Closed Flower vs. Whole Plant
  misc_feature: MA Experiment ID: 20000286 Result: Up-regulated in Transcription
  misc_feature: MA Experiment 20000286 PARAMETER Experiment Name: At_Open_Flower_P Parameter: Age (day) Value: 21
  misc_feature: MA Experiment 20000286 PARAMETER Experiment Name: At_Open_Flower_P Parameter: Plant Line Value: WS
  misc_feature: MA Experiment 20000286 PARAMETER Experiment Name: At_Open_Flower_P Parameter: Tissue Value: Half Open vs. Whole Plant
  misc_feature: MA Experiment ID: 20000495 Result: Up-regulated in Transcription
  misc_feature: MA Experiment 20000495 PARAMETER Experiment Name: At_Guard_Cells_P Parameter: Harvest Date Value: 8/2/2002
  misc_feature: MA Experiment 20000495 PARAMETER Experiment Name: At_Guard_Cells_P Parameter: Organism Value: A. thaliana
  misc_feature: MA Experiment 20000495 PARAMETER Experiment Name: At_Guard_Cells_P Parameter: Tissue Value: Guard Cells vs. Leaves
  misc_feature: MA Experiment ID: 20000794 Result: Down-regulated in Transcription
  misc_feature: MA Experiment 20000794 PARAMETER Experiment Name: At_Petals_P Parameter: Age (day) Value: 23-25 days
  misc_feature: MA Experiment 20000794 PARAMETER Experiment Name: At_Petals_P Parameter: Plant Line Value: WS
  misc_feature: MA Experiment 20000794 PARAMETER Experiment Name: At_Petals_P Parameter: Tissue Value: Petals vs. Whole plant
  misc_feature: MA Experiment ID: 20001451 Result: Down-regulated in Transcription
  misc_feature: MA Experiment 20001451 PARAMETER Experiment Name: At_Far-red-induction_P Parameter: Age (day) Value: 7
  misc_feature: MA Experiment 20001451 PARAMETER Experiment Name: At_Far-red-induction_P Parameter: Light Value: Far-red vs. White
  misc_feature: MA Experiment 20001451 PARAMETER Experiment Name: At_Far-red-induction_P Parameter: Organism Value: A. thaliana
  misc_feature: MA Experiment 20001451 PARAMETER Experiment Name: At_Far-red-induction_P Parameter: Plant Line Value: Columbia
  misc_feature: MA Experiment 20001451 PARAMETER Experiment Name: At_Far-red-induction_P Parameter: Timepoint (hr) Value: 24
  misc_feature: MA Experiment 20001451 PARAMETER Experiment Name: At_Far-red-induction_P Parameter: Tissue Value: Whole Plant
  misc_feature: MA Experiment ID: 20001555 Result: Down-regulated in Transcription
  misc_feature: MA Experiment 20001555 PARAMETER Experiment Name: At_Drought_Soil_Dry_P Parameter: Age (day) Value: 24
  misc_feature: MA Experiment 20001555 PARAMETER Experiment Name: At_Drought_Soil_Dry_P Parameter: Organism Value: A. thaliana
  misc_feature: MA Experiment 20001555 PARAMETER Experiment Name: At_Drought_Soil_Dry_P Parameter: Plant Line Value: WS
  misc_feature: MA Experiment 20001555 PARAMETER Experiment Name: At_Drought_Soil_Dry_P Parameter: Post Timepoint (hr) Value: None
  misc_feature: MA Experiment 20001555 PARAMETER Experiment Name: At_Drought_Soil_Dry_P Parameter: Post-Treatment Value: None
  misc_feature: MA Experiment 20001555 PARAMETER Experiment Name: At_Drought_Soil_Dry_P Parameter: Timepoint (day) Value: 10
  misc_feature: MA Experiment 20001555 PARAMETER Experiment Name: At_Drought_Soil_Dry_P Parameter: Treatment Value: Drought vs. No Drought
  misc_feature: MA Experiment ID: 20001556 Result: Down-regulated in Transcription
  misc_feature: MA Experiment 20001556 PARAMETER Experiment Name: At_Drought_Soil_Dry_P Parameter: Age (day) Value: 26
  misc_feature: MA Experiment 20001556 PARAMETER Experiment Name: At_Drought_Soil_Dry_P Parameter: Organism Value: A. thaliana
  misc_feature: MA Experiment 20001556 PARAMETER Experiment Name: At_Drought_Soil_Dry_P Parameter: Plant Line Value: WS
  misc_feature: MA Experiment 20001556 PARAMETER Experiment Name: At_Drought_Soil_Dry_P Parameter: Post Timepoint (hr) Value: None
  misc_feature: MA Experiment 20001556 PARAMETER Experiment Name: At_Drought_Soil_Dry_P Parameter: Post-Treatment Value: None
  misc_feature: MA Experiment 20001556 PARAMETER Experiment Name: At_Drought_Soil_Dry_P Parameter: Timepoint (day) Value: 12
  misc_feature: MA Experiment 20001556 PARAMETER Experiment Name: At_Drought_Soil_Dry_P Parameter: Treatment Value: Drought vs. No Drought
  misc_feature: MA Experiment ID: 20001560 Result: Up-regulated in Transcription
  misc_feature: MA Experiment 20001560 PARAMETER Experiment Name: At_Drought_Soil_Dry_P Parameter: Age (day) Value: 28
  misc_feature: MA Experiment 20001560 PARAMETER Experiment Name: At_Drought_Soil_Dry_P Parameter: Organism Value: A. thaliana
  misc_feature: MA Experiment 20001560 PARAMETER Experiment Name: At_Drought_Soil_Dry_P Parameter: Plant Line Value: WS
  misc_feature: MA Experiment 20001560 PARAMETER Experiment Name: At_Drought_Soil_Dry_P Parameter: Post Timepoint (hr) Value: None
  misc_feature: MA Experiment 20001560 PARAMETER Experiment Name: At_Drought_Soil_Dry_P Parameter: Post-Treatment Value: None
  misc_feature: MA Experiment 20001560 PARAMETER Experiment Name: At_Drought_Soil_Dry_P Parameter: Timepoint (day) Value: 14
  misc_feature: MA Experiment 20001560 PARAMETER Experiment Name: At_Drought_Soil_Dry_P Parameter: Treatment Value: Drought vs. No Drought
  misc_feature: MA Experiment ID: 20001911 Result: Down-regulated in Transcription
  misc_feature: MA Experiment 20001911 PARAMETER Experiment Name: At_Drought_Reproduction_P Parameter: Age (day) Value: 40
  misc_feature: MA Experiment 20001911 PARAMETER Experiment Name: At_Drought_Reproduction_P Parameter: Organism Value: A. thaliana
  misc_feature: MA Experiment 20001911 PARAMETER Experiment Name: At_Drought_Reproduction_P Parameter: Plant Line Value: WS
  misc_feature: MA Experiment 20001911 PARAMETER Experiment Name: At_Drought_Reproduction_P Parameter: Timepoint (day) Value: 10
  misc_feature: MA Experiment 20001911 PARAMETER Experiment Name: At_Drought_Reproduction_P Parameter: Tissue Value: Flowers
  misc_feature: MA Experiment 20001911 PARAMETER Experiment Name: At_Drought_Reproduction_P Parameter: Treatment Value: Drought vs. No Drought

SEQ ID NO: 33428 - protein, 449 aa, Arabidopsis thaliana; identical to SEQ ID NO: 29838
  peptide (1)..(449): Ceres Seq. ID no. 12385359
  misc_feature (52)..(446): Pfam Name: Eukaryotic aspartyl protease Pfam Description: Eukaryotic aspartyl protease
  misc_feature (46)..(449): Homolog of NCBI NO: 15223368 NR Description: chloroplast nucleoid DNA binding protein, putative
  misc_feature (96)..(448): Homolog of NCBI NO: 34895664 NR Description: nucleoid DNA-binding protein cnd41-like protein
  misc_feature (11)..(449): Homolog of NCBI NO: 34910676 NR Description: P0690B02.2 [Oryza sativa (japonica
  misc_feature (82)..(449): Homolog of NCBI NO: 21450872 NR Description: unknown protein [Arabidopsis thaliana]
  misc_feature (12)..(449): Homolog of NCBI NO: 18391062 NR Description: expressed protein
  misc_feature (22)..(449): Homolog of NCBI NO: 20161865 NR Description: putative nucleoid DNA-binding-like protein
  misc_feature (34)..(449): Homolog of NCBI NO: 34899068 NR Description: similar to nucleoid DNA-binding-like protein
  misc_feature (16)..(449): Homolog of NCBI NO: 15232503 NR Description: nucleoid DNA-binding - like protein
  misc_feature (16)..(449): Homolog of NCBI NO: 21617933 NR Description: nucleoid DNA-binding-like protein [Arabidopsis
  misc_feature (11)..(449): Homolog of NCBI NO: 15240680 NR Description: nucleoid DNA-binding-like protein

SEQ ID NO: 33429 - protein, 439 aa, Arabidopsis thaliana; identical to SEQ ID NO: 29839
  peptide (1)..(439): Ceres Seq. ID no. 12385360
  misc_feature (42)..(436): Pfam Name: Eukaryotic aspartyl protease Pfam Description: Eukaryotic aspartyl protease
  misc_feature (36)..(439): Homolog of NCBI NO: 15223368 NR Description: chloroplast nucleoid DNA binding protein, putative
  misc_feature (86)..(438): Homolog of NCBI NO: 34895664 NR Description: nucleoid DNA-binding protein cnd41-like protein
  misc_feature (1)..(439): Homolog of NCBI NO: 34910676 NR Description: P0690B02.2 [Oryza sativa (japonica
  misc_feature (72)..(439): Homolog of NCBI NO: 21450872 NR Description: unknown protein [Arabidopsis thaliana]
  misc_feature (2)..(439): Homolog of NCBI NO: 18391062 NR Description: expressed protein
  misc_feature (12)..(439): Homolog of NCBI NO: 20161865 NR Description: putative nucleoid DNA-binding-like protein
  misc_feature (24)..(439): Homolog of NCBI NO: 34899068 NR Description: similar to nucleoid DNA-binding-like protein
  misc_feature (6)..(439): Homolog of NCBI NO: 15232503 NR Description: nucleoid DNA-binding - like protein
  misc_feature (6)..(439): Homolog of NCBI NO: 21617933 NR Description: nucleoid DNA-binding-like protein [Arabidopsis
  misc_feature (1)..(439): Homolog of NCBI NO: 15240680 NR Description: nucleoid DNA-binding-like protein

SEQ ID NO: 33430 - protein, 347 aa, Arabidopsis thaliana; identical to SEQ ID NO: 29840
  peptide (1)..(347): Ceres Seq. ID no. 12385361
  misc_feature (1)..(344): Pfam Name: Eukaryotic aspartyl protease Pfam Description: Eukaryotic aspartyl protease
  misc_feature (1)..(347): Homolog of NCBI NO: 15223368 NR Description: chloroplast nucleoid DNA binding protein, putative
  misc_feature (1)..(346): Homolog of NCBI NO: 34895664 NR Description: nucleoid DNA-binding protein cnd41-like protein
  misc_feature (1)..(347): Homolog of NCBI NO: 34910676 NR Description: P0690B02.2 [Oryza sativa (japonica
  misc_feature (1)..(347): Homolog of NCBI NO: 21450872 NR Description: unknown protein [Arabidopsis thaliana]
  misc_feature (1)..(347): Homolog of NCBI NO: 18391062 NR Description: expressed protein
  misc_feature (1)..(347): Homolog of NCBI NO: 20161865 NR Description: putative nucleoid DNA-binding-like protein
  misc_feature (1)..(347): Homolog of NCBI NO: 34899068 NR Description: similar to nucleoid DNA-binding-like protein
  misc_feature (1)..(347): Homolog of NCBI NO: 15232503 NR Description: nucleoid DNA-binding - like protein
  misc_feature (1)..(347): Homolog of NCBI NO: 21617933 NR Description: nucleoid DNA-binding-like protein [Arabidopsis
  misc_feature (1)..(347): Homolog of NCBI NO: 15240680 NR Description: nucleoid DNA-binding-like protein

SEQ ID NO: 33431 - DNA, 2141 bp, Arabidopsis thaliana; identical to SEQ ID NO: 29841
  misc_feature (1)..(2141): Ceres Seq. ID no. 12333959
  misc_feature: MA Experiment ID: 108569 Result: Up-regulated in Transcription
  misc_feature: MA Experiment 108569 PARAMETER Experiment Name: At_0.001%_MeJA__cDNA_P Parameter: Timepoint (hr) Value: 6
  misc_feature: MA Experiment 108569 PARAMETER Experiment Name: At_0.001%_MeJA__cDNA_P Parameter: Tissue Value: Aerial
  misc_feature: MA Experiment 108569 PARAMETER Experiment Name: At_0.001%_MeJA__cDNA_P Parameter: Treatment Value: 0.001% MeJA vs. No Treatment
  misc_feature: MA Experiment ID: 108573 Result: Up-regulated in Transcription
  misc_feature: MA Experiment 108573 PARAMETER Experiment Name: At_Drought_cDNA_P Parameter: Timepoint (hr) Value: 6
  misc_feature: MA Experiment 108573 PARAMETER Experiment Name: At_Drought_cDNA_P Parameter: Tissue Value: Aerial
  misc_feature: MA Experiment 108573 PARAMETER Experiment Name: At_Drought_cDNA_P Parameter: Treatment Value: Drought vs. No Drought
  misc_feature: MA Experiment ID: 108576 Result: Up-regulated in Transcription
  misc_feature: MA Experiment 108576 PARAMETER Experiment Name: At_42deg_Heat_cDNA_P Parameter: Temperature (deg C) Value: 42 vs. 22
  misc_feature: MA Experiment 108576 PARAMETER Experiment Name: At_42deg_Heat_cDNA_P Parameter: Timepoint (hr) Value: 1
  misc_feature: MA Experiment 108576 PARAMETER Experiment Name: At_42deg_Heat_cDNA_P Parameter: Tissue Value: Aerial
  misc_feature: MA Experiment ID: 108577 Result: Up-regulated in Transcription
  misc_feature: MA Experiment 108577 PARAMETER Experiment Name: At_42deg_Heat_cDNA_P Parameter: Temperature (deg C) Value: 42 vs. 22
  misc_feature: MA Experiment 108577 PARAMETER Experiment Name: At_42deg_Heat_cDNA_P Parameter: Timepoint (hr) Value: 6
  misc_feature: MA Experiment 108577 PARAMETER Experiment Name: At_42deg_Heat_cDNA_P Parameter: Tissue Value: Aerial
  misc_feature: MA Experiment ID: 108585 Result: Up-regulated in Transcription
  misc_feature: MA Experiment 108585 PARAMETER Experiment Name: At_5mM_NaNP_cDNA_P Parameter: Timepoint (hr) Value: 6
  misc_feature: MA Experiment 108585 PARAMETER Experiment Name: At_5mM_NaNP_cDNA_P Parameter: Tissue Value: Aerial
  misc_feature: MA Experiment 108585 PARAMETER Experiment Name: At_5mM_NaNP_cDNA_P Parameter: Treatment Value: null
  misc_feature: MA Experiment ID: 108594 Result: Down-regulated in Transcription
  misc_feature: MA Experiment 108594 PARAMETER Experiment Name: At_Ler-rhl_Root_cDNA_P Parameter: Plant Line Value: null
  misc_feature: MA Experiment ID: 108595 Result: Down-regulated in Transcription
  misc_feature: MA Experiment 108595 PARAMETER Experiment Name: At_Ler-pi_Ovule_cDNA_P Parameter: Plant Line Value: null
  misc_feature: MA Experiment ID: 20000087 Result: Down-regulated in Transcription
  misc_feature: MA Experiment 20000087 PARAMETER Experiment Name: At_100uM_ABA_Mutants_cDNA_P Parameter: Plant Line Value: WS
  misc_feature: MA Experiment 20000087 PARAMETER Experiment Name: At_100uM_ABA_Mutants_cDNA_P Parameter: Timepoint (hr) Value: 6
  misc_feature: MA Experiment 20000087 PARAMETER Experiment Name: At_100uM_ABA_Mutants_cDNA_P Parameter: Tissue Value: Aerial
  misc_feature: MA Experiment 20000087 PARAMETER Experiment Name: At_100uM_ABA_Mutants_cDNA_P Parameter: Treatment Value: 100uM ABA vs. No Treatment
  misc_feature: MA Experiment ID: 20000093 Result: Up-regulated in Transcription
  misc_feature: MA Experiment 20000093 PARAMETER Experiment Name: At_42deg_Heat_cDNA_P Parameter: Temperature (deg C) Value: 42 vs. 22
  misc_feature: MA Experiment 20000093 PARAMETER Experiment Name: At_42deg_Heat_cDNA_P Parameter: Timepoint (hr) Value: 0.5
  misc_feature: MA Experiment 20000093 PARAMETER Experiment Name: At_42deg_Heat_cDNA_P Parameter: Tissue Value: Aerial
  misc_feature: MA Experiment ID: 20000112 Result: Up-regulated in Transcription
  misc_feature: MA Experiment 20000112 PARAMETER Experiment Name: At_42deg_Heat_cDNA_P Parameter: Temperature (deg C) Value: 42 vs. 22
  misc_feature: MA Experiment 20000112 PARAMETER Experiment Name: At_42deg_Heat_cDNA_P Parameter: Timepoint (hr) Value: 2
  misc_feature: MA Experiment 20000112 PARAMETER Experiment Name: At_42deg_Heat_cDNA_P Parameter: Tissue Value: Aerial
  misc_feature: MA Experiment ID: 20000113 Result: Up-regulated in Transcription
  misc_feature: MA Experiment 20000113 PARAMETER Experiment Name: At_42deg_Heat_cDNA_P Parameter: Temperature (deg C) Value: 42 vs. 22
  misc_feature: MA Experiment 20000113 PARAMETER Experiment Name: At_42deg_Heat_cDNA_P Parameter: Timepoint (hr) Value: 8
  misc_feature: MA Experiment 20000113 PARAMETER Experiment Name: At_42deg_Heat_cDNA_P Parameter: Tissue Value: Aerial
  misc_feature: MA Experiment ID: 20000144 Result: Up-regulated in Transcription
  misc_feature: MA Experiment 20000144 PARAMETER Experiment Name: At_42deg_Heat_cDNA_P Parameter: Temperature (deg C) Value: 42 vs. 22
  misc_feature: MA Experiment 20000144 PARAMETER Experiment Name: At_42deg_Heat_cDNA_P Parameter: Timepoint (hr) Value: 1
  misc_feature: MA Experiment 20000144 PARAMETER Experiment Name: At_42deg_Heat_cDNA_P Parameter: Tissue Value: Aerial
  misc_feature: MA Experiment ID: 20000171 Result: Up-regulated in Transcription
  misc_feature: MA Experiment 20000171 PARAMETER Experiment Name: At_42deg_Heat_P Parameter: Age (day) Value: 14
  misc_feature: MA Experiment 20000171 PARAMETER Experiment Name: At_42deg_Heat_P Parameter: Organism Value: A. thaliana
  misc_feature: MA Experiment 20000171 PARAMETER Experiment Name: At_42deg_Heat_P Parameter: Plant Line Value: WS
  misc_feature: MA Experiment 20000171 PARAMETER Experiment Name: At_42deg_Heat_P Parameter: Temperature (deg C) Value: 42 vs. 22
  misc_feature: MA Experiment 20000171 PARAMETER Experiment Name: At_42deg_Heat_P Parameter: Timepoint (hr) Value: 1
  misc_feature: MA Experiment 20000171 PARAMETER Experiment Name: At_42deg_Heat_P Parameter: Tissue Value: Aerial
  misc_feature: MA Experiment ID: 20000173 Result: Up-regulated in Transcription
  misc_feature: MA Experiment 20000173 PARAMETER Experiment Name: At_42deg_Heat_P Parameter: Age (day) Value: 14
  misc_feature: MA Experiment 20000173 PARAMETER Experiment Name: At_42deg_Heat_P Parameter: Organism Value: A. thaliana
  misc_feature: MA Experiment 20000173 PARAMETER Experiment Name: At_42deg_Heat_P Parameter: Plant Line Value: WS
  misc_feature: MA Experiment 20000173 PARAMETER Experiment Name: At_42deg_Heat_P Parameter: Temperature (deg C) Value: 42 vs. 22
  misc_feature: MA Experiment 20000173 PARAMETER Experiment Name: At_42deg_Heat_P Parameter: Timepoint (hr) Value: 6
  misc_feature: MA Experiment 20000173 PARAMETER Experiment Name: At_42deg_Heat_P Parameter: Tissue Value: Aerial
  misc_feature: MA Experiment ID: 20000184 Result: Down-regulated in Transcription
  misc_feature: MA Experiment 20000184 PARAMETER Experiment Name: At_Shoots__P Parameter: Age (day) Value: 7
  misc_feature: MA Experiment 20000184 PARAMETER Experiment Name: At_Shoots__P Parameter: Tissue Value: Shoots vs. Whole Plant
  misc_feature: MA Experiment ID: 20000234 Result: Down-regulated in Transcription
  misc_feature: MA Experiment 20000234 PARAMETER Experiment Name: At_Siliques_P Parameter: Age (day) Value: 21
  misc_feature: MA Experiment 20000234 PARAMETER Experiment Name: At_Siliques_P Parameter: Organism Value: A. thaliana
  misc_feature: MA Experiment 20000234 PARAMETER Experiment Name: At_Siliques_P Parameter: Plant Line Value: WS
  misc_feature: MA Experiment 20000234 PARAMETER Experiment Name: At_Siliques_P Parameter: Tissue Value: Less Than 5mm Siliques vs. Whole Plant
  misc_feature: MA Experiment ID: 20000455 Result: Up-regulated in Transcription
  misc_feature: MA Experiment 20000455 PARAMETER Experiment Name: At_100uM_ABA_P Parameter: Age (day) Value: 16
  misc_feature: MA Experiment 20000455 PARAMETER Experiment Name: At_100uM_ABA_P Parameter: Organism Value: A. thaliana
  misc_feature: MA Experiment 20000455 PARAMETER Experiment Name: At_100uM_ABA_P Parameter: Plant Line Value: WS
  misc_feature: MA Experiment 20000455 PARAMETER Experiment Name: At_100uM_ABA_P Parameter: Timepoint (hr) Value: 48
  misc_feature: MA Experiment 20000455 PARAMETER Experiment Name: At_100uM_ABA_P Parameter: Tissue Value: Aerial
  misc_feature: MA Experiment 20000455 PARAMETER Experiment Name: At_100uM_ABA_P Parameter: Treatment Value: 100uM ABA vs. No Treatment
  misc_feature: MA Experiment ID: 20000495 Result: Down-regulated in Transcription
  misc_feature: MA Experiment 20000495 PARAMETER Experiment Name: At_Guard_Cells_P Parameter: Harvest Date Value: 8/2/2002
  misc_feature: MA Experiment 20000495 PARAMETER Experiment Name: At_Guard_Cells_P Parameter: Organism Value: A. thaliana
  misc_feature: MA Experiment 20000495 PARAMETER Experiment Name: At_Guard_Cells_P Parameter: Tissue Value: Guard Cells vs. Leaves
  misc_feature: MA Experiment ID: 20000496 Result: Down-regulated in Transcription
  misc_feature: MA Experiment 20000496 PARAMETER Experiment Name: At_Guard_Cells_P Parameter: Harvest Date Value: 7/19/2002
  misc_feature: MA Experiment 20000496 PARAMETER Experiment Name: At_Guard_Cells_P Parameter: Organism Value: Canola
  misc_feature: MA Experiment 20000496 PARAMETER Experiment Name: At_Guard_Cells_P Parameter: Tissue Value: Guard Cells vs. Leaves
  misc_feature: MA Experiment ID: 20001451 Result: Down-regulated in Transcription
  misc_feature: MA Experiment 20001451 PARAMETER Experiment Name: At_Far-red-induction_P Parameter: Age (day) Value: 7
  misc_feature: MA Experiment 20001451 PARAMETER Experiment Name: At_Far-red-induction_P Parameter: Light Value: Far-red vs. White
  misc_feature: MA Experiment 20001451 PARAMETER Experiment Name: At_Far-red-induction_P Parameter: Organism Value: A. thaliana
  misc_feature: MA Experiment 20001451 PARAMETER Experiment Name: At_Far-red-induction_P Parameter: Plant Line Value: Columbia
  misc_feature: MA Experiment 20001451 PARAMETER Experiment Name: At_Far-red-induction_P Parameter: Timepoint (hr) Value: 24
  misc_feature: MA Experiment 20001451 PARAMETER Experiment Name: At_Far-red-induction_P Parameter: Tissue Value: Whole Plant
  misc_feature: MA Experiment ID: 20001560 Result: Down-regulated in Transcription
  misc_feature: MA Experiment 20001560 PARAMETER Experiment Name: At_Drought_Soil_Dry_P Parameter: Age (day) Value: 28
  misc_feature: MA Experiment 20001560 PARAMETER Experiment Name: At_Drought_Soil_Dry_P Parameter: Organism Value: A. thaliana
  misc_feature: MA Experiment 20001560 PARAMETER Experiment Name: At_Drought_Soil_Dry_P Parameter: Plant Line Value: WS
  misc_feature: MA Experiment 20001560 PARAMETER Experiment Name: At_Drought_Soil_Dry_P Parameter: Post Timepoint (hr) Value: None
  misc_feature: MA Experiment 20001560 PARAMETER Experiment Name: At_Drought_Soil_Dry_P Parameter: Post-Treatment Value: None
  misc_feature: MA Experiment 20001560 PARAMETER Experiment Name: At_Drought_Soil_Dry_P Parameter: Timepoint (day) Value: 14
  misc_feature: MA Experiment 20001560 PARAMETER Experiment Name: At_Drought_Soil_Dry_P Parameter: Treatment Value: Drought vs. No Drought
  misc_feature: MA Experiment ID: 20001905 Result: Up-regulated in Transcription
  misc_feature: MA Experiment 20001905 PARAMETER Experiment Name: At_Drought_Reproduction_P Parameter: Age (day) Value: 40
  misc_feature: MA Experiment 20001905 PARAMETER Experiment Name: At_Drought_Reproduction_P Parameter: Organism Value: A. thaliana
  misc_feature: MA Experiment 20001905 PARAMETER Experiment Name: At_Drought_Reproduction_P Parameter: Plant Line Value: WS
  misc_feature: MA Experiment 20001905 PARAMETER Experiment Name: At_Drought_Reproduction_P Parameter: Timepoint (day) Value: 10
  misc_feature: MA Experiment 20001905 PARAMETER Experiment Name: At_Drought_Reproduction_P Parameter: Tissue Value: Rosettes
  misc_feature: MA Experiment 20001905 PARAMETER Experiment Name: At_Drought_Reproduction_P Parameter: Treatment Value: Drought vs. No Drought

SEQ ID NO: 33432 - protein, 567 aa, Arabidopsis thaliana; identical to SEQ ID NO: 29842
  peptide (1)..(567): Ceres Seq. ID no. 12333960
  misc_feature (9)..(137): Pfam Name: No apical meristem (NAM) protein Pfam Description: No apical meristem (NAM) protein
  misc_feature (178)..(535): Homolog of NCBI NO: 28188651 NR Description: unknown protein [Arabidopsis lyrata]
  misc_feature (178)..(535): Homolog of NCBI NO: 28188649 NR Description: unknown protein [Arabidopsis lyrata]
  misc_feature (178)..(535): Homolog of NCBI NO: 28188643 NR Description: unknown protein [Arabidopsis lyrata]
  misc_feature (1)..(560): Homolog of NCBI NO: 21593389 NR Description: NAC, putative [Arabidopsis thaliana]
  misc_feature (1)..(560): Homolog of NCBI NO: 18398895 NR Description: expressed protein; protein id: At3g10500.1
  misc_feature (178)..(535): Homolog of NCBI NO: 28188627 NR Description: unknown protein [Arabidopsis thaliana]
  misc_feature (178)..(535): Homolog of NCBI NO: 28188625 NR Description: unknown protein [Arabidopsis thaliana]
  misc_feature (1)..(567): Homolog of NCBI NO: 8567779 NR Description: NAC, putative [Arabidopsis thaliana]
  misc_feature (1)..(567): Homolog of NCBI NO: 6456751 NR Description: NAC2 [Arabidopsis thaliana]
  misc_feature (1)..(567): Homolog of NCBI NO: 15237699 NR Description: putative protein

SEQ ID NO: 33433 - protein, 496 aa, Arabidopsis thaliana; identical to SEQ ID NO: 29843
  peptide (1)..(496): Ceres Seq. ID no. 12333961
  misc_feature (1)..(66): Pfam Name: No apical meristem (NAM) protein Pfam Description: No apical meristem (NAM) protein
  misc_feature (107)..(464): Homolog of NCBI NO: 28188651 NR Description: unknown protein [Arabidopsis lyrata]
  misc_feature (107)..(464): Homolog of NCBI NO: 28188649 NR Description: unknown protein [Arabidopsis lyrata]
  misc_feature (107)..(464): Homolog of NCBI NO: 28188643 NR Description: unknown protein [Arabidopsis lyrata]
  misc_feature (1)..(489): Homolog of NCBI NO: 21593389 NR Description: NAC, putative [Arabidopsis thaliana]
  misc_feature (1)..(489): Homolog of NCBI NO: 18398895 NR Description: expressed protein; protein id: At3g10500.1
  misc_feature (107)..(464): Homolog of NCBI NO: 28188627 NR Description: unknown protein [Arabidopsis thaliana]
  misc_feature (107)..(464): Homolog of NCBI NO: 28188625 NR Description: unknown protein [Arabidopsis thaliana]
  misc_feature (1)..(496): Homolog of NCBI NO: 8567779 NR Description: NAC, putative [Arabidopsis thaliana]
  misc_feature (1)..(496): Homolog of NCBI NO: 6456751 NR Description: NAC2 [Arabidopsis thaliana]
  misc_feature (1)..(496): Homolog of NCBI NO: 15237699 NR Description: putative protein

SEQ ID NO: 33434 - protein, 458 aa, Arabidopsis thaliana; identical to SEQ ID NO: 29844
  peptide (1)..(458): Ceres Seq. ID no. 12333962
  misc_feature (69)..(426): Homolog of NCBI NO: 28188651 NR Description: unknown protein [Arabidopsis lyrata]
  misc_feature (69)..(426): Homolog of NCBI NO: 28188649 NR Description: unknown protein [Arabidopsis lyrata]
  misc_feature (69)..(426): Homolog of NCBI NO: 28188643 NR Description: unknown protein [Arabidopsis lyrata]
  misc_feature (1)..(451): Homolog of NCBI NO: 21593389 NR Description: NAC, putative [Arabidopsis thaliana]
  misc_feature (1)..(451): Homolog of NCBI NO: 18398895 NR Description: expressed protein; protein id: At3g10500.1
  misc_feature (69)..(426): Homolog of NCBI NO: 28188627 NR Description: unknown protein [Arabidopsis thaliana]
  misc_feature (69)..(426): Homolog of NCBI NO: 28188625 NR Description: unknown protein [Arabidopsis thaliana]
  misc_feature (1)..(458): Homolog of NCBI NO: 8567779 NR Description: NAC, putative [Arabidopsis thaliana]
  misc_feature (1)..(458): Homolog of NCBI NO: 6456751 NR Description: NAC2 [Arabidopsis thaliana]
  misc_feature (1)..(458): Homolog of NCBI NO: 15237699 NR Description: putative protein

SEQ ID NO: 33435 - DNA, 1538 bp, Arabidopsis thaliana; identical to SEQ ID NO: 29845
  misc_feature (1)..(1538): Ceres Seq. ID no. 12580443
  misc_feature: MA Experiment ID: 108462 Result: Up-regulated in Transcription
  misc_feature: MA Experiment 108462 PARAMETER Experiment Name: At_Germinating_Seeds_cDNA_P Parameter: Age (day) Value: 2 vs. 0
  misc_feature: MA Experiment 108462 PARAMETER Experiment Name: At_Germinating_Seeds_cDNA_P Parameter: Tissue Value: Germinating Seeds
  misc_feature: MA Experiment ID: 108463 Result: Up-regulated in Transcription
  misc_feature: MA Experiment 108463 PARAMETER Experiment Name: At_Germinating_Seeds_cDNA_P Parameter: Age (day) Value: 3 vs. 0
  misc_feature: MA Experiment 108463 PARAMETER Experiment Name: At_Germinating_Seeds_cDNA_P Parameter: Tissue Value: Germinating Seeds
  misc_feature: MA Experiment ID: 108464 Result: Up-regulated in Transcription
  misc_feature: MA Experiment 108464 PARAMETER Experiment Name: At_Germinating_Seeds_cDNA_P Parameter: Age (day) Value: 4 vs. 0
  misc_feature: MA Experiment 108464 PARAMETER Experiment Name: At_Germinating_Seeds_cDNA_P Parameter: Tissue Value: Germinating Seeds
  misc_feature: MA Experiment ID: 108488 Result: Down-regulated in Transcription
  misc_feature: MA Experiment ID: 108572 Result: Down-regulated in Transcription
  misc_feature: MA Experiment 108572 PARAMETER Experiment Name: At_Drought_cDNA_P Parameter: Timepoint (hr) Value: 1
  misc_feature: MA Experiment 108572 PARAMETER Experiment Name: At_Drought_cDNA_P Parameter: Tissue Value: Aerial
  misc_feature: MA Experiment 108572 PARAMETER Experiment Name: At_Drought_cDNA_P Parameter: Treatment Value: Drought vs. No Drought
  misc_feature: MA Experiment ID: 108573 Result: Down-regulated in Transcription
  misc_feature: MA Experiment 108573 PARAMETER Experiment Name: At_Drought_cDNA_P Parameter: Timepoint (hr) Value: 6
  misc_feature: MA Experiment 108573 PARAMETER Experiment Name: At_Drought_cDNA_P Parameter: Tissue Value: Aerial
  misc_feature: MA Experiment 108573 PARAMETER Experiment Name: At_Drought_cDNA_P Parameter: Treatment Value: Drought vs. No Drought
  misc_feature: MA Experiment ID: 20000087 Result: Up-regulated in Transcription
  misc_feature: MA Experiment 20000087 PARAMETER Experiment Name: At_100uM_ABA_Mutants_cDNA_P Parameter: Plant Line Value: WS
  misc_feature: MA Experiment 20000087 PARAMETER Experiment Name: At_100uM_ABA_Mutants_cDNA_P Parameter: Timepoint (hr) Value: 6
  misc_feature: MA Experiment 20000087 PARAMETER Experiment Name: At_100uM_ABA_Mutants_cDNA_P Parameter: Tissue Value: Aerial
  misc_feature: MA Experiment 20000087 PARAMETER Experiment Name: At_100uM_ABA_Mutants_cDNA_P Parameter: Treatment Value: 100uM ABA vs. No Treatment
  misc_feature: MA Experiment ID: 20000117 Result: Up-regulated in Transcription
  misc_feature: MA Experiment 20000117 PARAMETER Experiment Name: At_100uM_ABA_Mutants_cDNA_P Parameter: Plant Line Value: Columbia
  misc_feature: MA Experiment 20000117 PARAMETER Experiment Name: At_100uM_ABA_Mutants_cDNA_P Parameter: Timepoint (hr) Value: 6
  misc_feature: MA Experiment 20000117 PARAMETER Experiment Name: At_100uM_ABA_Mutants_cDNA_P Parameter: Tissue Value: Aerial
  misc_feature: MA Experiment 20000117 PARAMETER Experiment Name: At_100uM_ABA_Mutants_cDNA_P Parameter: Treatment Value: 100uM ABA vs. No Treatment
  misc_feature: MA Experiment ID: 20000179 Result: Up-regulated in Transcription
  misc_feature: MA Experiment 20000179 PARAMETER Experiment Name: At_Germinating_Seeds_P Parameter: Age (hr) Value: 6 vs. 0
  misc_feature: MA Experiment 20000179 PARAMETER Experiment Name: At_Germinating_Seeds_P Parameter: Tissue Value: Germinating Seeds
  misc_feature: MA Experiment ID: 20000180 Result: Up-regulated in Transcription
  misc_feature: MA Experiment 20000180 PARAMETER Experiment Name: At_Germinating_Seeds_P Parameter: Age (hr) Value: 24 vs. 0
  misc_feature: MA Experiment 20000180 PARAMETER Experiment Name: At_Germinating_Seeds_P Parameter: Tissue Value: Germinating Seeds
  misc_feature: MA Experiment ID: 20000185 Result: Up-regulated in Transcription
  misc_feature: MA Experiment 20000185 PARAMETER Experiment Name: At_Roots__P Parameter: Age (day) Value: 7 vs. 21
  misc_feature: MA Experiment 20000185 PARAMETER Experiment Name: At_Roots__P Parameter: Organism Value: A. thaliana
  misc_feature: MA Experiment 20000185 PARAMETER Experiment Name: At_Roots__P Parameter: Tissue Value: Roots vs. Whole Plant
  misc_feature: MA Experiment ID: 20000234 Result: Down-regulated in Transcription
  misc_feature: MA Experiment 20000234 PARAMETER Experiment Name: At_Siliques_P Parameter: Age (day) Value: 21
  misc_feature: MA Experiment 20000234 PARAMETER Experiment Name: At_Siliques_P Parameter: Organism Value: A. thaliana
  misc_feature: MA Experiment 20000234 PARAMETER Experiment Name: At_Siliques_P Parameter: Plant Line Value: WS
  misc_feature: MA Experiment 20000234 PARAMETER Experiment Name: At_Siliques_P Parameter: Tissue Value: Less Than 5mm Siliques vs. Whole Plant
  misc_feature: MA Experiment ID: 20000235 Result: Down-regulated in Transcription
  misc_feature: MA Experiment 20000235 PARAMETER Experiment Name: At_Siliques_P Parameter: Age (day) Value: 21
  misc_feature: MA Experiment 20000235 PARAMETER Experiment Name: At_Siliques_P Parameter: Organism Value: A. thaliana
  misc_feature: MA Experiment 20000235 PARAMETER Experiment Name: At_Siliques_P Parameter: Plant Line Value: WS
  misc_feature: MA Experiment 20000235 PARAMETER Experiment Name: At_Siliques_P Parameter: Tissue Value: 5-10mm Siliques vs. Whole Plant
  misc_feature: MA Experiment ID: 20000264 Result: Down-regulated in Transcription
  misc_feature: MA Experiment 20000264 PARAMETER Experiment Name: At_Open_Flower_P Parameter: Age (day) Value: 21
  misc_feature: MA Experiment 20000264 PARAMETER Experiment Name: At_Open_Flower_P Parameter: Plant Line Value: WS
  misc_feature: MA Experiment 20000264 PARAMETER Experiment Name: At_Open_Flower_P Parameter: Tissue Value: Open Flower vs. Whole Plant
  misc_feature: MA Experiment ID: 20000265 Result: Down-regulated in Transcription
  misc_feature: MA Experiment 20000265 PARAMETER Experiment Name: At_Open_Flower_P Parameter: Age (day) Value: 21
  misc_feature: MA Experiment 20000265 PARAMETER Experiment Name: At_Open_Flower_P Parameter: Plant Line Value: WS
  misc_feature: MA Experiment 20000265 PARAMETER Experiment Name: At_Open_Flower_P Parameter: Tissue Value: Closed Flower vs. Whole Plant
  misc_feature: MA Experiment ID: 20000286 Result: Down-regulated in Transcription
  misc_feature: MA Experiment 20000286 PARAMETER Experiment Name: At_Open_Flower_P Parameter: Age (day) Value: 21
  misc_feature: MA Experiment 20000286 PARAMETER Experiment Name: At_Open_Flower_P Parameter: Plant Line Value: WS
  misc_feature: MA Experiment 20000286 PARAMETER Experiment Name: At_Open_Flower_P Parameter: Tissue Value: Half Open vs. Whole Plant
  misc_feature: MA Experiment ID: 20000439 Result: Up-regulated in Transcription
  misc_feature: MA Experiment 20000439 PARAMETER Experiment Name: At_Roots__P Parameter: Age (day) Value: 14 vs. 21
  misc_feature: MA Experiment 20000439 PARAMETER Experiment Name: At_Roots__P Parameter: Organism Value: A. thaliana
  misc_feature: MA Experiment 20000439 PARAMETER Experiment Name: At_Roots__P Parameter: Tissue Value: Roots vs. Whole Plant
  misc_feature: MA Experiment ID: 20001905 Result: Up-regulated in Transcription
  misc_feature: MA Experiment 20001905 PARAMETER Experiment Name: At_Drought_Reproduction_P Parameter: Age (day) Value: 40
  misc_feature: MA Experiment 20001905 PARAMETER Experiment Name: At_Drought_Reproduction_P Parameter: Organism Value: A. thaliana
  misc_feature: MA Experiment 20001905 PARAMETER Experiment Name: At_Drought_Reproduction_P Parameter: Plant Line Value: WS
  misc_feature: MA Experiment 20001905 PARAMETER Experiment Name: At_Drought_Reproduction_P Parameter: Timepoint (day) Value: 10
  misc_feature: MA Experiment 20001905 PARAMETER Experiment Name: At_Drought_Reproduction_P Parameter: Tissue Value: Rosettes
  misc_feature: MA Experiment 20001905 PARAMETER Experiment Name: At_Drought_Reproduction_P Parameter: Treatment Value: Drought vs. No Drought

SEQ ID NO: 33436 - protein, 356 aa, Arabidopsis thaliana; identical to SEQ ID NO: 29846
  peptide (1)..(356): Ceres Seq. ID no. 12580444
  misc_feature (45)..(339): Homolog of NCBI NO: 38346715 NR Description: OSJNBa0086O06.13 [Oryza sativa (japonica
  misc_feature (53)..(308): Homolog of NCBI NO: 14326504 NR Description: At2g33620/F4P9.39 [Arabidopsis thaliana]
  misc_feature (53)..(308): Homolog of NCBI NO: 37537056 NR Description: putative AT-Hook DNA-binding protein
  misc_feature (5)..(300): Homolog of NCBI NO: 8809639 NR Description: contains similarity to DNA-binding
  misc_feature (38)..(115): Homolog of NCBI NO: 15242131 NR Description: putative protein; protein id: At5g51590.1
  misc_feature (150)..(331): Homolog of NCBI NO: 15242131 NR Description: putative protein; protein id: At5g51590.1
  misc_feature (23)..(321): Homolog of NCBI NO: 15235023 NR Description: putative protein
  misc_feature (5)..(356): Homolog of NCBI NO: 15235790 NR Description: putative DNA binding protein
  misc_feature (5)..(356): Homolog of NCBI NO: 7485570 NR Description: hypothetical protein F16J13.150 - Arabidopsis
  misc_feature (1)..(356): Homolog of NCBI NO: 22328578 NR Description: putative DNA-binding protein
  misc_feature (45)..(339): Homolog of NCBI NO: 38346715 NR Description: OSJNBa0086O06.13 [Oryza sativa (japonica
  misc_feature (53)..(308): Homolog of NCBI NO: 14326504 NR Description: At2g33620/F4P9.39 [Arabidopsis thaliana]
  misc_feature (53)..(308): Homolog of NCBI NO: 37537056 NR Description: putative AT-Hook DNA-binding protein
  misc_feature (5)..(300): Homolog of NCBI NO: 8809639 NR Description: contains similarity to DNA-binding
  misc_feature (38)..(115): Homolog of NCBI NO: 15242131 NR Description: putative protein; protein id: At5g51590.1
  misc_feature (150)..(331): Homolog of NCBI NO: 15242131 NR Description: putative protein; protein id: At5g51590.1
  misc_feature (23)..(321): Homolog of NCBI NO: 15235023 NR Description: putative protein
  misc_feature (5)..(356): Homolog of NCBI NO: 15235790 NR Description: putative DNA binding protein
  misc_feature (5)..(356): Homolog of NCBI NO: 7485570 NR Description: hypothetical protein F16J13.150 - Arabidopsis
  misc_feature (1)..(356): Homolog of NCBI NO: 22328578 NR Description: putative DNA-binding protein

SEQ ID NO: 33437 - protein, 352 aa, Arabidopsis thaliana; identical to SEQ ID NO: 29847
  peptide (1)..(352): Ceres Seq. ID no. 12580445
  misc_feature (41)..(335): Homolog of NCBI NO: 38346715 NR Description: OSJNBa0086O06.13 [Oryza sativa (japonica
  misc_feature (49)..(304): Homolog of NCBI NO: 14326504 NR Description: At2g33620/F4P9.39 [Arabidopsis thaliana]
  misc_feature (49)..(304): Homolog of NCBI NO: 37537056 NR Description: putative AT-Hook DNA-binding protein
  misc_feature (1)..(296): Homolog of NCBI NO: 8809639 NR Description: contains similarity to DNA-binding
  misc_feature (34)..(111): Homolog of NCBI NO: 15242131 NR Description: putative protein; protein id: At5g51590.1
  misc_feature (146)..(327): Homolog of NCBI NO: 15242131 NR Description: putative protein; protein id: At5g51590.1
  misc_feature (19)..(317): Homolog of NCBI NO: 15235023 NR Description: putative protein
  misc_feature (1)..(352): Homolog of NCBI NO: 15235790 NR Description: putative DNA binding protein
  misc_feature (1)..(352): Homolog of NCBI NO: 7485570 NR Description: hypothetical protein F16J13.150 - Arabidopsis
  misc_feature (1)..(352): Homolog of NCBI NO: 22328578 NR Description: putative DNA-binding protein
  misc_feature (41)..(335): Homolog of NCBI NO: 38346715 NR Description: OSJNBa0086O06.13 [Oryza sativa (japonica
  misc_feature (49)..(304): Homolog of NCBI NO: 14326504 NR Description: At2g33620/F4P9.39 [Arabidopsis thaliana]
  misc_feature (49)..(304): Homolog of NCBI NO: 37537056 NR Description: putative AT-Hook DNA-binding protein
  misc_feature (1)..(296): Homolog of NCBI NO: 8809639 NR Description: contains similarity to DNA-binding
  misc_feature (34)..(111): Homolog of NCBI NO: 15242131 NR Description: putative protein; protein id: At5g51590.1
  misc_feature (146)..(327): Homolog of NCBI NO: 15242131 NR Description: putative protein; protein id: At5g51590.1
  misc_feature (19)..(317): Homolog of NCBI NO: 15235023 NR Description: putative protein
  misc_feature (1)..(352): Homolog of NCBI NO: 15235790 NR Description: putative DNA binding protein
  misc_feature (1)..(352): Homolog of NCBI NO: 7485570 NR Description: hypothetical protein F16J13.150 - Arabidopsis
  misc_feature (1)..(352): Homolog of NCBI NO: 22328578 NR Description: putative DNA-binding protein

SEQ ID NO: 33438 - protein, 277 aa, Arabidopsis thaliana; identical to SEQ ID NO: 29848
  peptide (1)..(277): Ceres Seq. ID no. 12580446
  misc_feature (1)..(260): Homolog of NCBI NO: 38346715 NR Description: OSJNBa0086O06.13 [Oryza sativa (japonica
  misc_feature (1)..(229): Homolog of NCBI NO: 14326504 NR Description: At2g33620/F4P9.39 [Arabidopsis thaliana]
  misc_feature (1)..(229): Homolog of NCBI NO: 37537056 NR Description: putative AT-Hook DNA-binding protein
  misc_feature (1)..(221): Homolog of NCBI NO: 8809639 NR Description: contains similarity to DNA-binding
  misc_feature (1)..(36): Homolog of NCBI NO: 15242131 NR Description: putative protein; protein id: At5g51590.1
  misc_feature (71)..(252): Homolog of NCBI NO: 15242131 NR Description: putative protein; protein id: At5g51590.1
  misc_feature (1)..(242): Homolog of NCBI NO: 15235023 NR Description: putative protein
  misc_feature (1)..(277): Homolog of NCBI NO: 15235790 NR Description: putative DNA binding protein
  misc_feature (1)..(277): Homolog of NCBI NO: 7485570 NR Description: hypothetical protein F16J13.150 - Arabidopsis
  misc_feature (1)..(277): Homolog of NCBI NO: 22328578 NR Description: putative DNA-binding protein
  misc_feature (1)..(260): Homolog of NCBI NO: 38346715 NR Description: OSJNBa0086O06.13 [Oryza sativa (japonica
  misc_feature (1)..(229): Homolog of NCBI NO: 14326504 NR Description: At2g33620/F4P9.39 [Arabidopsis thaliana]
  misc_feature (1)..(229): Homolog of NCBI NO: 37537056 NR Description: putative AT-Hook DNA-binding protein
  misc_feature (1)..(221): Homolog of NCBI NO: 8809639 NR Description: contains similarity to DNA-binding
  misc_feature (1)..(36): Homolog of NCBI NO: 15242131 NR Description: putative protein; protein id: At5g51590.1
  misc_feature (71)..(252): Homolog of NCBI NO: 15242131 NR Description: putative protein; protein id: At5g51590.1
  misc_feature (1)..(242): Homolog of NCBI NO: 15235023 NR Description: putative protein
  misc_feature (1)..(277): Homolog of NCBI NO: 15235790 NR Description: putative DNA binding protein
  misc_feature (1)..(277): Homolog of NCBI NO: 7485570 NR Description: hypothetical protein F16J13.150 - Arabidopsis
  misc_feature (1)..(277): Homolog of NCBI NO: 22328578 NR Description: putative DNA-binding protein

SEQ ID NO: 33439 - DNA, 1543 bp, Arabidopsis thaliana; identical to SEQ ID NO: 29849
  misc_feature (1)..(1543): Ceres Seq. ID no. 12579838
  misc_feature: MA Experiment ID: 20000171 Result: Up-regulated in Transcription
  misc_feature: MA Experiment 20000171 PARAMETER Experiment Name: At_42deg_Heat_P Parameter: Age (day) Value: 14
  misc_feature: MA Experiment 20000171 PARAMETER Experiment Name: At_42deg_Heat_P Parameter: Organism Value: A. thaliana
  misc_feature: MA Experiment 20000171 PARAMETER Experiment Name: At_42deg_Heat_P Parameter: Plant Line Value: WS
  misc_feature: MA Experiment 20000171 PARAMETER Experiment Name: At_42deg_Heat_P Parameter: Temperature (deg C) Value: 42 vs. 22
  misc_feature: MA Experiment 20000171 PARAMETER Experiment Name: At_42deg_Heat_P Parameter: Timepoint (hr) Value: 1
  misc_feature: MA Experiment 20000171 PARAMETER Experiment Name: At_42deg_Heat_P Parameter: Tissue Value: Aerial
  misc_feature: MA Experiment ID: 20000234 Result: Down-regulated in Transcription
  misc_feature: MA Experiment 20000234 PARAMETER Experiment Name: At_Siliques_P Parameter: Age (day) Value: 21
  misc_feature: MA Experiment 20000234 PARAMETER Experiment Name: At_Siliques_P Parameter: Organism Value: A. thaliana
  misc_feature: MA Experiment 20000234 PARAMETER Experiment Name: At_Siliques_P Parameter: Plant Line Value: WS
  misc_feature: MA Experiment 20000234 PARAMETER Experiment Name: At_Siliques_P Parameter: Tissue Value: Less Than 5mm Siliques vs. Whole Plant
  misc_feature: MA Experiment ID: 20000436 Result: Up-regulated in Transcription
  misc_feature: MA Experiment 20000436 PARAMETER Experiment Name: At_Drought_P Parameter: Age (day) Value: 7
  misc_feature: MA Experiment 20000436 PARAMETER Experiment Name: At_Drought_P Parameter: Organism Value: A. thaliana
  misc_feature: MA Experiment 20000436 PARAMETER Experiment Name: At_Drought_P Parameter: Plant Line Value: WS
  misc_feature: MA Experiment 20000436 PARAMETER Experiment Name: At_Drought_P Parameter: Timepoint (hr) Value: 12
  misc_feature: MA Experiment 20000436 PARAMETER Experiment Name: At_Drought_P Parameter: Tissue Value: Whole Plant
  misc_feature: MA Experiment 20000436 PARAMETER Experiment Name: At_Drought_P Parameter: Treatment Value: Drought vs. No Drought
  misc_feature: MA Experiment ID: 20000495 Result: Down-regulated in Transcription
  misc_feature: MA Experiment 20000495 PARAMETER Experiment Name: At_Guard_Cells_P Parameter: Harvest Date Value: 8/2/2002
  misc_feature: MA Experiment 20000495 PARAMETER Experiment Name: At_Guard_Cells_P Parameter: Organism Value: A. thaliana
  misc_feature: MA Experiment 20000495 PARAMETER Experiment Name: At_Guard_Cells_P Parameter: Tissue Value: Guard Cells vs. Leaves
  misc_feature: MA Experiment ID: 20001247 Result: Up-regulated in Transcription
  misc_feature: MA Experiment 20001247 PARAMETER Experiment Name: At_Far-red-induction_P Parameter: Age (day) Value: 7
  misc_feature: MA Experiment 20001247 PARAMETER Experiment Name: At_Far-red-induction_P Parameter: Light Value: Far-red vs. White
  misc_feature: MA Experiment 20001247 PARAMETER Experiment Name: At_Far-red-induction_P Parameter: Organism Value: A. thaliana
  misc_feature: MA Experiment 20001247 PARAMETER Experiment Name: At_Far-red-induction_P Parameter: Plant Line Value: Columbia
  misc_feature: MA Experiment 20001247 PARAMETER Experiment Name: At_Far-red-induction_P Parameter: Timepoint (hr) Value: 1
  misc_feature: MA Experiment 20001247 PARAMETER Experiment Name: At_Far-red-induction_P Parameter: Tissue Value: Whole Plant
  misc_feature: MA Experiment ID: 20001248 Result: Down-regulated in Transcription
  misc_feature: MA Experiment 20001248 PARAMETER Experiment Name: At_Far-red-induction_P Parameter: Age (day) Value: 7
  misc_feature: MA Experiment 20001248 PARAMETER Experiment Name: At_Far-red-induction_P Parameter: Light Value: Far-red vs. White
  misc_feature: MA Experiment 20001248 PARAMETER Experiment Name: At_Far-red-induction_P Parameter: Organism Value: A. thaliana
  misc_feature: MA Experiment 20001248 PARAMETER Experiment Name: At_Far-red-induction_P Parameter: Plant Line Value: Columbia
  misc_feature: MA Experiment 20001248 PARAMETER Experiment Name: At_Far-red-induction_P Parameter: Timepoint (hr) Value: 4
  misc_feature: MA Experiment 20001248 PARAMETER Experiment Name: At_Far-red-induction_P Parameter: Tissue Value: Whole Plant
  misc_feature: MA Experiment ID: 20001450 Result: Up-regulated in Transcription
  misc_feature: MA Experiment 20001450 PARAMETER Experiment Name: At_Far-red-induction_P Parameter: Age (day) Value: 7
  misc_feature: MA Experiment 20001450 PARAMETER Experiment Name: At_Far-red-induction_P Parameter: Light Value: Far-red vs. White
  misc_feature: MA Experiment 20001450 PARAMETER Experiment Name: At_Far-red-induction_P Parameter: Organism Value: A. thaliana
  misc_feature: MA Experiment 20001450 PARAMETER Experiment Name: At_Far-red-induction_P Parameter: Plant Line Value: Columbia
  misc_feature: MA Experiment 20001450 PARAMETER Experiment Name: At_Far-red-induction_P Parameter: Timepoint (hr) Value: 8
  misc_feature: MA Experiment 20001450 PARAMETER Experiment Name: At_Far-red-induction_P Parameter: Tissue Value: Whole Plant
  misc_feature: MA Experiment ID: 20001558 Result: Down-regulated in Transcription
  misc_feature: MA Experiment 20001558 PARAMETER Experiment Name: At_Drought_Soil_Dry_P Parameter: Age (day) Value: 27
  misc_feature: MA Experiment 20001558 PARAMETER Experiment Name: At_Drought_Soil_Dry_P Parameter: Organism Value: A. thaliana
  misc_feature: MA Experiment 20001558 PARAMETER Experiment Name: At_Drought_Soil_Dry_P Parameter: Plant Line Value: WS
  misc_feature: MA Experiment 20001558 PARAMETER Experiment Name: At_Drought_Soil_Dry_P Parameter: Post Timepoint (hr) Value: 6
  misc_feature: MA Experiment 20001558 PARAMETER Experiment Name: At_Drought_Soil_Dry_P Parameter: Post-Treatment Value: Re-Water vs. No Drought
  misc_feature: MA Experiment 20001558 PARAMETER Experiment Name: At_Drought_Soil_Dry_P Parameter: Timepoint (day) Value: 13
  misc_feature: MA Experiment 20001558 PARAMETER Experiment Name: At_Drought_Soil_Dry_P Parameter: Treatment Value: Drought vs. No Drought
  misc_feature: MA Experiment ID: 20001560 Result: Down-regulated in Transcription
  misc_feature: MA Experiment 20001560 PARAMETER Experiment Name: At_Drought_Soil_Dry_P Parameter: Age (day) Value: 28
  misc_feature: MA Experiment 20001560 PARAMETER Experiment Name: At_Drought_Soil_Dry_P Parameter: Organism Value: A. thaliana
  misc_feature: MA Experiment 20001560 PARAMETER Experiment Name: At_Drought_Soil_Dry_P Parameter: Plant Line Value: WS
  misc_feature: MA Experiment 20001560 PARAMETER Experiment Name: At_Drought_Soil_Dry_P Parameter: Post Timepoint (hr) Value: None
  misc_feature: MA Experiment 20001560 PARAMETER Experiment Name: At_Drought_Soil_Dry_P Parameter: Post-Treatment Value: None
  misc_feature: MA Experiment 20001560 PARAMETER Experiment Name: At_Drought_Soil_Dry_P Parameter: Timepoint (day) Value: 14
  misc_feature: MA Experiment 20001560 PARAMETER Experiment Name: At_Drought_Soil_Dry_P Parameter: Treatment Value: Drought vs. No Drought
  misc_feature: MA Experiment ID: 20001757 Result: Down-regulated in Transcription
  misc_feature: MA Experiment 20001757 PARAMETER Experiment Name: At_50mM_NH4NO3_L-to-H_P Parameter: Timepoint (hr) Value: 6
  misc_feature: MA Experiment 20001757 PARAMETER Experiment Name: At_50mM_NH4NO3_L-to-H_P Parameter: Tissue Value: Leaf
  misc_feature: MA Experiment 20001757 PARAMETER Experiment Name: At_50mM_NH4NO3_L-to-H_P Parameter: Treatment Value: 50mM NH4NO3 vs 100mM Mannitol

SEQ ID NO: 33440 - protein, 243 aa, Arabidopsis thaliana; identical to SEQ ID NO: 29850
  peptide (1)..(243): Ceres Seq. ID no. 12579839
  misc_feature (1)..(243): Pfam Name: Protein of unknown function (DUF760) Pfam Description: Protein of unknown function (DUF760)
  misc_feature (1)..(93): Homolog of NCBI NO: 15239021 NR Description: putative protein
  misc_feature (149)..(238): Homolog of NCBI NO: 18397912 NR Description: expressed protein
  misc_feature (1)..(101): Homolog of NCBI NO: 18397912 NR Description: expressed protein
  misc_feature (1)..(241): Homolog of NCBI NO: 18398302 NR Description: expressed protein
  misc_feature (1)..(241): Homolog of NCBI NO: 32489097 NR Description: OSJNBa0093F12.3 [Oryza sativa (japonica
  misc_feature (1)..(243): Homolog of NCBI NO: 28301943 NR Description: unknown protein [Oryza sativa (japonica
  misc_feature (1)..(243): Homolog of NCBI NO: 13561930 NR Description: unknown [Brassica napus]
  misc_feature (1)..(243): Homolog of NCBI NO: 15221185 NR Description: unknown protein
  misc_feature (1)..(243): Homolog of NCBI NO: 17064820 NR Description: Unknown protein [Arabidopsis thaliana]
  misc_feature (1)..(243): Homolog of NCBI NO: 18401645 NR Description: expressed protein

SEQ ID NO: 33441 - protein, 205 aa, Arabidopsis thaliana; identical to SEQ ID NO: 29851
  peptide (1)..(205): Ceres Seq. ID no. 12579840
  misc_feature (1)..(205): Pfam Name: Protein of unknown function (DUF760) Pfam Description: Protein of unknown function (DUF760)
  misc_feature (1)..(55): Homolog of NCBI NO: 15239021 NR Description: putative protein
  misc_feature (111)..(200): Homolog of NCBI NO: 18397912 NR Description: expressed protein
  misc_feature (1)..(63): Homolog of NCBI NO: 18397912 NR Description: expressed protein
  misc_feature (1)..(203): Homolog of NCBI NO: 18398302 NR Description: expressed protein
  misc_feature (1)..(203): Homolog of NCBI NO: 32489097 NR Description: OSJNBa0093F12.3 [Oryza sativa (japonica
  misc_feature (1)..(205): Homolog of NCBI NO: 28301943 NR Description: unknown protein [Oryza sativa (japonica
  misc_feature (1)..(205): Homolog of NCBI NO: 13561930 NR Description: unknown [Brassica napus]
  misc_feature (1)..(205): Homolog of NCBI NO: 15221185 NR Description: unknown protein
  misc_feature (1)..(205): Homolog of NCBI NO: 17064820 NR Description: Unknown protein [Arabidopsis thaliana]
  misc_feature (1)..(205): Homolog of NCBI NO: 18401645 NR Description: expressed protein

SEQ ID NO: 33442 - protein, 202 aa, Arabidopsis thaliana; identical to SEQ ID NO: 29852
  peptide (1)..(202): Ceres Seq. ID no. 12579841
  misc_feature (1)..(202): Pfam Name: Protein of unknown function (DUF760) Pfam Description: Protein of unknown function (DUF760)
  misc_feature (1)..(52): Homolog of NCBI NO: 15239021 NR Description: putative protein
  misc_feature (108)..(197): Homolog of NCBI NO: 18397912 NR Description: expressed protein
  misc_feature (1)..(60): Homolog of NCBI NO: 18397912 NR Description: expressed protein
  misc_feature (1)..(200): Homolog of NCBI NO: 18398302 NR Description: expressed protein
  misc_feature (1)..(200): Homolog of NCBI NO: 32489097 NR Description: OSJNBa0093F12.3 [Oryza sativa (japonica
  misc_feature (1)..(202): Homolog of NCBI NO: 28301943 NR Description: unknown protein [Oryza sativa (japonica
  misc_feature (1)..(202): Homolog of NCBI NO: 13561930 NR Description: unknown [Brassica napus]
  misc_feature (1)..(202): Homolog of NCBI NO: 15221185 NR Description: unknown protein
  misc_feature (1)..(202): Homolog of NCBI NO: 17064820 NR Description: Unknown protein [Arabidopsis thaliana]
  misc_feature (1)..(202): Homolog of NCBI NO: 18401645 NR Description: expressed protein

SEQ ID NO: 33443 - DNA, 1859 bp, Arabidopsis thaliana; identical to SEQ ID NO: 21171
  misc_feature (1)..(1859): Ceres Seq. ID no. 13646168
  misc_feature: MA Experiment ID: 108434 Result: Up-regulated in Transcription
  misc_feature: MA Experiment 108434 PARAMETER Experiment Name: At_Root_Tips_cDNA_P Parameter: Tissue Value: Root Tips
  misc_feature: MA Experiment ID: 108462 Result: Down-regulated in Transcription
  misc_feature: MA Experiment 108462 PARAMETER Experiment Name: At_Germinating_Seeds_cDNA_P Parameter: Age (day) Value: 2 vs. 0
  misc_feature: MA Experiment 108462 PARAMETER Experiment Name: At_Germinating_Seeds_cDNA_P Parameter: Tissue Value: Germinating Seeds
  misc_feature: MA Experiment ID: 108463 Result: Down-regulated in Transcription
  misc_feature: MA Experiment 108463 PARAMETER Experiment Name: At_Germinating_Seeds_cDNA_P Parameter: Age (day) Value: 3 vs. 0
  misc_feature: MA Experiment 108463 PARAMETER Experiment Name: At_Germinating_Seeds_cDNA_P Parameter: Tissue Value: Germinating Seeds
  misc_feature: MA Experiment ID: 108573 Result: Down-regulated in Transcription
  misc_feature: MA Experiment 108573 PARAMETER Experiment Name: At_Drought_cDNA_P Parameter: Timepoint (hr) Value: 6
  misc_feature: MA Experiment 108573 PARAMETER Experiment Name: At_Drought_cDNA_P Parameter: Tissue Value: Aerial
  misc_feature: MA Experiment 108573 PARAMETER Experiment Name: At_Drought_cDNA_P Parameter: Treatment Value: Drought vs. No Drought
  misc_feature: MA Experiment ID: 20001905 Result: Down-regulated in Transcription
  misc_feature: MA Experiment 20001905 PARAMETER Experiment Name: At_Drought_Reproduction_P Parameter: Age (day) Value: 40
  misc_feature: MA Experiment 20001905 PARAMETER Experiment Name: At_Drought_Reproduction_P Parameter: Organism Value: A. thaliana
  misc_feature: MA Experiment 20001905 PARAMETER Experiment Name: At_Drought_Reproduction_P Parameter: Plant Line Value: WS
  misc_feature: MA Experiment 20001905 PARAMETER Experiment Name: At_Drought_Reproduction_P Parameter: Timepoint (day) Value: 10
  misc_feature: MA Experiment 20001905 PARAMETER Experiment Name: At_Drought_Reproduction_P Parameter: Tissue Value: Rosettes
  misc_feature: MA Experiment 20001905 PARAMETER Experiment Name: At_Drought_Reproduction_P Parameter: Treatment Value: Drought vs. No Drought

SEQ ID NO: 33444 - protein, 180 aa, Arabidopsis thaliana; identical to SEQ ID NO: 21172
  peptide (1)..(180): Ceres Seq. ID no. 13646169
  misc_feature (50)..(173): Pfam Name: Spermine/spermidine synthase Pfam Description: Spermine/spermidine synthase
  misc_feature (50)..(173): Pfam Name: Spermine/spermidine synthase Pfam Description: Spermine/spermidine synthase
  misc_feature (1)..(173): Homolog of NCBI NO: 23495352 NR Description: spermidine synthase [Malus x domestica]
  misc_feature (40)..(173): Homolog of NCBI NO: 6094330 NR Description: Spermidine synthase 2 (Putrescine
  misc_feature (39)..(173): Homolog of NCBI NO: 6094327 NR Description: Spermidine synthase 1 (Putrescine
  misc_feature (10)..(175): Homolog of NCBI NO: 12229958 NR Description: Spermidine synthase 1 (Putrescine
  misc_feature (10)..(173): Homolog of NCBI NO: 15150055 NR Description: spermidine synthase [Solanum tuberosum]
  misc_feature (39)..(173): Homolog of NCBI NO: 6094327 NR Description: Spermidine synthase 1 (Putrescine
  misc_feature (10)..(173): Homolog of NCBI NO: 15150055 NR Description: spermidine synthase [Solanum tuberosum]
  misc_feature (11)..(173): Homolog of NCBI NO: 23495354 NR Description: spermidine synthase [Malus x domestica]
  misc_feature (40)..(173): Homolog of NCBI NO: 6094330 NR Description: Spermidine synthase 2 (Putrescine
  misc_feature (1)..(173): Homolog of NCBI NO: 23495352 NR Description: spermidine synthase [Malus x domestica]
  misc_feature (1)..(173): Homolog of NCBI NO: 15223115 NR Description: spermidine synthase -related [Arabidopsis
  misc_feature (51)..(173): Homolog of NCBI NO: 2821961 NR Description: spermidine synthase [Arabidopsis thaliana]
  misc_feature (5)..(173): Homolog of NCBI NO: 15220885 NR Description: spermidine synthase -related [Arabidopsis
  misc_feature (10)..(173): Homolog of NCBI NO: 12230013 NR Description: Spermidine synthase (Putrescine
  misc_feature (10)..(175): Homolog of NCBI NO: 12229958 NR Description: Spermidine synthase 1 (Putrescine
  misc_feature (10)..(173): Homolog of NCBI NO: 12230013 NR Description: Spermidine synthase (Putrescine
  misc_feature (11)..(173): Homolog of NCBI NO: 23495354 NR Description: spermidine synthase [Malus x domestica]
  misc_feature (5)..(173): Homolog of NCBI NO: 15220885 NR Description: spermidine synthase -related [Arabidopsis
  misc_feature (51)..(173): Homolog of NCBI NO: 2821961 NR Description: spermidine synthase [Arabidopsis thaliana]
  misc_feature (1)..(173): Homolog of NCBI NO: 15223115 NR Description: spermidine synthase -related [Arabidopsis

SEQ ID NO: 33445 - protein, 168 aa, Arabidopsis thaliana; identical to SEQ ID NO: 21173
  peptide (1)..(168): Ceres Seq. ID no. 13646170
  misc_feature (18)..(123): Pfam Name: Spermine/spermidine synthase Pfam Description: Spermine/spermidine synthase
  misc_feature (18)..(123): Pfam Name: Spermine/spermidine synthase Pfam Description: Spermine/spermidine synthase
  misc_feature (18)..(167): Homolog of NCBI NO: 23495352 NR Description: spermidine synthase [Malus x domestica]
  misc_feature (18)..(167): Homolog of NCBI NO: 6094330 NR Description: Spermidine synthase 2 (Putrescine
  misc_feature (18)..(166): Homolog of NCBI NO: 6094327 NR Description: Spermidine synthase 1 (Putrescine
  misc_feature (18)..(168): Homolog of NCBI NO: 12229958 NR Description: Spermidine synthase 1 (Putrescine
  misc_feature (18)..(166): Homolog of NCBI NO: 15150055 NR Description: spermidine synthase [Solanum tuberosum]
  misc_feature (18)..(167): Homolog of NCBI NO: 23495352 NR Description: spermidine synthase [Malus x domestica]
  misc_feature (18)..(166): Homolog of NCBI NO: 6094327 NR Description: Spermidine synthase 1 (Putrescine
  misc_feature (18)..(166): Homolog of NCBI NO: 15150055 NR Description: spermidine synthase [Solanum tuberosum]
  misc_feature (18)..(168): Homolog of NCBI NO: 15223115 NR Description: spermidine synthase -related [Arabidopsis
  misc_feature (18)..(168): Homolog of NCBI NO: 2821961 NR Description: spermidine synthase [Arabidopsis thaliana]
  misc_feature (18)..(168): Homolog of NCBI NO: 15220885 NR Description: spermidine synthase -related [Arabidopsis
  misc_feature (18)..(167): Homolog of NCBI NO: 23495354 NR Description: spermidine synthase [Malus x domestica]
  misc_feature (18)..(166): Homolog of NCBI NO: 12230013 NR Description: Spermidine synthase (Putrescine
  misc_feature (18)..(168): Homolog of NCBI NO: 12229958 NR Description: Spermidine synthase 1 (Putrescine
  misc_feature (18)..(167): Homolog of NCBI NO: 6094330 NR Description: Spermidine synthase 2 (Putrescine
  misc_feature (18)..(166): Homolog of NCBI NO: 12230013 NR Description: Spermidine synthase (Putrescine
  misc_feature (18)..(167): Homolog of NCBI NO: 23495354 NR Description: spermidine synthase [Malus x domestica]
  misc_feature (18)..(168): Homolog of NCBI NO: 15220885 NR Description: spermidine synthase -related [Arabidopsis
  misc_feature (18)..(168): Homolog of NCBI NO: 2821961 NR Description: spermidine synthase [Arabidopsis thaliana]
  misc_feature (18)..(168): Homolog of NCBI NO: 15223115 NR Description: spermidine synthase -related [Arabidopsis

SEQ ID NO: 33446 - protein, 158 aa, Arabidopsis thaliana; identical to SEQ ID NO: 21174
  peptide (1)..(158): Ceres Seq. ID no. 13646171
  misc_feature (8)..(113): Pfam Name: Spermine/spermidine synthase Pfam Description: Spermine/spermidine synthase
  misc_feature (8)..(113): Pfam Name: Spermine/spermidine synthase Pfam Description: Spermine/spermidine synthase
  misc_feature (8)..(157): Homolog of NCBI NO: 23495352 NR Description: spermidine synthase [Malus x domestica]
  misc_feature (8)..(157): Homolog of NCBI NO: 6094330 NR Description: Spermidine synthase 2 (Putrescine
  misc_feature (8)..(156): Homolog of NCBI NO: 6094327 NR Description: Spermidine synthase 1 (Putrescine
  misc_feature (8)..(158): Homolog of NCBI NO: 12229958 NR Description: Spermidine synthase 1 (Putrescine
  misc_feature (8)..(156): Homolog of NCBI NO: 15150055 NR Description: spermidine synthase [Solanum tuberosum]
  misc_feature (8)..(157): Homolog of NCBI NO: 23495352 NR Description: spermidine synthase [Malus x domestica]
  misc_feature (8)..(156): Homolog of NCBI NO: 6094327 NR Description: Spermidine synthase 1 (Putrescine
  misc_feature (8)..(156): Homolog of NCBI NO: 15150055 NR Description: spermidine synthase [Solanum tuberosum]
  misc_feature (8)..(158): Homolog of NCBI NO: 15223115 NR Description: spermidine synthase -related [Arabidopsis
  misc_feature (8)..(158): Homolog of NCBI NO: 2821961 NR Description: spermidine synthase [Arabidopsis thaliana]
  misc_feature (8)..(158): Homolog of NCBI NO: 15220885 NR Description: spermidine synthase -related [Arabidopsis
  misc_feature (8)..(157): Homolog of NCBI NO: 23495354 NR Description: spermidine synthase [Malus x domestica]
  misc_feature (8)..(156): Homolog of NCBI NO: 12230013 NR Description: Spermidine synthase (Putrescine
  misc_feature (8)..(158): Homolog of NCBI NO: 12229958 NR Description: Spermidine synthase 1 (Putrescine
  misc_feature (8)..(157): Homolog of NCBI NO: 6094330 NR Description: Spermidine synthase 2 (Putrescine
  misc_feature (8)..(156): Homolog of NCBI NO: 12230013 NR Description: Spermidine synthase (Putrescine
  misc_feature (8)..(157): Homolog of NCBI NO: 23495354 NR Description: spermidine synthase [Malus x domestica]
  misc_feature (8)..(158): Homolog of NCBI NO: 15220885 NR Description: spermidine synthase -related [Arabidopsis
  misc_feature (8)..(158): Homolog of NCBI NO: 2821961 NR Description: spermidine synthase [Arabidopsis thaliana]
  misc_feature (8)..(158): Homolog of NCBI NO: 15223115 NR Description: spermidine synthase -related [Arabidopsis

SEQ ID NO: 33447 - DNA, 1430 bp, Arabidopsis thaliana; identical to SEQ ID NO: 22042
  misc_feature (1)..(1430): Ceres Seq. ID no. 12482890
  misc_feature: MA Experiment ID: 20000173 Result: Down-regulated in Transcription
  misc_feature: MA Experiment 20000173 PARAMETER Experiment Name: At_42deg_Heat_P Parameter: Age (day) Value: 14
  misc_feature: MA Experiment 20000173 PARAMETER Experiment Name: At_42deg_Heat_P Parameter: Organism Value: A. thaliana
  misc_feature: MA Experiment 20000173 PARAMETER Experiment Name: At_42deg_Heat_P Parameter: Plant Line Value: WS
  misc_feature: MA Experiment 20000173 PARAMETER Experiment Name: At_42deg_Heat_P Parameter: Temperature (deg C) Value: 42 vs. 22
  misc_feature: MA Experiment 20000173 PARAMETER Experiment Name: At_42deg_Heat_P Parameter: Timepoint (hr) Value: 6
  misc_feature: MA Experiment 20000173 PARAMETER Experiment Name: At_42deg_Heat_P Parameter: Tissue Value: Aerial
  misc_feature: MA Experiment ID: 20000182 Result: Up-regulated in Transcription
  misc_feature: MA Experiment 20000182 PARAMETER Experiment Name: At_2mM_SA_P Parameter: Age (day) Value: 14
  misc_feature: MA Experiment 20000182 PARAMETER Experiment Name: At_2mM_SA_P Parameter: Organism Value: A. thaliana
  misc_feature: MA Experiment 20000182 PARAMETER Experiment Name: At_2mM_SA_P Parameter: Plant Line Value: WS
  misc_feature: MA Experiment 20000182 PARAMETER Experiment Name: At_2mM_SA_P Parameter: Timepoint (hr) Value: 6
  misc_feature: MA Experiment 20000182 PARAMETER Experiment Name: At_2mM_SA_P Parameter: Tissue Value: Aerial
  misc_feature: MA Experiment 20000182 PARAMETER Experiment Name: At_2mM_SA_P Parameter: Treatment Value: 2mM SA vs. No Treatment
  misc_feature: MA Experiment ID: 20000184 Result: Down-regulated in Transcription
  misc_feature: MA Experiment 20000184 PARAMETER Experiment Name: At_Shoots__P Parameter: Age (day) Value: 7
  misc_feature: MA Experiment 20000184 PARAMETER Experiment Name: At_Shoots__P Parameter: Tissue Value: Shoots vs. Whole Plant
  misc_feature: MA Experiment ID: 20000185 Result: Down-regulated in Transcription
  misc_feature: MA Experiment 20000185 PARAMETER Experiment Name: At_Roots__P Parameter: Age (day) Value: 7 vs. 21
  misc_feature: MA Experiment 20000185 PARAMETER Experiment Name: At_Roots__P Parameter: Organism Value: A. thaliana
  misc_feature: MA Experiment 20000185 PARAMETER Experiment Name: At_Roots__P Parameter: Tissue Value: Roots vs. Whole Plant
  misc_feature: MA Experiment ID: 20000213 Result: Up-regulated in Transcription
  misc_feature: MA Experiment 20000213 PARAMETER Experiment Name: At_4deg_Cold_P Parameter: Timepoint (hr) Value: 2
  misc_feature: MA Experiment ID: 20000234 Result: Down-regulated in Transcription
  misc_feature: MA Experiment 20000234 PARAMETER Experiment Name: At_Siliques_P Parameter: Age (day) Value: 21
  misc_feature: MA Experiment 20000234 PARAMETER Experiment Name: At_Siliques_P Parameter: Organism Value: A. thaliana
  misc_feature: MA Experiment 20000234 PARAMETER Experiment Name: At_Siliques_P Parameter: Plant Line Value: WS
  misc_feature: MA Experiment 20000234 PARAMETER Experiment Name: At_Siliques_P Parameter: Tissue Value: Less Than 5mm Siliques vs. Whole Plant
  misc_feature: MA Experiment ID: 20000264 Result: Down-regulated in Transcription
  misc_feature: MA Experiment 20000264 PARAMETER Experiment Name: At_Open_Flower_P Parameter: Age (day) Value: 21
  misc_feature: MA Experiment 20000264 PARAMETER Experiment Name: At_Open_Flower_P Parameter: Plant Line Value: WS
  misc_feature: MA Experiment 20000264 PARAMETER Experiment Name: At_Open_Flower_P Parameter: Tissue Value: Open Flower vs. Whole Plant
  misc_feature: MA Experiment ID: 20000265 Result: Down-regulated in Transcription
  misc_feature: MA Experiment 20000265 PARAMETER Experiment Name: At_Open_Flower_P Parameter: Age (day) Value: 21
  misc_feature: MA Experiment 20000265 PARAMETER Experiment Name: At_Open_Flower_P Parameter: Plant Line Value: WS
  misc_feature: MA Experiment 20000265 PARAMETER Experiment Name: At_Open_Flower_P Parameter: Tissue Value: Closed Flower vs. Whole Plant
  misc_feature: MA Experiment ID: 20000286 Result: Down-regulated in Transcription
  misc_feature: MA Experiment 20000286 PARAMETER Experiment Name: At_Open_Flower_P Parameter: Age (day) Value: 21
  misc_feature: MA Experiment 20000286 PARAMETER Experiment Name: At_Open_Flower_P Parameter: Plant Line Value: WS
  misc_feature: MA Experiment 20000286 PARAMETER Experiment Name: At_Open_Flower_P Parameter: Tissue Value: Half Open vs. Whole Plant
  misc_feature: MA Experiment ID: 20000438 Result: Down-regulated in Transcription
  misc_feature: MA Experiment 20000438 PARAMETER Experiment Name: At_Shoots__P Parameter: Age (day) Value: 14
  misc_feature: MA Experiment 20000438 PARAMETER Experiment Name: At_Shoots__P Parameter: Tissue Value: Shoots vs. Whole Plant
  misc_feature: MA Experiment ID: 20000439 Result: Down-regulated in Transcription
  misc_feature: MA Experiment 20000439 PARAMETER Experiment Name: At_Roots__P Parameter: Age (day) Value: 14 vs. 21
  misc_feature: MA Experiment 20000439 PARAMETER Experiment Name: At_Roots__P Parameter: Organism Value: A. thaliana
  misc_feature: MA Experiment 20000439 PARAMETER Experiment Name: At_Roots__P Parameter: Tissue Value: Roots vs. Whole Plant
  misc_feature: MA Experiment ID: 20000495 Result: Down-regulated in Transcription
  misc_feature: MA Experiment 20000495 PARAMETER Experiment Name: At_Guard_Cells_P Parameter: Harvest Date Value: 8/2/2002
  misc_feature: MA Experiment 20000495 PARAMETER Experiment Name: At_Guard_Cells_P Parameter: Organism Value: A. thaliana
  misc_feature: MA Experiment 20000495 PARAMETER Experiment Name: At_Guard_Cells_P Parameter: Tissue Value: Guard Cells vs. Leaves
  misc_feature: MA Experiment ID: 20000576 Result: Down-regulated in Transcription
  misc_feature: MA Experiment 20000576 PARAMETER Experiment Name: At_100uM_ABA_Mutants__P Parameter: Organism Value: A. thaliana
  misc_feature: MA Experiment 20000576 PARAMETER Experiment Name: At_100uM_ABA_Mutants__P Parameter: Plant Line Value: CS23
  misc_feature: MA Experiment 20000576 PARAMETER Experiment Name: At_100uM_ABA_Mutants__P Parameter: Timepoint (hr) Value: 6
  misc_feature: MA Experiment 20000576 PARAMETER Experiment Name: At_100uM_ABA_Mutants__P Parameter: Tissue Value: Whole Plant
  misc_feature: MA Experiment 20000576 PARAMETER Experiment Name: At_100uM_ABA_Mutants__P Parameter: Treatment Value: 1uM ABA vs. No Treatment
  misc_feature: MA Experiment ID: 20000709 Result: Up-regulated in Transcription
  misc_feature: MA Experiment 20000709 PARAMETER Experiment Name: At_15mM_NH4NO3_L-to-H_P Parameter: Age (hr) Value: 14
  misc_feature: MA Experiment 20000709 PARAMETER Experiment Name: At_15mM_NH4NO3_L-to-H_P Parameter: Organism Value: A. thaliana
  misc_feature: MA Experiment 20000709 PARAMETER Experiment Name: At_15mM_NH4NO3_L-to-H_P Parameter: Plant Line Value: WS
  misc_feature: MA Experiment 20000709 PARAMETER Experiment Name: At_15mM_NH4NO3_L-to-H_P Parameter: Timepoint (hr) Value: 4
  misc_feature: MA Experiment 20000709 PARAMETER Experiment Name: At_15mM_NH4NO3_L-to-H_P Parameter: Tissue Value: Aerial
  misc_feature: MA Experiment 20000709 PARAMETER Experiment Name: At_15mM_NH4NO3_L-to-H_P Parameter: Treatment Value: 15mM NH4NO3 vs. 30mM Mannitol
  misc_feature: MA Experiment ID: 20000794 Result: Down-regulated in Transcription
  misc_feature: MA Experiment 20000794 PARAMETER Experiment Name: At_Petals_P Parameter: Age (day) Value: 23-25 days
  misc_feature: MA Experiment 20000794 PARAMETER Experiment Name: At_Petals_P Parameter: Plant Line Value: WS
  misc_feature: MA Experiment 20000794 PARAMETER Experiment Name: At_Petals_P Parameter: Tissue Value: Petals vs. Whole plant
  misc_feature: MA Experiment ID: 20001247 Result: Down-regulated in Transcription
  misc_feature: MA Experiment 20001247 PARAMETER Experiment Name: At_Far-red-induction_P Parameter: Age (day) Value: 7
  misc_feature: MA Experiment 20001247 PARAMETER Experiment Name: At_Far-red-induction_P Parameter: Light Value: Far-red vs. White
  misc_feature: MA Experiment 20001247 PARAMETER Experiment Name: At_Far-red-induction_P Parameter: Organism Value: A. thaliana
  misc_feature: MA Experiment 20001247 PARAMETER Experiment Name: At_Far-red-induction_P Parameter: Plant Line Value: Columbia
  misc_feature: MA Experiment 20001247 PARAMETER Experiment Name: At_Far-red-induction_P Parameter: Timepoint (hr) Value: 1
  misc_feature: MA Experiment 20001247 PARAMETER Experiment Name: At_Far-red-induction_P Parameter: Tissue Value: Whole Plant
  misc_feature: MA Experiment ID: 20001450 Result: Down-regulated in Transcription
  misc_feature: MA Experiment 20001450 PARAMETER Experiment Name: At_Far-red-induction_P Parameter: Age (day) Value: 7
  misc_feature: MA Experiment 20001450 PARAMETER Experiment Name: At_Far-red-induction_P Parameter: Light Value: Far-red vs. White
  misc_feature: MA Experiment 20001450 PARAMETER Experiment Name: At_Far-red-induction_P Parameter: Organism Value: A. thaliana
  misc_feature: MA Experiment 20001450 PARAMETER Experiment Name: At_Far-red-induction_P Parameter: Plant Line Value: Columbia
  misc_feature: MA Experiment 20001450 PARAMETER Experiment Name: At_Far-red-induction_P Parameter: Timepoint (hr) Value: 8
  misc_feature: MA Experiment 20001450 PARAMETER Experiment Name: At_Far-red-induction_P Parameter: Tissue Value: Whole Plant
  misc_feature: MA Experiment ID: 20001451 Result: Down-regulated in Transcription
  misc_feature: MA Experiment 20001451 PARAMETER Experiment Name: At_Far-red-induction_P Parameter: Age (day) Value: 7
  misc_feature: MA Experiment 20001451 PARAMETER Experiment Name: At_Far-red-induction_P Parameter: Light Value: Far-red vs. White
  misc_feature: MA Experiment 20001451 PARAMETER Experiment Name: At_Far-red-induction_P Parameter: Organism Value: A. thaliana
  misc_feature: MA Experiment 20001451 PARAMETER Experiment Name: At_Far-red-induction_P Parameter: Plant Line Value: Columbia
  misc_feature: MA Experiment 20001451 PARAMETER Experiment Name: At_Far-red-induction_P Parameter: Timepoint (hr) Value: 24
  misc_feature: MA Experiment 20001451 PARAMETER Experiment Name: At_Far-red-induction_P Parameter: Tissue Value: Whole Plant
  misc_feature: MA Experiment ID: 20001555 Result: Down-regulated in Transcription
  misc_feature: MA Experiment 20001555 PARAMETER Experiment Name: At_Drought_Soil_Dry_P Parameter: Age (day) Value: 24
  misc_feature: MA Experiment 20001555 PARAMETER Experiment Name: At_Drought_Soil_Dry_P Parameter: Organism Value: A. thaliana
  misc_feature: MA Experiment 20001555 PARAMETER Experiment Name: At_Drought_Soil_Dry_P Parameter: Plant Line Value: WS
  misc_feature: MA Experiment 20001555 PARAMETER Experiment Name: At_Drought_Soil_Dry_P Parameter: Post Timepoint (hr) Value: None
  misc_feature: MA Experiment 20001555 PARAMETER Experiment Name: At_Drought_Soil_Dry_P Parameter: Post-Treatment Value: None
  misc_feature: MA Experiment 20001555 PARAMETER Experiment Name: At_Drought_Soil_Dry_P Parameter: Timepoint (day) Value: 10
  misc_feature: MA Experiment 20001555 PARAMETER Experiment Name: At_Drought_Soil_Dry_P Parameter: Treatment Value: Drought vs. No Drought
  misc_feature: MA Experiment ID: 20001907 Result: Down-regulated in Transcription
  misc_feature: MA Experiment 20001907 PARAMETER Experiment Name: At_Drought_Reproduction_P Parameter: Age (day) Value: 37
  misc_feature: MA Experiment 20001907 PARAMETER Experiment Name: At_Drought_Reproduction_P Parameter: Organism Value: A. thaliana
  misc_feature: MA Experiment 20001907 PARAMETER Experiment Name: At_Drought_Reproduction_P Parameter: Plant Line Value: WS
  misc_feature: MA Experiment 20001907 PARAMETER Experiment Name: At_Drought_Reproduction_P Parameter: Timepoint (day) Value: 7
  misc_feature: MA Experiment 20001907 PARAMETER Experiment Name: At_Drought_Reproduction_P Parameter: Tissue Value: Siliques
  misc_feature: MA Experiment 20001907 PARAMETER Experiment Name: At_Drought_Reproduction_P Parameter: Treatment Value: Drought vs. No Drought

SEQ ID NO: 33448 - protein, 425 aa, Arabidopsis thaliana; identical to SEQ ID NO: 22043
  peptide (1)..(425): Ceres Seq. ID no. 12482891
  misc_feature (111)..(239): Pfam Name: Protein of unknown function (DUF568) Pfam Description: Protein of unknown function (DUF568)
  misc_feature (111)..(239): Pfam Name: Protein of unknown function (DUF568) Pfam Description: Protein of unknown function (DUF568)
  misc_feature (22)..(394): Homolog of NCBI NO: 15235545 NR Description: putative protein
  misc_feature (32)..(411): Homolog of NCBI NO: 24414270 NR Description: Putative membrane protein [Oryza sativa (japonica
  misc_feature (50)..(410): Homolog of NCBI NO: 15238124 NR Description: putative protein; protein id: At5g47530.1
  misc_feature (34)..(399): Homolog of NCBI NO: 18086563 NR Description: AT4g17280/dl4675c [Arabidopsis thaliana]
  misc_feature (30)..(423): Homolog of NCBI NO: 13785213 NR Description: putative membrane protein [Solanum tuberosum]
  misc_feature (22)..(394): Homolog of NCBI NO: 15235545 NR Description: putative protein
  misc_feature (50)..(410): Homolog of NCBI NO: 15238124 NR Description: putative protein; protein id: At5g47530.1
  misc_feature (30)..(423): Homolog of NCBI NO: 13785213 NR Description: putative membrane protein [Solanum tuberosum]
  misc_feature (22)..(425): Homolog of NCBI NO: 18421491 NR Description: Expressed protein
  misc_feature (22)..(425): Homolog of NCBI NO: 21592781 NR Description: putative membrane protein [Arabidopsis thaliana]
  misc_feature (32)..(425): Homolog of NCBI NO: 13785209 NR Description: putative membrane protein [Solanum tuberosum]
  misc_feature (30)..(423): Homolog of NCBI NO: 13785211 NR Description: putative membrane protein [Solanum tuberosum]
  misc_feature (30)..(423): Homolog of NCBI NO: 13785207 NR Description: putative membrane protein [Solanum tuberosum]
  misc_feature (34)..(399): Homolog of NCBI NO: 18086563 NR Description: AT4g17280/dl4675c [Arabidopsis thaliana]
  misc_feature (32)..(411): Homolog of NCBI NO: 24414270 NR Description: Putative membrane protein [Oryza sativa (japonica
  misc_feature (30)..(423): Homolog of NCBI NO: 13785207 NR Description: putative membrane protein [Solanum tuberosum]
  misc_feature (30)..(423): Homolog of NCBI NO: 13785211 NR Description: putative membrane protein [Solanum tuberosum]
  misc_feature (32)..(425): Homolog of NCBI NO: 13785209 NR Description: putative membrane protein [Solanum tuberosum]
  misc_feature (22)..(425): Homolog of NCBI NO: 21592781 NR Description: putative membrane protein [Arabidopsis thaliana]
  misc_feature (22)..(425): Homolog of NCBI NO: 18421491 NR Description: Expressed protein

SEQ ID NO: 33449 - protein, 404 aa, Arabidopsis thaliana; identical to SEQ ID NO: 22044
  peptide (1)..(404): Ceres Seq. ID no. 12482892
  misc_feature (90)..(218): Pfam Name: Protein of unknown function (DUF568) Pfam Description: Protein of unknown function (DUF568)
  misc_feature (90)..(218): Pfam Name: Protein of unknown function (DUF568) Pfam Description: Protein of unknown function (DUF568)
  misc_feature (1)..(373): Homolog of NCBI NO: 15235545 NR Description: putative protein
  misc_feature (11)..(390): Homolog of NCBI NO: 24414270 NR Description: Putative membrane protein [Oryza sativa (japonica
  misc_feature (29)..(389): Homolog of NCBI NO: 15238124 NR Description: putative protein; protein id: At5g47530.1
  misc_feature (13)..(378): Homolog of NCBI NO: 18086563 NR Description: AT4g17280/dl4675c [Arabidopsis thaliana]
  misc_feature (9)..(402): Homolog of NCBI NO: 13785213 NR Description: putative membrane protein [Solanum tuberosum]
  misc_feature (1)..(373): Homolog of NCBI NO: 15235545 NR Description: putative protein
  misc_feature (29)..(389): Homolog of NCBI NO: 15238124 NR Description: putative protein; protein id: At5g47530.1
  misc_feature (9)..(402): Homolog of NCBI NO: 13785213 NR Description: putative membrane protein [Solanum tuberosum]
  misc_feature (1)..(404): Homolog of NCBI NO: 18421491 NR Description: Expressed protein
  misc_feature (1)..(404): Homolog of NCBI NO: 21592781 NR Description: putative membrane protein [Arabidopsis thaliana]
  misc_feature (11)..(404): Homolog of NCBI NO: 13785209 NR Description: putative membrane protein [Solanum tuberosum]
  misc_feature (9)..(402): Homolog of NCBI NO: 13785211 NR Description: putative membrane protein [Solanum tuberosum]
  misc_feature (9)..(402): Homolog of NCBI NO: 13785207 NR Description: putative membrane protein [Solanum tuberosum]
  misc_feature (13)..(378): Homolog of NCBI NO: 18086563 NR Description: AT4g17280/dl4675c [Arabidopsis thaliana]
  misc_feature (11)..(390): Homolog of NCBI NO: 24414270 NR Description: Putative membrane protein [Oryza sativa (japonica
  misc_feature (9)..(402): Homolog of NCBI NO: 13785207 NR Description: putative membrane protein [Solanum tuberosum]
  misc_feature (9)..(402): Homolog of NCBI NO: 13785211 NR Description: putative membrane protein [Solanum tuberosum]
  misc_feature (11)..(404): Homolog of NCBI NO: 13785209 NR Description: putative membrane protein [Solanum tuberosum]
  misc_feature (1)..(404): Homolog of NCBI NO: 21592781 NR Description: putative membrane protein [Arabidopsis thaliana]
  misc_feature (1)..(404): Homolog of NCBI NO: 18421491 NR Description: Expressed protein

SEQ ID NO: 33450 - protein, 315 aa, Arabidopsis thaliana; identical to SEQ ID NO: 22045
  peptide (1)..(315): Ceres Seq. ID no. 12482893
  misc_feature (1)..(129): Pfam Name: Protein of unknown function (DUF568) Pfam Description: Protein of unknown function (DUF568)
  misc_feature (1)..(129): Pfam Name: Protein of unknown function (DUF568) Pfam Description: Protein of unknown function (DUF568)
  misc_feature (1)..(284): Homolog of NCBI NO: 15235545 NR Description: putative protein
  misc_feature (1)..(301): Homolog of NCBI NO: 24414270 NR Description: Putative membrane protein [Oryza sativa (japonica
  misc_feature (1)..(300): Homolog of NCBI NO: 15238124 NR Description: putative protein; protein id: At5g47530.1
  misc_feature (1)..(289): Homolog of NCBI NO: 18086563 NR Description: AT4g17280/dl4675c [Arabidopsis thaliana]
  misc_feature (1)..(313): Homolog of NCBI NO: 13785213 NR Description: putative membrane protein [Solanum tuberosum]
  misc_feature (1)..(284): Homolog of NCBI NO: 15235545 NR Description: putative protein
  misc_feature (1)..(300): Homolog of NCBI NO: 15238124 NR Description: putative protein; protein id: At5g47530.1
  misc_feature (1)..(313): Homolog of NCBI NO: 13785213 NR Description: putative membrane protein [Solanum tuberosum]
  misc_feature (1)..(315): Homolog of NCBI NO: 18421491 NR Description: Expressed protein
  misc_feature (1)..(315): Homolog of NCBI NO: 21592781 NR Description: putative membrane protein [Arabidopsis thaliana]
  misc_feature (1)..(315): Homolog of NCBI NO: 13785209 NR Description: putative membrane protein [Solanum tuberosum]
  misc_feature (1)..(313): Homolog of NCBI NO: 13785211 NR Description: putative membrane protein [Solanum tuberosum]
  misc_feature (1)..(313): Homolog of NCBI NO: 13785207 NR Description: putative membrane protein [Solanum tuberosum]
  misc_feature (1)..(289): Homolog of NCBI NO: 18086563 NR Description: AT4g17280/dl4675c [Arabidopsis thaliana]
  misc_feature (1)..(301): Homolog of NCBI NO: 24414270 NR Description: Putative membrane protein [Oryza sativa (japonica
  misc_feature (1)..(313): Homolog of NCBI NO: 13785207 NR Description: putative membrane protein [Solanum tuberosum]
  misc_feature (1)..(313): Homolog of NCBI NO: 13785211 NR Description: putative membrane protein [Solanum tuberosum]
  misc_feature (1)..(315): Homolog of NCBI NO: 13785209 NR Description: putative membrane protein [Solanum tuberosum]
  misc_feature (1)..(315): Homolog of NCBI NO: 21592781 NR Description: putative membrane protein [Arabidopsis thaliana]
  misc_feature (1)..(315): Homolog of NCBI NO: 18421491 NR Description: Expressed protein

SEQ ID NO: 33451 - DNA, 665 bp, Arabidopsis thaliana; identical to SEQ ID NO: 29861
  misc_feature (1)..(665): Ceres Seq. ID no. 13491980
  misc_feature: MA Experiment ID: 108434 Result: Up-regulated in Transcription
  misc_feature: MA Experiment 108434 PARAMETER Experiment Name: At_Root_Tips_cDNA_P Parameter: Tissue Value: Root Tips
  misc_feature: MA Experiment ID: 108462 Result: Up-regulated in Transcription
  misc_feature: MA Experiment 108462 PARAMETER Experiment Name: At_Germinating_Seeds_cDNA_P Parameter: Age (day) Value: 2 vs. 0
  misc_feature: MA Experiment 108462 PARAMETER Experiment Name: At_Germinating_Seeds_cDNA_P Parameter: Tissue Value: Germinating Seeds
  misc_feature: MA Experiment ID: 108488 Result: Down-regulated in Transcription
  misc_feature: MA Experiment ID: 108573 Result: Down-regulated in Transcription
  misc_feature: MA Experiment 108573 PARAMETER Experiment Name: At_Drought_cDNA_P Parameter: Timepoint (hr) Value: 6
  misc_feature: MA Experiment 108573 PARAMETER Experiment Name: At_Drought_cDNA_P Parameter: Tissue Value: Aerial
  misc_feature: MA Experiment 108573 PARAMETER Experiment Name: At_Drought_cDNA_P Parameter: Treatment Value: Drought vs. No Drought
  misc_feature: MA Experiment ID: 108576 Result: Down-regulated in Transcription
  misc_feature: MA Experiment 108576 PARAMETER Experiment Name: At_42deg_Heat_cDNA_P Parameter: Temperature (deg C) Value: 42 vs. 22
  misc_feature: MA Experiment 108576 PARAMETER Experiment Name: At_42deg_Heat_cDNA_P Parameter: Timepoint (hr) Value: 1
  misc_feature: MA Experiment 108576 PARAMETER Experiment Name: At_42deg_Heat_cDNA_P Parameter: Tissue Value: Aerial
  misc_feature: MA Experiment ID: 108577 Result: Down-regulated in Transcription
  misc_feature: MA Experiment 108577 PARAMETER Experiment Name: At_42deg_Heat_cDNA_P Parameter: Temperature (deg C) Value: 42 vs. 22
  misc_feature: MA Experiment 108577 PARAMETER Experiment Name: At_42deg_Heat_cDNA_P Parameter: Timepoint (hr) Value: 6
  misc_feature: MA Experiment 108577 PARAMETER Experiment Name: At_42deg_Heat_cDNA_P Parameter: Tissue Value: Aerial
  misc_feature: MA Experiment ID: 20000093 Result: Down-regulated in Transcription
  misc_feature: MA Experiment 20000093 PARAMETER Experiment Name: At_42deg_Heat_cDNA_P Parameter: Temperature (deg C) Value: 42 vs. 22
  misc_feature: MA Experiment 20000093 PARAMETER Experiment Name: At_42deg_Heat_cDNA_P Parameter: Timepoint (hr) Value: 0.5
  misc_feature: MA Experiment 20000093 PARAMETER Experiment Name: At_42deg_Heat_cDNA_P Parameter: Tissue Value: Aerial
  misc_feature: MA Experiment ID: 20000112 Result: Down-regulated in Transcription
  misc_feature: MA Experiment 20000112 PARAMETER Experiment Name: At_42deg_Heat_cDNA_P Parameter: Temperature (deg C) Value: 42 vs. 22
  misc_feature: MA Experiment 20000112 PARAMETER Experiment Name: At_42deg_Heat_cDNA_P Parameter: Timepoint (hr) Value: 2
  misc_feature: MA Experiment 20000112 PARAMETER Experiment Name: At_42deg_Heat_cDNA_P Parameter: Tissue Value: Aerial
  misc_feature: MA Experiment ID: 20000113 Result: Down-regulated in Transcription
  misc_feature: MA Experiment 20000113 PARAMETER Experiment Name: At_42deg_Heat_cDNA_P Parameter: Temperature (deg C) Value: 42 vs. 22
  misc_feature: MA Experiment 20000113 PARAMETER Experiment Name: At_42deg_Heat_cDNA_P Parameter: Timepoint (hr) Value: 8
  misc_feature: MA Experiment 20000113 PARAMETER Experiment Name: At_42deg_Heat_cDNA_P Parameter: Tissue Value: Aerial
  misc_feature: MA Experiment ID: 20000144 Result: Down-regulated in Transcription
  misc_feature: MA Experiment 20000144 PARAMETER Experiment Name: At_42deg_Heat_cDNA_P Parameter: Temperature (deg C) Value: 42 vs. 22
  misc_feature: MA Experiment 20000144 PARAMETER Experiment Name: At_42deg_Heat_cDNA_P Parameter: Timepoint (hr) Value: 1
  misc_feature: MA Experiment 20000144 PARAMETER Experiment Name: At_42deg_Heat_cDNA_P Parameter: Tissue Value: Aerial
  misc_feature: MA Experiment ID: 20000173 Result: Down-regulated in Transcription
  misc_feature: MA Experiment 20000173 PARAMETER Experiment Name: At_42deg_Heat_P Parameter: Age (day) Value: 14
  misc_feature: MA Experiment 20000173 PARAMETER Experiment Name: At_42deg_Heat_P Parameter: Organism Value: A. thaliana
  misc_feature: MA Experiment 20000173 PARAMETER Experiment Name: At_42deg_Heat_P Parameter: Plant Line Value: WS
  misc_feature: MA Experiment 20000173 PARAMETER Experiment Name: At_42deg_Heat_P Parameter: Temperature (deg C) Value: 42 vs. 22
  misc_feature: MA Experiment 20000173 PARAMETER Experiment Name: At_42deg_Heat_P Parameter: Timepoint (hr) Value: 6
  misc_feature: MA Experiment 20000173 PARAMETER Experiment Name: At_42deg_Heat_P Parameter: Tissue Value: Aerial
  misc_feature: MA Experiment ID: 20000184 Result: Up-regulated in Transcription
  misc_feature: MA Experiment 20000184 PARAMETER Experiment Name: At_Shoots__P Parameter: Age (day) Value: 7
  misc_feature: MA Experiment 20000184 PARAMETER Experiment Name: At_Shoots__P Parameter: Tissue Value: Shoots vs. Whole Plant
  misc_feature: MA Experiment ID: 20000437 Result: Down-regulated in Transcription
  misc_feature: MA Experiment 20000437 PARAMETER Experiment Name: At_Drought_P Parameter: Age (day) Value: 8
  misc_feature: MA Experiment 20000437 PARAMETER Experiment Name: At_Drought_P Parameter: Organism Value: A. thaliana
  misc_feature: MA Experiment 20000437 PARAMETER Experiment Name: At_Drought_P Parameter: Plant Line Value: WS
  misc_feature: MA Experiment 20000437 PARAMETER Experiment Name: At_Drought_P Parameter: Timepoint (hr) Value: 24
  misc_feature: MA Experiment 20000437 PARAMETER Experiment Name: At_Drought_P Parameter: Tissue Value: Whole Plant
  misc_feature: MA Experiment 20000437 PARAMETER Experiment Name: At_Drought_P Parameter: Treatment Value: Drought vs. No Drought
  misc_feature: MA Experiment ID: 20000794 Result: Up-regulated in Transcription
  misc_feature: MA Experiment 20000794 PARAMETER Experiment Name: At_Petals_P Parameter: Age (day) Value: 23-25 days
  misc_feature: MA Experiment 20000794 PARAMETER Experiment Name: At_Petals_P Parameter: Plant Line Value: WS
  misc_feature: MA Experiment 20000794 PARAMETER Experiment Name: At_Petals_P Parameter: Tissue Value: Petals vs. Whole plant
  misc_feature: MA Experiment ID: 20001555 Result: Down-regulated in Transcription
  misc_feature: MA Experiment 20001555 PARAMETER Experiment Name: At_Drought_Soil_Dry_P Parameter: Age (day) Value: 24
  misc_feature: MA Experiment 20001555 PARAMETER Experiment Name: At_Drought_Soil_Dry_P Parameter: Organism Value: A. thaliana
  misc_feature: MA Experiment 20001555 PARAMETER Experiment Name: At_Drought_Soil_Dry_P Parameter: Plant Line Value: WS
  misc_feature: MA Experiment 20001555 PARAMETER Experiment Name: At_Drought_Soil_Dry_P Parameter: Post Timepoint (hr) Value: None
  misc_feature: MA Experiment 20001555 PARAMETER Experiment Name: At_Drought_Soil_Dry_P Parameter: Post-Treatment Value: None
  misc_feature: MA Experiment 20001555 PARAMETER Experiment Name: At_Drought_Soil_Dry_P Parameter: Timepoint (day) Value: 10
  misc_feature: MA Experiment 20001555 PARAMETER Experiment Name: At_Drought_Soil_Dry_P Parameter: Treatment Value: Drought vs. No Drought
  misc_feature: MA Experiment ID: 20001556 Result: Down-regulated in Transcription
  misc_feature: MA Experiment 20001556 PARAMETER Experiment Name: At_Drought_Soil_Dry_P Parameter: Age (day) Value: 26
  misc_feature: MA Experiment 20001556 PARAMETER Experiment Name: At_Drought_Soil_Dry_P Parameter: Organism Value: A. thaliana
  misc_feature: MA Experiment 20001556 PARAMETER Experiment Name: At_Drought_Soil_Dry_P Parameter: Plant Line Value: WS
  misc_feature: MA Experiment 20001556 PARAMETER Experiment Name: At_Drought_Soil_Dry_P Parameter: Post Timepoint (hr) Value: None
  misc_feature: MA Experiment 20001556 PARAMETER Experiment Name: At_Drought_Soil_Dry_P Parameter: Post-Treatment Value: None
  misc_feature: MA Experiment 20001556 PARAMETER Experiment Name: At_Drought_Soil_Dry_P Parameter: Timepoint (day) Value: 12
  misc_feature: MA Experiment 20001556 PARAMETER Experiment Name: At_Drought_Soil_Dry_P Parameter: Treatment Value: Drought vs. No Drought
  misc_feature: MA Experiment ID: 20001559 Result: Down-regulated in Transcription
  misc_feature: MA Experiment 20001559 PARAMETER Experiment Name: At_Drought_Soil_Dry_P Parameter: Age (day) Value: 28
  misc_feature: MA Experiment 20001559 PARAMETER Experiment Name: At_Drought_Soil_Dry_P Parameter: Organism Value: A. thaliana
  misc_feature: MA Experiment 20001559 PARAMETER Experiment Name: At_Drought_Soil_Dry_P Parameter: Plant Line Value: WS
  misc_feature: MA Experiment 20001559 PARAMETER Experiment Name: At_Drought_Soil_Dry_P Parameter: Post Timepoint (hr) Value: 29
  misc_feature: MA Experiment 20001559 PARAMETER Experiment Name: At_Drought_Soil_Dry_P Parameter: Post-Treatment Value: Re-Water vs. No Drought
  misc_feature: MA Experiment 20001559 PARAMETER Experiment Name: At_Drought_Soil_Dry_P Parameter: Timepoint (day) Value: 14
  misc_feature: MA Experiment 20001559 PARAMETER Experiment Name: At_Drought_Soil_Dry_P Parameter: Treatment Value: Drought vs. No Drought
  misc_feature: MA Experiment ID: 20001905 Result: Down-regulated in Transcription
  misc_feature: MA Experiment 20001905 PARAMETER Experiment Name: At_Drought_Reproduction_P Parameter: Age (day) Value: 40
  misc_feature: MA Experiment 20001905 PARAMETER Experiment Name: At_Drought_Reproduction_P Parameter: Organism Value: A. thaliana
  misc_feature: MA Experiment 20001905 PARAMETER Experiment Name: At_Drought_Reproduction_P Parameter: Plant Line Value: WS
  misc_feature: MA Experiment 20001905 PARAMETER Experiment Name: At_Drought_Reproduction_P Parameter: Timepoint (day) Value: 10
  misc_feature: MA Experiment 20001905 PARAMETER Experiment Name: At_Drought_Reproduction_P Parameter: Tissue Value: Rosettes
  misc_feature: MA Experiment 20001905 PARAMETER Experiment Name: At_Drought_Reproduction_P Parameter: Treatment Value: Drought vs. No Drought
  misc_feature: MA Experiment ID: 20001911 Result: Down-regulated in Transcription
  misc_feature: MA Experiment 20001911 PARAMETER Experiment Name: At_Drought_Reproduction_P Parameter: Age (day) Value: 40
  misc_feature: MA Experiment 20001911 PARAMETER Experiment Name: At_Drought_Reproduction_P Parameter: Organism Value: A. thaliana
  misc_feature: MA Experiment 20001911 PARAMETER Experiment Name: At_Drought_Reproduction_P Parameter: Plant Line Value: WS
  misc_feature: MA Experiment 20001911 PARAMETER Experiment Name: At_Drought_Reproduction_P Parameter: Timepoint (day) Value: 10
  misc_feature: MA Experiment 20001911 PARAMETER Experiment Name: At_Drought_Reproduction_P Parameter: Tissue Value: Flowers
  misc_feature: MA Experiment 20001911 PARAMETER Experiment Name: At_Drought_Reproduction_P Parameter: Treatment Value: Drought vs. No Drought

SEQ ID NO: 33452 - protein, 131 aa, Arabidopsis thaliana; identical to SEQ ID NO: 29862
  peptide (1)..(131): Ceres Seq. ID no. 13491981
  misc_feature (4)..(121): Pfam Name: Core histone H2A/H2B/H3/H4 Pfam Description: Core histone H2A/H2B/H3/H4
  misc_feature (1)..(131): Homolog of NCBI NO: 7439702 NR Description: histone H2A (clone TH254) - wheat
  misc_feature (1)..(131): Homolog of NCBI NO: 34393263 NR Description: histone H2A [Oryza sativa (japonica
  misc_feature (1)..(125): Homolog of NCBI NO: 34393264 NR Description: putative histone H2A [Oryza sativa (japonica
  misc_feature (1)..(131): Homolog of NCBI NO: 2130105 NR Description: histone H2A.4 - wheat
  misc_feature (1)..(125): Homolog of NCBI NO: 29837243 NR Description: putative histone H2A [Oryza sativa (japonica
  misc_feature (1)..(131): Homolog of NCBI NO: 15232330 NR Description: histone H2A, putative [Arabidopsis thaliana]
  misc_feature (1)..(131): Homolog of NCBI NO: 15223708 NR Description: histone H2A, putative [Arabidopsis thaliana]
  misc_feature (1)..(130): Homolog of NCBI NO: 15239697 NR Description: histone H2A [Arabidopsis thaliana]
  misc_feature (1)..(131): Homolog of NCBI NO: 21617982 NR Description: histone H2A-like protein [Arabidopsis thaliana]
  misc_feature (1)..(131): Homolog of NCBI NO: 15237024 NR Description: histone H2A, putative [Arabidopsis thaliana]

SEQ ID NO: 33453 - protein, 65 aa, Arabidopsis thaliana; identical to SEQ ID NO: 29863
  peptide (1)..(65): Ceres Seq. ID no. 13491982

SEQ ID NO: 33454 - DNA, 2799 bp, Arabidopsis thaliana; identical to SEQ ID NO: 29864
  misc_feature (1)..(2799): Ceres Seq. ID no. 12329264
  misc_feature: MA Experiment ID: 108561 Result: Up-regulated in Transcription
  misc_feature: MA Experiment 108561 PARAMETER Experiment Name: At_100uM_ABA_cDNA_P Parameter: Timepoint (hr) Value: 6
  misc_feature: MA Experiment 108561 PARAMETER Experiment Name: At_100uM_ABA_cDNA_P Parameter: Tissue Value: Aerial
  misc_feature: MA Experiment 108561 PARAMETER Experiment Name: At_100uM_ABA_cDNA_P Parameter: Treatment Value: 100uM ABA vs. No Treatment
  misc_feature: MA Experiment ID: 108572 Result: Up-regulated in Transcription
  misc_feature: MA Experiment 108572 PARAMETER Experiment Name: At_Drought_cDNA_P Parameter: Timepoint (hr) Value: 1
  misc_feature: MA Experiment 108572 PARAMETER Experiment Name: At_Drought_cDNA_P Parameter: Tissue Value: Aerial
  misc_feature: MA Experiment 108572 PARAMETER Experiment Name: At_Drought_cDNA_P Parameter: Treatment Value: Drought vs. No Drought
  misc_feature: MA Experiment ID: 108573 Result: Up-regulated in Transcription
  misc_feature: MA Experiment 108573 PARAMETER Experiment Name: At_Drought_cDNA_P Parameter: Timepoint (hr) Value: 6
  misc_feature: MA Experiment 108573 PARAMETER Experiment Name: At_Drought_cDNA_P Parameter: Tissue Value: Aerial
  misc_feature: MA Experiment 108573 PARAMETER Experiment Name: At_Drought_cDNA_P Parameter: Treatment Value: Drought vs. No Drought
  misc_feature: MA Experiment ID: 108585 Result: Up-regulated in Transcription
  misc_feature: MA Experiment 108585 PARAMETER Experiment Name: At_5mM_NaNP_cDNA_P Parameter: Timepoint (hr) Value: 6
  misc_feature: MA Experiment 108585 PARAMETER Experiment Name: At_5mM_NaNP_cDNA_P Parameter: Tissue Value: Aerial
  misc_feature: MA Experiment 108585 PARAMETER Experiment Name: At_5mM_NaNP_cDNA_P Parameter: Treatment Value: null
  misc_feature: MA Experiment ID: 108595 Result: Up-regulated in Transcription
  misc_feature: MA Experiment 108595 PARAMETER Experiment Name: At_Ler-pi_Ovule_cDNA_P Parameter: Plant Line Value: null
  misc_feature: MA Experiment ID: 108668 Result: Up-regulated in Transcription
  misc_feature: MA Experiment 108668 PARAMETER Experiment Name: At_2mM_SA_cDNA_P Parameter: Plant Line Value: WS
  misc_feature: MA Experiment 108668 PARAMETER Experiment Name: At_2mM_SA_cDNA_P Parameter: Timepoint (hr) Value: 6
  misc_feature: MA Experiment 108668 PARAMETER Experiment Name: At_2mM_SA_cDNA_P Parameter: Treatment Value: 2mM SA vs. No Treatment
  misc_feature: MA Experiment ID: 20000166 Result: Up-regulated in Transcription
  misc_feature: MA Experiment 20000166 PARAMETER Experiment Name: At_100uM_ABA_P Parameter: Age (day) Value: 14
  misc_feature: MA Experiment 20000166 PARAMETER Experiment Name: At_100uM_ABA_P Parameter: Organism Value: A. thaliana
  misc_feature: MA Experiment 20000166 PARAMETER Experiment Name: At_100uM_ABA_P Parameter: Plant Line Value: WS
  misc_feature: MA Experiment 20000166 PARAMETER Experiment Name: At_100uM_ABA_P Parameter: Timepoint (hr) Value: 1
  misc_feature: MA Experiment 20000166 PARAMETER Experiment Name: At_100uM_ABA_P Parameter: Tissue Value: Aerial
  misc_feature: MA Experiment 20000166 PARAMETER Experiment Name: At_100uM_ABA_P Parameter: Treatment Value: 100uM ABA vs. No Treatment
  misc_feature: MA Experiment ID: 20000169 Result: Up-regulated in Transcription
  misc_feature: MA Experiment 20000169 PARAMETER Experiment Name: At_100uM_ABA_P Parameter: Age (day) Value: 14
  misc_feature: MA Experiment 20000169 PARAMETER Experiment Name: At_100uM_ABA_P Parameter: Organism Value: A. thaliana
  misc_feature: MA Experiment 20000169 PARAMETER Experiment Name: At_100uM_ABA_P Parameter: Plant Line Value: WS
  misc_feature: MA Experiment 20000169 PARAMETER Experiment Name: At_100uM_ABA_P Parameter: Timepoint (hr) Value: 6
  misc_feature: MA Experiment 20000169 PARAMETER Experiment Name: At_100uM_ABA_P Parameter: Tissue Value: Aerial
  misc_feature: MA Experiment 20000169 PARAMETER Experiment Name: At_100uM_ABA_P Parameter: Treatment Value: 100uM ABA vs. No Treatment
  misc_feature: MA Experiment ID: 20000182 Result: Up-regulated in Transcription
  misc_feature: MA Experiment 20000182 PARAMETER Experiment Name: At_2mM_SA_P Parameter: Age (day) Value: 14
  misc_feature: MA Experiment 20000182 PARAMETER Experiment Name: At_2mM_SA_P Parameter: Organism Value: A. thaliana
  misc_feature: MA Experiment 20000182 PARAMETER Experiment Name: At_2mM_SA_P Parameter: Plant Line Value: WS
  misc_feature: MA Experiment 20000182 PARAMETER Experiment Name: At_2mM_SA_P Parameter: Timepoint (hr) Value: 6
  misc_feature: MA Experiment 20000182 PARAMETER Experiment Name: At_2mM_SA_P Parameter: Tissue Value: Aerial
  misc_feature: MA Experiment 20000182 PARAMETER Experiment Name: At_2mM_SA_P Parameter: Treatment Value: 2mM SA vs. No Treatment
  misc_feature: MA Experiment ID: 20000184 Result: Down-regulated in Transcription
  misc_feature: MA Experiment 20000184 PARAMETER Experiment Name: At_Shoots__P Parameter: Age (day) Value: 7
  misc_feature: MA Experiment 20000184 PARAMETER Experiment Name: At_Shoots__P Parameter: Tissue Value: Shoots vs. Whole Plant
  misc_feature: MA Experiment ID: 20000185 Result: Up-regulated in Transcription
  misc_feature: MA Experiment 20000185 PARAMETER Experiment Name: At_Roots__P Parameter: Age (day) Value: 7 vs. 21
  misc_feature: MA Experiment 20000185 PARAMETER Experiment Name: At_Roots__P Parameter: Organism Value: A. thaliana
  misc_feature: MA Experiment 20000185 PARAMETER Experiment Name: At_Roots__P Parameter: Tissue Value: Roots vs. Whole Plant
  misc_feature: MA Experiment ID: 20000234 Result: Down-regulated in Transcription
  misc_feature: MA Experiment 20000234 PARAMETER Experiment Name: At_Siliques_P Parameter: Age (day) Value: 21
  misc_feature: MA Experiment 20000234 PARAMETER Experiment Name: At_Siliques_P Parameter: Organism Value: A. thaliana
  misc_feature: MA Experiment 20000234 PARAMETER Experiment Name: At_Siliques_P Parameter: Plant Line Value: WS
  misc_feature: MA Experiment 20000234 PARAMETER Experiment Name: At_Siliques_P Parameter: Tissue Value: Less Than 5mm Siliques vs. Whole Plant
  misc_feature: MA Experiment ID: 20000235 Result: Down-regulated in Transcription
  misc_feature: MA Experiment 20000235 PARAMETER Experiment Name: At_Siliques_P Parameter: Age (day) Value: 21
  misc_feature: MA Experiment 20000235 PARAMETER Experiment Name: At_Siliques_P Parameter: Organism Value: A. thaliana
  misc_feature: MA Experiment 20000235 PARAMETER Experiment Name: At_Siliques_P Parameter: Plant Line Value: WS
  misc_feature: MA Experiment 20000235 PARAMETER Experiment Name: At_Siliques_P Parameter: Tissue Value: 5-10mm Siliques vs. Whole Plant
  misc_feature: MA Experiment ID: 20000264 Result: Up-regulated in Transcription
  misc_feature: MA Experiment 20000264 PARAMETER Experiment Name: At_Open_Flower_P Parameter: Age (day) Value: 21
  misc_feature: MA Experiment 20000264 PARAMETER Experiment Name: At_Open_Flower_P Parameter: Plant Line Value: WS
  misc_feature: MA Experiment 20000264 PARAMETER Experiment Name: At_Open_Flower_P Parameter: Tissue Value: Open Flower vs. Whole Plant
  misc_feature: MA Experiment ID: 20000267 Result: Up-regulated in Transcription
  misc_feature: MA Experiment 20000267 PARAMETER Experiment Name: At_Drought_P Parameter: Age (day) Value: 7
  misc_feature: MA Experiment 20000267 PARAMETER Experiment Name: At_Drought_P Parameter: Organism Value: A. thaliana
  misc_feature: MA Experiment 20000267 PARAMETER Experiment Name: At_Drought_P Parameter: Plant Line Value: WS
  misc_feature: MA Experiment 20000267 PARAMETER Experiment Name: At_Drought_P Parameter: Timepoint (hr) Value: 6
  misc_feature: MA Experiment 20000267 PARAMETER Experiment Name: At_Drought_P Parameter: Tissue Value: Whole Plant
  misc_feature: MA Experiment 20000267 PARAMETER Experiment Name: At_Drought_P Parameter: Treatment Value: Drought vs. No Drought
  misc_feature: MA Experiment ID: 20000268 Result: Up-regulated in Transcription
  misc_feature: MA Experiment 20000268 PARAMETER Experiment Name: At_100mM_NaCl__P Parameter: Age (day) Value: 14
  misc_feature: MA Experiment 20000268 PARAMETER Experiment Name: At_100mM_NaCl__P Parameter: Organism Value: A. thaliana
  misc_feature: MA Experiment 20000268 PARAMETER Experiment Name: At_100mM_NaCl__P Parameter: Plant Line Value: WS
  misc_feature: MA Experiment 20000268 PARAMETER Experiment Name: At_100mM_NaCl__P Parameter: Timepoint (hr) Value: 6
  misc_feature: MA Experiment 20000268 PARAMETER Experiment Name: At_100mM_NaCl__P Parameter: Tissue Value: Whole Plant
  misc_feature: MA Experiment 20000268 PARAMETER Experiment Name: At_100mM_NaCl__P Parameter: Treatment Value: 100mM NaCl vs. No Treatment
  misc_feature: MA Experiment ID: 20000436 Result: Up-regulated in Transcription
  misc_feature: MA Experiment 20000436 PARAMETER Experiment Name: At_Drought_P Parameter: Age (day) Value: 7
  misc_feature: MA Experiment 20000436 PARAMETER Experiment Name: At_Drought_P Parameter: Organism Value: A. thaliana
  misc_feature: MA Experiment 20000436 PARAMETER Experiment Name: At_Drought_P Parameter: Plant Line Value: WS
  misc_feature: MA Experiment 20000436 PARAMETER Experiment Name: At_Drought_P Parameter: Timepoint (hr) Value: 12
  misc_feature: MA Experiment 20000436 PARAMETER Experiment Name: At_Drought_P Parameter: Tissue Value: Whole Plant
  misc_feature: MA Experiment 20000436 PARAMETER Experiment Name: At_Drought_P Parameter: Treatment Value: Drought vs. No Drought
  misc_feature: MA Experiment ID: 20000437 Result: Up-regulated in Transcription
  misc_feature: MA Experiment 20000437 PARAMETER Experiment Name: At_Drought_P Parameter: Age (day) Value: 8
  misc_feature: MA Experiment 20000437 PARAMETER Experiment Name: At_Drought_P Parameter: Organism Value: A. thaliana
  misc_feature: MA Experiment 20000437 PARAMETER Experiment Name: At_Drought_P Parameter: Plant Line Value: WS
  misc_feature: MA Experiment 20000437 PARAMETER Experiment Name: At_Drought_P Parameter: Timepoint (hr) Value: 24
  misc_feature: MA Experiment 20000437 PARAMETER Experiment Name: At_Drought_P Parameter: Tissue Value: Whole Plant
  misc_feature: MA Experiment 20000437 PARAMETER Experiment Name: At_Drought_P Parameter: Treatment Value: Drought vs. No Drought
  misc_feature: MA Experiment ID: 20000438 Result: Down-regulated in Transcription
  misc_feature: MA Experiment 20000438 PARAMETER Experiment Name: At_Shoots__P Parameter: Age (day) Value: 14
  misc_feature: MA Experiment 20000438 PARAMETER Experiment Name: At_Shoots__P Parameter: Tissue Value: Shoots vs. Whole Plant
  misc_feature: MA Experiment ID: 20000445 Result: Up-regulated in Transcription
  misc_feature: MA Experiment 20000445 PARAMETER Experiment Name: At_100uM_NAA__P Parameter: Age (day) Value: 14
  misc_feature: MA Experiment 20000445 PARAMETER Experiment Name: At_100uM_NAA__P Parameter: Organism Value: A. thaliana
  misc_feature: MA Experiment 20000445 PARAMETER Experiment Name: At_100uM_NAA__P Parameter: Plant Line Value: WS
  misc_feature: MA Experiment 20000445 PARAMETER Experiment Name: At_100uM_NAA__P Parameter: Timepoint (hr) Value: 6
  misc_feature: MA Experiment 20000445 PARAMETER Experiment Name: At_100uM_NAA__P Parameter: Tissue Value: Aerial
  misc_feature: MA Experiment 20000445 PARAMETER Experiment Name: At_100uM_NAA__P Parameter: Treatment Value: 100uM NAA vs. No Treatment
  misc_feature: MA Experiment ID: 20000453 Result: Up-regulated in Transcription
  misc_feature: MA Experiment 20000453 PARAMETER Experiment Name: At_100uM_ABA_P Parameter: Age (day) Value: 15
  misc_feature: MA Experiment 20000453 PARAMETER Experiment Name: At_100uM_ABA_P Parameter: Organism Value: A. thaliana
  misc_feature: MA Experiment 20000453 PARAMETER Experiment Name: At_100uM_ABA_P Parameter: Plant Line Value: WS
  misc_feature: MA Experiment 20000453 PARAMETER Experiment Name: At_100uM_ABA_P Parameter: Timepoint (hr) Value: 24
  misc_feature: MA Experiment 20000453 PARAMETER Experiment Name: At_100uM_ABA_P Parameter: Tissue Value: Aerial
  misc_feature: MA Experiment 20000453 PARAMETER Experiment Name: At_100uM_ABA_P Parameter: Treatment Value: 100uM ABA vs. No Treatment
  misc_feature: MA Experiment ID: 20000527 Result: Down-regulated in Transcription
  misc_feature: MA Experiment 20000527 PARAMETER Experiment Name: At_10percent_PEG_P Parameter: Age (day) Value: 20
  misc_feature: MA Experiment 20000527 PARAMETER Experiment Name: At_10percent_PEG_P Parameter: Organism Value: A. thaliana
  misc_feature: MA Experiment 20000527 PARAMETER Experiment Name: At_10percent_PEG_P Parameter: Plant Line Value: WS
  misc_feature: MA Experiment 20000527 PARAMETER Experiment Name: At_10percent_PEG_P Parameter: Timepoint (day) Value: 20
  misc_feature: MA Experiment 20000527 PARAMETER Experiment Name: At_10percent_PEG_P Parameter: Tissue Value: Whole Plant
  misc_feature: MA Experiment 20000527 PARAMETER Experiment Name: At_10percent_PEG_P Parameter: Treatment Value: 10percent PEG vs. No Treatment
  misc_feature: MA Experiment ID: 20000794 Result: Up-regulated in Transcription
  misc_feature: MA Experiment 20000794 PARAMETER Experiment Name: At_Petals_P Parameter: Age (day) Value: 23-25 days
  misc_feature: MA Experiment 20000794 PARAMETER Experiment Name: At_Petals_P Parameter: Plant Line Value: WS
  misc_feature: MA Experiment 20000794 PARAMETER Experiment Name: At_Petals_P Parameter: Tissue Value: Petals vs. Whole plant
  misc_feature: MA Experiment ID: 20001757 Result: Down-regulated in Transcription
  misc_feature: MA Experiment 20001757 PARAMETER Experiment Name: At_50mM_NH4NO3_L-to-H_P Parameter: Timepoint (hr) Value: 6
  misc_feature: MA Experiment 20001757 PARAMETER Experiment Name: At_50mM_NH4NO3_L-to-H_P Parameter: Tissue Value: Leaf
  misc_feature: MA Experiment 20001757 PARAMETER Experiment Name: At_50mM_NH4NO3_L-to-H_P Parameter: Treatment Value: 50mM NH4NO3 vs 100mM Mannitol
  misc_feature: MA Experiment ID: 20001904 Result: Up-regulated in Transcription
  misc_feature: MA Experiment 20001904 PARAMETER Experiment Name: At_Drought_Reproduction_P Parameter: Age (day) Value: 37
  misc_feature: MA Experiment 20001904 PARAMETER Experiment Name: At_Drought_Reproduction_P Parameter: Organism Value: A. thaliana
  misc_feature: MA Experiment 20001904 PARAMETER Experiment Name: At_Drought_Reproduction_P Parameter: Plant Line Value: WS
  misc_feature: MA Experiment 20001904 PARAMETER Experiment Name: At_Drought_Reproduction_P Parameter: Timepoint (day) Value: 7
  misc_feature: MA Experiment 20001904 PARAMETER Experiment Name: At_Drought_Reproduction_P Parameter: Tissue Value: Rosettes
  misc_feature: MA Experiment 20001904 PARAMETER Experiment Name: At_Drought_Reproduction_P Parameter: Treatment Value: Drought vs. No Drought
  misc_feature: MA Experiment ID: 20001906 Result: Up-regulated in Transcription
  misc_feature: MA Experiment 20001906 PARAMETER Experiment Name: At_Drought_Reproduction_P Parameter: Age (day) Value: 35
  misc_feature: MA Experiment 20001906 PARAMETER Experiment Name: At_Drought_Reproduction_P Parameter: Organism Value: A. thaliana
  misc_feature: MA Experiment 20001906 PARAMETER Experiment Name: At_Drought_Reproduction_P Parameter: Plant Line Value: WS
  misc_feature: MA Experiment 20001906 PARAMETER Experiment Name: At_Drought_Reproduction_P Parameter: Timepoint (day) Value: 5
  misc_feature: MA Experiment 20001906 PARAMETER Experiment Name: At_Drought_Reproduction_P Parameter: Tissue Value: Siliques
  misc_feature: MA Experiment 20001906 PARAMETER Experiment Name: At_Drought_Reproduction_P Parameter: Treatment Value: Drought vs. No Drought
  misc_feature: MA Experiment ID: 20001908 Result: Up-regulated in Transcription
  misc_feature: MA Experiment 20001908 PARAMETER Experiment Name: At_Drought_Reproduction_P Parameter: Age (day) Value: 40
  misc_feature: MA Experiment 20001908 PARAMETER Experiment Name: At_Drought_Reproduction_P Parameter: Organism Value: A. thaliana
  misc_feature: MA Experiment 20001908 PARAMETER Experiment Name: At_Drought_Reproduction_P Parameter: Plant Line Value: WS
  misc_feature: MA Experiment 20001908 PARAMETER Experiment Name: At_Drought_Reproduction_P Parameter: Timepoint (day) Value: 10
  misc_feature: MA Experiment 20001908 PARAMETER Experiment Name: At_Drought_Reproduction_P Parameter: Tissue Value: Siliques
  misc_feature: MA Experiment 20001908 PARAMETER Experiment Name: At_Drought_Reproduction_P Parameter: Treatment Value: Drought vs. No Drought

SEQ ID NO: 33455 - protein, 378 aa, Arabidopsis thaliana; identical to SEQ ID NO: 29865
  peptide (1)..(378): Ceres Seq. ID no. 12329265
  misc_feature (33)..(366): Pfam Name: NAD dependent epimerase/dehydratase family Pfam Description: NAD dependent epimerase/dehydratase family
  misc_feature (33)..(366): Pfam Name: NAD dependent epimerase/dehydratase family Pfam Description: NAD dependent epimerase/dehydratase family
  misc_feature (3)..(369): Homolog of NCBI NO: 9965188 NR Description: UDP-glucose 4-epimerase [Moraxella catarrhalis]
  misc_feature (29)..(373): Homolog of NCBI NO: 30186144 NR Description: Unknown (protein for MGC:53114) [Xenopus laevis]
  misc_feature (27)..(369): Homolog of NCBI NO: 11386762 NR Description: UDP-glucose 4-epimerase (Galactowaldenase)
  misc_feature (29)..(372): Homolog of NCBI NO: 15217653 NR Description: UDP-galactose 4-epimerase, putative; protein id:
  misc_feature (28)..(378): Homolog of NCBI NO: 11386775 NR Description: UDP-glucose 4-epimerase GEPI48 (Galactowaldenase)
  misc_feature (3)..(369): Homolog of NCBI NO: 9965188 NR Description: UDP-glucose 4-epimerase [Moraxella catarrhalis]
  misc_feature (27)..(369): Homolog of NCBI NO: 11386762 NR Description: UDP-glucose 4-epimerase (Galactowaldenase)
  misc_feature (28)..(378): Homolog of NCBI NO: 11386775 NR Description: UDP-glucose 4-epimerase GEPI48 (Galactowaldenase)
  misc_feature (28)..(378): Homolog of NCBI NO: 15236988 NR Description: UDP-galactose 4-epimerase - like protein
  misc_feature (29)..(378): Homolog of NCBI NO: 12643850 NR Description: Probable UDP-glucose 4-epimerase At4g10960
  misc_feature (29)..(378): Homolog of NCBI NO: 21553659 NR Description: UDP-galactose 4-epimerase-like protein
  misc_feature (29)..(377): Homolog of NCBI NO: 15236663 NR Description: UDPglucose 4-epimerase - like protein
  misc_feature (29)..(377): Homolog of NCBI NO: 21536846 NR Description: UDPglucose 4-epimerase-like protein [Arabidopsis
  misc_feature (29)..(372): Homolog of NCBI NO: 15217653 NR Description: UDP-galactose 4-epimerase, putative; protein id:
  misc_feature (29)..(373): Homolog of NCBI NO: 30186144 NR Description: Unknown (protein for MGC:53114) [Xenopus laevis]
  misc_feature (29)..(377): Homolog of NCBI NO: 21536846 NR Description: UDPglucose 4-epimerase-like protein [Arabidopsis
  misc_feature (29)..(377): Homolog of NCBI NO: 15236663 NR Description: UDPglucose 4-epimerase - like protein
  misc_feature (29)..(378): Homolog of NCBI NO: 21553659 NR Description: UDP-galactose 4-epimerase-like protein
  misc_feature (29)..(378): Homolog of NCBI NO: 12643850 NR Description: Probable UDP-glucose 4-epimerase At4g10960
  misc_feature (28)..(378): Homolog of NCBI NO: 15236988 NR Description: UDP-galactose 4-epimerase - like protein

SEQ ID NO: 33456 - protein, 351 aa, Arabidopsis thaliana; identical to SEQ ID NO: 29866
  peptide (1)..(351): Ceres Seq. ID no. 12329266
  misc_feature (6)..(339): Pfam Name: NAD dependent epimerase/dehydratase family Pfam Description: NAD dependent epimerase/dehydratase family
  misc_feature (6)..(339): Pfam Name: NAD dependent epimerase/dehydratase family Pfam Description: NAD dependent epimerase/dehydratase family
  misc_feature (1)..(342): Homolog of NCBI NO: 9965188 NR Description: UDP-glucose 4-epimerase [Moraxella catarrhalis]
  misc_feature (2)..(346): Homolog of NCBI NO: 30186144 NR Description: Unknown (protein for MGC:53114) [Xenopus laevis]
  misc_feature (1)..(342): Homolog of NCBI NO: 11386762 NR Description: UDP-glucose 4-epimerase (Galactowaldenase)
  misc_feature (2)..(345): Homolog of NCBI NO: 15217653 NR Description: UDP-galactose 4-epimerase, putative; protein id:
  misc_feature (1)..(351): Homolog of NCBI NO: 11386775 NR Description: UDP-glucose 4-epimerase GEPI48 (Galactowaldenase)
  misc_feature (1)..(342): Homolog of NCBI NO: 9965188 NR Description: UDP-glucose 4-epimerase [Moraxella catarrhalis]
  misc_feature (1)..(342): Homolog of NCBI NO: 11386762 NR Description: UDP-glucose 4-epimerase (Galactowaldenase)
  misc_feature (1)..(351): Homolog of NCBI NO: 11386775 NR Description: UDP-glucose 4-epimerase GEPI48 (Galactowaldenase)
  misc_feature (1)..(351): Homolog of NCBI NO: 15236988 NR Description: UDP-galactose 4-epimerase - like protein
  misc_feature (2)..(351): Homolog of NCBI NO: 12643850 NR Description: Probable UDP-glucose 4-epimerase At4g10960
  misc_feature (2)..(351): Homolog of NCBI NO: 21553659 NR Description: UDP-galactose 4-epimerase-like protein
  misc_feature (2)..(350): Homolog of NCBI NO: 15236663 NR Description: UDPglucose 4-epimerase - like protein
  misc_feature (2)..(350): Homolog of NCBI NO: 21536846 NR Description: UDPglucose 4-epimerase-like protein [Arabidopsis
  misc_feature (2)..(345): Homolog of NCBI NO: 15217653 NR Description: UDP-galactose 4-epimerase, putative; protein id:
  misc_feature (2)..(346): Homolog of NCBI NO: 30186144 NR Description: Unknown (protein for MGC:53114) [Xenopus laevis]
  misc_feature (2)..(350): Homolog of NCBI NO: 21536846 NR Description: UDPglucose 4-epimerase-like protein [Arabidopsis
  misc_feature (2)..(350): Homolog of NCBI NO: 15236663 NR Description: UDPglucose 4-epimerase - like protein
  misc_feature (2)..(351): Homolog of NCBI NO: 21553659 NR Description: UDP-galactose 4-epimerase-like protein
  misc_feature (2)..(351): Homolog of NCBI NO: 12643850 NR Description: Probable UDP-glucose 4-epimerase At4g10960
  misc_feature (1)..(351): Homolog of NCBI NO: 15236988 NR Description: UDP-galactose 4-epimerase - like protein

SEQ ID NO: 33457 - protein, 350 aa, Arabidopsis thaliana; identical to SEQ ID NO: 29867
  peptide (1)..(350): Ceres Seq. ID no. 12329267
  misc_feature (5)..(338): Pfam Name: NAD dependent epimerase/dehydratase family Pfam Description: NAD dependent epimerase/dehydratase family
  misc_feature (5)..(338): Pfam Name: NAD dependent epimerase/dehydratase family Pfam Description: NAD dependent epimerase/dehydratase family
  misc_feature (1)..(341): Homolog of NCBI NO: 9965188 NR Description: UDP-glucose 4-epimerase [Moraxella catarrhalis]
  misc_feature (1)..(345): Homolog of NCBI NO: 30186144 NR Description: Unknown (protein for MGC:53114) [Xenopus laevis]
  misc_feature (1)..(341): Homolog of NCBI NO: 11386762 NR Description: UDP-glucose 4-epimerase (Galactowaldenase)
  misc_feature (1)..(344): Homolog of NCBI NO: 15217653 NR Description: UDP-galactose 4-epimerase, putative; protein id:
  misc_feature (1)..(350): Homolog of NCBI NO: 11386775 NR Description: UDP-glucose 4-epimerase GEPI48 (Galactowaldenase)
  misc_feature (1)..(341): Homolog of NCBI NO: 9965188 NR Description: UDP-glucose 4-epimerase [Moraxella catarrhalis]
  misc_feature (1)..(341): Homolog of NCBI NO: 11386762 NR Description: UDP-glucose 4-epimerase (Galactowaldenase)
  misc_feature (1)..(350): Homolog of NCBI NO: 11386775 NR Description: UDP-glucose 4-epimerase GEPI48 (Galactowaldenase)
  misc_feature (1)..(350): Homolog of NCBI NO: 15236988 NR Description: UDP-galactose 4-epimerase - like protein
  misc_feature (1)..(350): Homolog of NCBI NO: 12643850 NR Description: Probable UDP-glucose 4-epimerase At4g10960
  misc_feature (1)..(350): Homolog of NCBI NO: 21553659 NR Description: UDP-galactose 4-epimerase-like protein
  misc_feature (1)..(349): Homolog of NCBI NO: 15236663 NR Description: UDPglucose 4-epimerase - like protein
  misc_feature (1)..(349): Homolog of NCBI NO: 21536846 NR Description: UDPglucose 4-epimerase-like protein [Arabidopsis
  misc_feature (1)..(344): Homolog of NCBI NO: 15217653 NR Description: UDP-galactose 4-epimerase, putative; protein id:
  misc_feature (1)..(345): Homolog of NCBI NO: 30186144 NR Description: Unknown (protein for MGC:53114) [Xenopus laevis]
  misc_feature (1)..(349): Homolog of NCBI NO: 21536846 NR Description: UDPglucose 4-epimerase-like protein [Arabidopsis
  misc_feature (1)..(349): Homolog of NCBI NO: 15236663 NR Description: UDPglucose 4-epimerase - like protein
  misc_feature (1)..(350): Homolog of NCBI NO: 21553659 NR Description: UDP-galactose 4-epimerase-like protein
  misc_feature (1)..(350): Homolog of NCBI NO: 12643850 NR Description: Probable UDP-glucose 4-epimerase At4g10960
  misc_feature (1)..(350): Homolog of NCBI NO: 15236988 NR Description: UDP-galactose 4-epimerase - like protein

SEQ ID NO: 33458 - DNA, 1144 bp, Arabidopsis thaliana; identical to SEQ ID NO: 29868
  misc_feature (1)..(1144): Ceres Seq. ID no. 13490483
  misc_feature: MA Experiment ID: 108434 Result: Up-regulated in Transcription
  misc_feature: MA Experiment 108434 PARAMETER Experiment Name: At_Root_Tips_cDNA_P Parameter: Tissue Value: Root Tips
  misc_feature: MA Experiment ID: 108435 Result: Down-regulated in Transcription
  misc_feature: MA Experiment 108435 PARAMETER Experiment Name: At_stm_Mutants_cDNA_P Parameter: Plant Line Value: wt Landsburg vs stm
  misc_feature: MA Experiment 108435 PARAMETER Experiment Name: At_stm_Mutants_cDNA_P Parameter: Tissue Value: Shoot Apical Meristem Region
  misc_feature: MA Experiment ID: 108461 Result: Up-regulated in Transcription
  misc_feature: MA Experiment 108461 PARAMETER Experiment Name: At_Germinating_Seeds_cDNA_P Parameter: Age (day) Value: 1 vs. 0
  misc_feature: MA Experiment 108461 PARAMETER Experiment Name: At_Germinating_Seeds_cDNA_P Parameter: Tissue Value: Germinating Seeds
  misc_feature: MA Experiment ID: 108462 Result: Up-regulated in Transcription
  misc_feature: MA Experiment 108462 PARAMETER Experiment Name: At_Germinating_Seeds_cDNA_P Parameter: Age (day) Value: 2 vs. 0
  misc_feature: MA Experiment 108462 PARAMETER Experiment Name: At_Germinating_Seeds_cDNA_P Parameter: Tissue Value: Germinating Seeds
  misc_feature: MA Experiment ID: 108595 Result: Down-regulated in Transcription
  misc_feature: MA Experiment 108595 PARAMETER Experiment Name: At_Ler-pi_Ovule_cDNA_P Parameter: Plant Line Value: null
  misc_feature: MA Experiment ID: 20000070 Result: Down-regulated in Transcription
  misc_feature: MA Experiment 20000070 PARAMETER Experiment Name: At_100uM_ABA_Mutants_cDNA_P Parameter: Plant Line Value: CS24
  misc_feature: MA Experiment 20000070 PARAMETER Experiment Name: At_100uM_ABA_Mutants_cDNA_P Parameter: Timepoint (hr) Value: 6
  misc_feature: MA Experiment 20000070 PARAMETER Experiment Name: At_100uM_ABA_Mutants_cDNA_P Parameter: Tissue Value: Aerial
  misc_feature: MA Experiment 20000070 PARAMETER Experiment Name: At_100uM_ABA_Mutants_cDNA_P Parameter: Treatment Value: 100uM ABA vs. No Treatment
  misc_feature: MA Experiment ID: 20000087 Result: Down-regulated in Transcription
  misc_feature: MA Experiment 20000087 PARAMETER Experiment Name: At_100uM_ABA_Mutants_cDNA_P Parameter: Plant Line Value: WS
  misc_feature: MA Experiment 20000087 PARAMETER Experiment Name: At_100uM_ABA_Mutants_cDNA_P Parameter: Timepoint (hr) Value: 6
  misc_feature: MA Experiment 20000087 PARAMETER Experiment Name: At_100uM_ABA_Mutants_cDNA_P Parameter: Tissue Value: Aerial
  misc_feature: MA Experiment 20000087 PARAMETER Experiment Name: At_100uM_ABA_Mutants_cDNA_P Parameter: Treatment Value: 100uM ABA vs. No Treatment
  misc_feature: MA Experiment ID: 20000088 Result: Down-regulated in Transcription
  misc_feature: MA Experiment 20000088 PARAMETER Experiment Name: At_100uM_ABA_Mutants_cDNA_P Parameter: Plant Line Value: Landsberg
  misc_feature: MA Experiment 20000088 PARAMETER Experiment Name: At_100uM_ABA_Mutants_cDNA_P Parameter: Timepoint (hr) Value: 6
  misc_feature: MA Experiment 20000088 PARAMETER Experiment Name: At_100uM_ABA_Mutants_cDNA_P Parameter: Tissue Value: Aerial
  misc_feature: MA Experiment 20000088 PARAMETER Experiment Name: At_100uM_ABA_Mutants_cDNA_P Parameter: Treatment Value: 100uM ABA vs. No Treatment
  misc_feature: MA Experiment ID: 20000113 Result: Up-regulated in Transcription
  misc_feature: MA Experiment 20000113 PARAMETER Experiment Name: At_42deg_Heat_cDNA_P Parameter: Temperature (deg C) Value: 42 vs. 22
  misc_feature: MA Experiment 20000113 PARAMETER Experiment Name: At_42deg_Heat_cDNA_P Parameter: Timepoint (hr) Value: 8
  misc_feature: MA Experiment 20000113 PARAMETER Experiment Name: At_42deg_Heat_cDNA_P Parameter: Tissue Value: Aerial
  misc_feature: MA Experiment ID: 20000117 Result: Down-regulated in Transcription
  misc_feature: MA Experiment 20000117 PARAMETER Experiment Name: At_100uM_ABA_Mutants_cDNA_P Parameter: Plant Line Value: Columbia
  misc_feature: MA Experiment 20000117 PARAMETER Experiment Name: At_100uM_ABA_Mutants_cDNA_P Parameter: Timepoint (hr) Value: 6
  misc_feature: MA Experiment 20000117 PARAMETER Experiment Name: At_100uM_ABA_Mutants_cDNA_P Parameter: Tissue Value: Aerial
  misc_feature: MA Experiment 20000117 PARAMETER Experiment Name: At_100uM_ABA_Mutants_cDNA_P Parameter: Treatment Value: 100uM ABA vs. No Treatment
  misc_feature: MA Experiment ID: 20000179 Result: Up-regulated in Transcription
  misc_feature: MA Experiment 20000179 PARAMETER Experiment Name: At_Germinating_Seeds_P Parameter: Age (hr) Value: 6 vs. 0
  misc_feature: MA Experiment 20000179 PARAMETER Experiment Name: At_Germinating_Seeds_P Parameter: Tissue Value: Germinating Seeds
  misc_feature: MA Experiment ID: 20000180 Result: Up-regulated in Transcription
  misc_feature: MA Experiment 20000180 PARAMETER Experiment Name: At_Germinating_Seeds_P Parameter: Age (hr) Value: 24 vs. 0
  misc_feature: MA Experiment 20000180 PARAMETER Experiment Name: At_Germinating_Seeds_P Parameter: Tissue Value: Germinating Seeds
  misc_feature: MA Experiment ID: 20000185 Result: Down-regulated in Transcription
  misc_feature: MA Experiment 20000185 PARAMETER Experiment Name: At_Roots__P Parameter: Age (day) Value: 7 vs. 21
  misc_feature: MA Experiment 20000185 PARAMETER Experiment Name: At_Roots__P Parameter: Organism Value: A. thaliana
  misc_feature: MA Experiment 20000185 PARAMETER Experiment Name: At_Roots__P Parameter: Tissue Value: Roots vs. Whole Plant
  misc_feature: MA Experiment ID: 20000437 Result: Down-regulated in Transcription
  misc_feature: MA Experiment 20000437 PARAMETER Experiment Name: At_Drought_P Parameter: Age (day) Value: 8
  misc_feature: MA Experiment 20000437 PARAMETER Experiment Name: At_Drought_P Parameter: Organism Value: A. thaliana
  misc_feature: MA Experiment 20000437 PARAMETER Experiment Name: At_Drought_P Parameter: Plant Line Value: WS
  misc_feature: MA Experiment 20000437 PARAMETER Experiment Name: At_Drought_P Parameter: Timepoint (hr) Value: 24
  misc_feature: MA Experiment 20000437 PARAMETER Experiment Name: At_Drought_P Parameter: Tissue Value: Whole Plant
  misc_feature: MA Experiment 20000437 PARAMETER Experiment Name: At_Drought_P Parameter: Treatment Value: Drought vs. No Drought
  misc_feature: MA Experiment ID: 20000438 Result: Up-regulated in Transcription
  misc_feature: MA Experiment 20000438 PARAMETER Experiment Name: At_Shoots__P Parameter: Age (day) Value: 14
  misc_feature: MA Experiment 20000438 PARAMETER Experiment Name: At_Shoots__P Parameter: Tissue Value: Shoots vs. Whole Plant
  misc_feature: MA Experiment ID: 20000439 Result: Down-regulated in Transcription
  misc_feature: MA Experiment 20000439 PARAMETER Experiment Name: At_Roots__P Parameter: Age (day) Value: 14 vs. 21
  misc_feature: MA Experiment 20000439 PARAMETER Experiment Name: At_Roots__P Parameter: Organism Value: A. thaliana
  misc_feature: MA Experiment 20000439 PARAMETER Experiment Name: At_Roots__P Parameter: Tissue Value: Roots vs. Whole Plant
  misc_feature: MA Experiment ID: 20000794 Result: Down-regulated in Transcription
  misc_feature: MA Experiment 20000794 PARAMETER Experiment Name: At_Petals_P Parameter: Age (day) Value: 23-25 days
  misc_feature: MA Experiment 20000794 PARAMETER Experiment Name: At_Petals_P Parameter: Plant Line Value: WS
  misc_feature: MA Experiment 20000794 PARAMETER Experiment Name: At_Petals_P Parameter: Tissue Value: Petals vs. Whole plant
  misc_feature: MA Experiment ID: 20001248 Result: Down-regulated in Transcription
  misc_feature: MA Experiment 20001248 PARAMETER Experiment Name: At_Far-red-induction_P Parameter: Age (day) Value: 7
  misc_feature: MA Experiment 20001248 PARAMETER Experiment Name: At_Far-red-induction_P Parameter: Light Value: Far-red vs. White
  misc_feature: MA Experiment 20001248 PARAMETER Experiment Name: At_Far-red-induction_P Parameter: Organism Value: A. thaliana
  misc_feature: MA Experiment 20001248 PARAMETER Experiment Name: At_Far-red-induction_P Parameter: Plant Line Value: Columbia
  misc_feature: MA Experiment 20001248 PARAMETER Experiment Name: At_Far-red-induction_P Parameter: Timepoint (hr) Value: 4
  misc_feature: MA Experiment 20001248 PARAMETER Experiment Name: At_Far-red-induction_P Parameter: Tissue Value: Whole Plant
  misc_feature: MA Experiment ID: 20001450 Result: Down-regulated in Transcription
  misc_feature: MA Experiment 20001450 PARAMETER Experiment Name: At_Far-red-induction_P Parameter: Age (day) Value: 7
  misc_feature: MA Experiment 20001450 PARAMETER Experiment Name: At_Far-red-induction_P Parameter: Light Value: Far-red vs. White
  misc_feature: MA Experiment 20001450 PARAMETER Experiment Name: At_Far-red-induction_P Parameter: Organism Value: A. thaliana
  misc_feature: MA Experiment 20001450 PARAMETER Experiment Name: At_Far-red-induction_P Parameter: Plant Line Value: Columbia
  misc_feature: MA Experiment 20001450 PARAMETER Experiment Name: At_Far-red-induction_P Parameter: Timepoint (hr) Value: 8
  misc_feature: MA Experiment 20001450 PARAMETER Experiment Name: At_Far-red-induction_P Parameter: Tissue Value: Whole Plant
  misc_feature: MA Experiment ID: 20001451 Result: Down-regulated in Transcription
  misc_feature: MA Experiment 20001451 PARAMETER Experiment Name: At_Far-red-induction_P Parameter: Age (day) Value: 7
  misc_feature: MA Experiment 20001451 PARAMETER Experiment Name: At_Far-red-induction_P Parameter: Light Value: Far-red vs. White
  misc_feature: MA Experiment 20001451 PARAMETER Experiment Name: At_Far-red-induction_P Parameter: Organism Value: A. thaliana
  misc_feature: MA Experiment 20001451 PARAMETER Experiment Name: At_Far-red-induction_P Parameter: Plant Line Value: Columbia
  misc_feature: MA Experiment 20001451 PARAMETER Experiment Name: At_Far-red-induction_P Parameter: Timepoint (hr) Value: 24
  misc_feature: MA Experiment 20001451 PARAMETER Experiment Name: At_Far-red-induction_P Parameter: Tissue Value: Whole Plant
  misc_feature: MA Experiment ID: 20001557 Result: Down-regulated in Transcription
  misc_feature: MA Experiment 20001557 PARAMETER Experiment Name: At_Drought_Soil_Dry_P Parameter: Age (day) Value: 27
  misc_feature: MA Experiment 20001557 PARAMETER Experiment Name: At_Drought_Soil_Dry_P Parameter: Organism Value: A. thaliana
  misc_feature: MA Experiment 20001557 PARAMETER Experiment Name: At_Drought_Soil_Dry_P Parameter: Plant Line Value: WS
  misc_feature: MA Experiment 20001557 PARAMETER Experiment Name: At_Drought_Soil_Dry_P Parameter: Post Timepoint (hr) Value: 3
  misc_feature: MA Experiment 20001557 PARAMETER Experiment Name: At_Drought_Soil_Dry_P Parameter: Post-Treatment Value: Re-Water vs. No Drought
  misc_feature: MA Experiment 20001557 PARAMETER Experiment Name: At_Drought_Soil_Dry_P Parameter: Timepoint (day) Value: 13
  misc_feature: MA Experiment 20001557 PARAMETER Experiment Name: At_Drought_Soil_Dry_P Parameter: Treatment Value: Drought vs. No Drought
  misc_feature: MA Experiment ID: 20001559 Result: Down-regulated in Transcription
  misc_feature: MA Experiment 20001559 PARAMETER Experiment Name: At_Drought_Soil_Dry_P Parameter: Age (day) Value: 28
  misc_feature: MA Experiment 20001559 PARAMETER Experiment Name: At_Drought_Soil_Dry_P Parameter: Organism Value: A. thaliana
  misc_feature: MA Experiment 20001559 PARAMETER Experiment Name: At_Drought_Soil_Dry_P Parameter: Plant Line Value: WS
  misc_feature: MA Experiment 20001559 PARAMETER Experiment Name: At_Drought_Soil_Dry_P Parameter: Post Timepoint (hr) Value: 29
  misc_feature: MA Experiment 20001559 PARAMETER Experiment Name: At_Drought_Soil_Dry_P Parameter: Post-Treatment Value: Re-Water vs. No Drought
  misc_feature: MA Experiment 20001559 PARAMETER Experiment Name: At_Drought_Soil_Dry_P Parameter: Timepoint (day) Value: 14
  misc_feature: MA Experiment 20001559 PARAMETER Experiment Name: At_Drought_Soil_Dry_P Parameter: Treatment Value: Drought vs. No Drought
  misc_feature: MA Experiment ID: 20001757 Result: Up-regulated in Transcription
  misc_feature: MA Experiment 20001757 PARAMETER Experiment Name: At_50mM_NH4NO3_L-to-H_P Parameter: Timepoint (hr) Value: 6
  misc_feature: MA Experiment 20001757 PARAMETER Experiment Name: At_50mM_NH4NO3_L-to-H_P Parameter: Tissue Value: Leaf
  misc_feature: MA Experiment 20001757 PARAMETER Experiment Name: At_50mM_NH4NO3_L-to-H_P Parameter: Treatment Value: 50mM NH4NO3 vs 100mM Mannitol

SEQ ID NO: 33459 - protein, 273 aa, Arabidopsis thaliana; identical to SEQ ID NO: 29869
  peptide (1)..(273): Ceres Seq. ID no. 13490484
  misc_feature (82)..(233): Pfam Name: AhpC/TSA family Pfam Description: AhpC/TSA family
  misc_feature (3)..(273): Homolog of NCBI NO: 1498198 NR Description: 2-Cys peroxiredoxin bas1 [Arabidopsis thaliana]
  misc_feature (3)..(273): Homolog of NCBI NO: 7242491 NR Description: 2-Cys peroxiredoxin [Arabidopsis thaliana]
  misc_feature (3)..(273): Homolog of NCBI NO: 3121825 NR Description: 2-cys peroxiredoxin BAS1, chloroplast precursor
  misc_feature (3)..(273): Homolog of NCBI NO: 21592588 NR Description: putative 2-cys peroxiredoxin BAS1 precursor
  misc_feature (3)..(273): Homolog of NCBI NO: 15229806 NR Description: 2-cys peroxiredoxin BAS1 precursor
  misc_feature (3)..(273): Homolog of NCBI NO: 11119229 NR Description: 2-Cys peroxiredoxin [Brassica napus]
  misc_feature (3)..(273): Homolog of NCBI NO: 21553667 NR Description: 2-cys peroxiredoxin-like protein [Arabidopsis
  misc_feature (3)..(273): Homolog of NCBI NO: 13265490 NR Description: AT5g06290 [Arabidopsis thaliana]
  misc_feature (3)..(273): Homolog of NCBI NO: 9758409 NR Description: 2-cys peroxiredoxin-like protein [Arabidopsis
  misc_feature (1)..(273): Homolog of NCBI NO: 18415155 NR Description: 2-cys peroxiredoxin-related protein [Arabidopsis

SEQ ID NO: 33460 - protein, 271 aa, Arabidopsis thaliana; identical to SEQ ID NO: 29870
  peptide (1)..(271): Ceres Seq. ID no. 13490485
  misc_feature (80)..(231): Pfam Name: AhpC/TSA family Pfam Description: AhpC/TSA family
  misc_feature (1)..(271): Homolog of NCBI NO: 1498198 NR Description: 2-Cys peroxiredoxin bas1 [Arabidopsis thaliana]
  misc_feature (1)..(271): Homolog of NCBI NO: 7242491 NR Description: 2-Cys peroxiredoxin [Arabidopsis thaliana]
  misc_feature (1)..(271): Homolog of NCBI NO: 3121825 NR Description: 2-cys peroxiredoxin BAS1, chloroplast precursor
  misc_feature (1)..(271): Homolog of NCBI NO: 21592588 NR Description: putative 2-cys peroxiredoxin BAS1 precursor
  misc_feature (1)..(271): Homolog of NCBI NO: 15229806 NR Description: 2-cys peroxiredoxin BAS1 precursor
  misc_feature (1)..(271): Homolog of NCBI NO: 11119229 NR Description: 2-Cys peroxiredoxin [Brassica napus]
  misc_feature (1)..(271): Homolog of NCBI NO: 21553667 NR Description: 2-cys peroxiredoxin-like protein [Arabidopsis
  misc_feature (1)..(271): Homolog of NCBI NO: 13265490 NR Description: AT5g06290 [Arabidopsis thaliana]
  misc_feature (1)..(271): Homolog of NCBI NO: 9758409 NR Description: 2-cys peroxiredoxin-like protein [Arabidopsis
  misc_feature (1)..(271): Homolog of NCBI NO: 18415155 NR Description: 2-cys peroxiredoxin-related protein [Arabidopsis

SEQ ID NO: 33461 - DNA, 1235 bp, Arabidopsis thaliana; identical to SEQ ID NO: 29871
  misc_feature (1)..(1235): Ceres Seq. ID no. 13490486
  misc_feature: MA Experiment ID: 108434 Result: Down-regulated in Transcription
  misc_feature: MA Experiment 108434 PARAMETER Experiment Name: At_Root_Tips_cDNA_P Parameter: Tissue Value: Root Tips
  misc_feature: MA Experiment ID: 108579 Result: Up-regulated in Transcription
  misc_feature: MA Experiment 108579 PARAMETER Experiment Name: At_4deg_Cold_cDNA_P Parameter: Temperature (deg C) Value: 4 vs. 22
  misc_feature: MA Experiment 108579 PARAMETER Experiment Name: At_4deg_Cold_cDNA_P Parameter: Timepoint (hr) Value: 6
  misc_feature: MA Experiment 108579 PARAMETER Experiment Name: At_4deg_Cold_cDNA_P Parameter: Tissue Value: Aerial
  misc_feature: MA Experiment ID: 108585 Result: Up-regulated in Transcription
  misc_feature: MA Experiment 108585 PARAMETER Experiment Name: At_5mM_NaNP_cDNA_P Parameter: Timepoint (hr) Value: 6
  misc_feature: MA Experiment 108585 PARAMETER Experiment Name: At_5mM_NaNP_cDNA_P Parameter: Tissue Value: Aerial
  misc_feature: MA Experiment 108585 PARAMETER Experiment Name: At_5mM_NaNP_cDNA_P Parameter: Treatment Value: null
  misc_feature: MA Experiment ID: 20000173 Result: Down-regulated in Transcription
  misc_feature: MA Experiment 20000173 PARAMETER Experiment Name: At_42deg_Heat_P Parameter: Age (day) Value: 14
  misc_feature: MA Experiment 20000173 PARAMETER Experiment Name: At_42deg_Heat_P Parameter: Organism Value: A. thaliana
  misc_feature: MA Experiment 20000173 PARAMETER Experiment Name: At_42deg_Heat_P Parameter: Plant Line Value: WS
  misc_feature: MA Experiment 20000173 PARAMETER Experiment Name: At_42deg_Heat_P Parameter: Temperature (deg C) Value: 42 vs. 22
  misc_feature: MA Experiment 20000173 PARAMETER Experiment Name: At_42deg_Heat_P Parameter: Timepoint (hr) Value: 6
  misc_feature: MA Experiment 20000173 PARAMETER Experiment Name: At_42deg_Heat_P Parameter: Tissue Value: Aerial
  misc_feature: MA Experiment ID: 20000184 Result: Down-regulated in Transcription
  misc_feature: MA Experiment 20000184 PARAMETER Experiment Name: At_Shoots__P Parameter: Age (day) Value: 7
  misc_feature: MA Experiment 20000184 PARAMETER Experiment Name: At_Shoots__P Parameter: Tissue Value: Shoots vs. Whole Plant
  misc_feature: MA Experiment ID: 20000437 Result: Up-regulated in Transcription
  misc_feature: MA Experiment 20000437 PARAMETER Experiment Name: At_Drought_P Parameter: Age (day) Value: 8
  misc_feature: MA Experiment 20000437 PARAMETER Experiment Name: At_Drought_P Parameter: Organism Value: A. thaliana
  misc_feature: MA Experiment 20000437 PARAMETER Experiment Name: At_Drought_P Parameter: Plant Line Value: WS
  misc_feature: MA Experiment 20000437 PARAMETER Experiment Name: At_Drought_P Parameter: Timepoint (hr) Value: 24
  misc_feature: MA Experiment 20000437 PARAMETER Experiment Name: At_Drought_P Parameter: Tissue Value: Whole Plant
  misc_feature: MA Experiment 20000437 PARAMETER Experiment Name: At_Drought_P Parameter: Treatment Value: Drought vs. No Drought

SEQ ID NO: 33462 - protein, 305 aa, Arabidopsis thaliana; identical to SEQ ID NO: 29872
  peptide (1)..(305): Ceres Seq. ID no. 13490487
  misc_feature (17)..(241): Homolog of NCBI NO: 3153239 NR Description: CTP:phosphocholine cytidylyltransferase b [Homo
  misc_feature (17)..(289): Homolog of NCBI NO: 7488791 NR Description: choline-phosphate cytidylyltransferase (EC
  misc_feature (14)..(291): Homolog of NCBI NO: 15225218 NR Description: cholinephosphate cytidylyltransferase
  misc_feature (14)..(291): Homolog of NCBI NO: 7488484 NR Description: probable choline-phosphate cytidylyltransferase
  misc_feature (1)..(291): Homolog of NCBI NO: 7488483 NR Description: probable choline-phosphate cytidylyltransferase
  misc_feature (4)..(294): Homolog of NCBI NO: 7488485 NR Description: probable choline-phosphate cytidylyltransferase
  misc_feature (4)..(294): Homolog of NCBI NO: 7488446 NR Description: choline-phosphate cytidylyltransferase (EC
  misc_feature (1)..(290): Homolog of NCBI NO: 25288640 NR Description: probable phosphocholine cytidylyltransferase
  misc_feature (1)..(290): Homolog of NCBI NO: 30683147 NR Description: cholinephosphate cytidylyltransferase
  misc_feature (1)..(305): Homolog of NCBI NO: 21668498 NR Description: CTP:phosphorylcholine cytidylyltransferase

SEQ ID NO: 33463 - protein, 235 aa, Arabidopsis thaliana; identical to SEQ ID NO: 29873
  peptide (1)..(235): Ceres Seq. ID no. 13490488
  misc_feature (1)..(171): Homolog of NCBI NO: 3153239 NR Description: CTP:phosphocholine cytidylyltransferase b [Homo
  misc_feature (1)..(219): Homolog of NCBI NO: 7488791 NR Description: choline-phosphate cytidylyltransferase (EC
  misc_feature (1)..(221): Homolog of NCBI NO: 15225218 NR Description: cholinephosphate cytidylyltransferase
  misc_feature (1)..(221): Homolog of NCBI NO: 7488484 NR Description: probable choline-phosphate cytidylyltransferase
  misc_feature (1)..(221): Homolog of NCBI NO: 7488483 NR Description: probable choline-phosphate cytidylyltransferase
  misc_feature (1)..(224): Homolog of NCBI NO: 7488485 NR Description: probable choline-phosphate cytidylyltransferase
  misc_feature (1)..(224): Homolog of NCBI NO: 7488446 NR Description: choline-phosphate cytidylyltransferase (EC
  misc_feature (1)..(220): Homolog of NCBI NO: 25288640 NR Description: probable phosphocholine cytidylyltransferase
  misc_feature (1)..(220): Homolog of NCBI NO: 30683147 NR Description: cholinephosphate cytidylyltransferase
  misc_feature (1)..(235): Homolog of NCBI NO: 21668498 NR Description: CTP:phosphorylcholine cytidylyltransferase

SEQ ID NO: 33464 - protein, 153 aa, Arabidopsis thaliana; identical to SEQ ID NO: 29874
  peptide (1)..(153): Ceres Seq. ID no. 13490489
  misc_feature (1)..(89): Homolog of NCBI NO: 3153239 NR Description: CTP:phosphocholine cytidylyltransferase b [Homo
  misc_feature (1)..(137): Homolog of NCBI NO: 7488791 NR Description: choline-phosphate cytidylyltransferase (EC
  misc_feature (1)..(139): Homolog of NCBI NO: 15225218 NR Description: cholinephosphate cytidylyltransferase
  misc_feature (1)..(139): Homolog of NCBI NO: 7488484 NR Description: probable choline-phosphate cytidylyltransferase
  misc_feature (1)..(139): Homolog of NCBI NO: 7488483 NR Description: probable choline-phosphate cytidylyltransferase
  misc_feature (1)..(142): Homolog of NCBI NO: 7488485 NR Description: probable choline-phosphate cytidylyltransferase
  misc_feature (1)..(142): Homolog of NCBI NO: 7488446 NR Description: choline-phosphate cytidylyltransferase (EC
  misc_feature (1)..(138): Homolog of NCBI NO: 25288640 NR Description: probable phosphocholine cytidylyltransferase
  misc_feature (1)..(138): Homolog of NCBI NO: 30683147 NR Description: cholinephosphate cytidylyltransferase
  misc_feature (1)..(153): Homolog of NCBI NO: 21668498 NR Description: CTP:phosphorylcholine cytidylyltransferase

SEQ ID NO: 33465 - DNA, 1654 bp, Arabidopsis thaliana; identical to SEQ ID NO: 29875
  misc_feature (1)..(1654): Ceres Seq. ID no. 12422368
  misc_feature: MA Experiment ID: 108435 Result: Down-regulated in Transcription
  misc_feature: MA Experiment 108435 PARAMETER Experiment Name: At_stm_Mutants_cDNA_P Parameter: Plant Line Value: wt Landsburg vs stm
  misc_feature: MA Experiment 108435 PARAMETER Experiment Name: At_stm_Mutants_cDNA_P Parameter: Tissue Value: Shoot Apical Meristem Region
  misc_feature: MA Experiment ID: 108461 Result: Down-regulated in Transcription
  misc_feature: MA Experiment 108461 PARAMETER Experiment Name: At_Germinating_Seeds_cDNA_P Parameter: Age (day) Value: 1 vs. 0
  misc_feature: MA Experiment 108461 PARAMETER Experiment Name: At_Germinating_Seeds_cDNA_P Parameter: Tissue Value: Germinating Seeds
  misc_feature: MA Experiment ID: 108462 Result: Down-regulated in Transcription
  misc_feature: MA Experiment 108462 PARAMETER Experiment Name: At_Germinating_Seeds_cDNA_P Parameter: Age (day) Value: 2 vs. 0
  misc_feature: MA Experiment 108462 PARAMETER Experiment Name: At_Germinating_Seeds_cDNA_P Parameter: Tissue Value: Germinating Seeds
  misc_feature: MA Experiment ID: 108464 Result: Down-regulated in Transcription
  misc_feature: MA Experiment 108464 PARAMETER Experiment Name: At_Germinating_Seeds_cDNA_P Parameter: Age (day) Value: 4 vs. 0
  misc_feature: MA Experiment 108464 PARAMETER Experiment Name: At_Germinating_Seeds_cDNA_P Parameter: Tissue Value: Germinating Seeds
  misc_feature: MA Experiment ID: 108569 Result: Up-regulated in Transcription
  misc_feature: MA Experiment 108569 PARAMETER Experiment Name: At_0.001%_MeJA__cDNA_P Parameter: Timepoint (hr) Value: 6
  misc_feature: MA Experiment 108569 PARAMETER Experiment Name: At_0.001%_MeJA__cDNA_P Parameter: Tissue Value: Aerial
  misc_feature: MA Experiment 108569 PARAMETER Experiment Name: At_0.001%_MeJA__cDNA_P Parameter: Treatment Value: 0.001% MeJA vs. No Treatment
  misc_feature: MA Experiment ID: 108573 Result: Up-regulated in Transcription
  misc_feature: MA Experiment 108573 PARAMETER Experiment Name: At_Drought_cDNA_P Parameter: Timepoint (hr) Value: 6
  misc_feature: MA Experiment 108573 PARAMETER Experiment Name: At_Drought_cDNA_P Parameter: Tissue Value: Aerial
  misc_feature: MA Experiment 108573 PARAMETER Experiment Name: At_Drought_cDNA_P Parameter: Treatment Value: Drought vs. No Drought
  misc_feature: MA Experiment ID: 108574 Result: Up-regulated in Transcription
  misc_feature: MA Experiment 108574 PARAMETER Experiment Name: At_Wounding__cDNA_P Parameter: Timepoint (hr) Value: 1
  misc_feature: MA Experiment 108574 PARAMETER Experiment Name: At_Wounding__cDNA_P Parameter: Tissue Value: Aerial
  misc_feature: MA Experiment 108574 PARAMETER Experiment Name: At_Wounding__cDNA_P Parameter: Treatment Value: Wounding vs. No Wounding
  misc_feature: MA Experiment ID: 108577 Result: Down-regulated in Transcription
  misc_feature: MA Experiment 108577 PARAMETER Experiment Name: At_42deg_Heat_cDNA_P Parameter: Temperature (deg C) Value: 42 vs. 22
  misc_feature: MA Experiment 108577 PARAMETER Experiment Name: At_42deg_Heat_cDNA_P Parameter: Timepoint (hr) Value: 6
  misc_feature: MA Experiment 108577 PARAMETER Experiment Name: At_42deg_Heat_cDNA_P Parameter: Tissue Value: Aerial
  misc_feature: MA Experiment ID: 108579 Result: Up-regulated in Transcription
  misc_feature: MA Experiment 108579 PARAMETER Experiment Name: At_4deg_Cold_cDNA_P Parameter: Temperature (deg C) Value: 4 vs. 22
  misc_feature: MA Experiment 108579 PARAMETER Experiment Name: At_4deg_Cold_cDNA_P Parameter: Timepoint (hr) Value: 6
  misc_feature: MA Experiment 108579 PARAMETER Experiment Name: At_4deg_Cold_cDNA_P Parameter: Tissue Value: Aerial
  misc_feature: MA Experiment ID: 108585 Result: Up-regulated in Transcription
  misc_feature: MA Experiment 108585 PARAMETER Experiment Name: At_5mM_NaNP_cDNA_P Parameter: Timepoint (hr) Value: 6
  misc_feature: MA Experiment 108585 PARAMETER Experiment Name: At_5mM_NaNP_cDNA_P Parameter: Tissue Value: Aerial
  misc_feature: MA Experiment 108585 PARAMETER Experiment Name: At_5mM_NaNP_cDNA_P Parameter: Treatment Value: null
  misc_feature: MA Experiment ID: 108594 Result: Down-regulated in Transcription
  misc_feature: MA Experiment 108594 PARAMETER Experiment Name: At_Ler-rhl_Root_cDNA_P Parameter: Plant Line Value: null
  misc_feature: MA Experiment ID: 108595 Result: Up-regulated in Transcription
  misc_feature: MA Experiment 108595 PARAMETER Experiment Name: At_Ler-pi_Ovule_cDNA_P Parameter: Plant Line Value: null
  misc_feature: MA Experiment ID: 108608 Result: Up-regulated in Transcription
  misc_feature: MA Experiment 108608 PARAMETER Experiment Name: At_100uM_ABA_cDNA_P Parameter: Timepoint (hr) Value: 1
  misc_feature: MA Experiment 108608 PARAMETER Experiment Name: At_100uM_ABA_cDNA_P Parameter: Tissue Value: Aerial
  misc_feature: MA Experiment 108608 PARAMETER Experiment Name: At_100uM_ABA_cDNA_P Parameter: Treatment Value: 100uM ABA vs. No Treatment
  misc_feature: MA Experiment ID: 20000030 Result: Down-regulated in Transcription
  misc_feature: MA Experiment 20000030 PARAMETER Experiment Name: At_CS6630_Roots_cDNA_P Parameter: Plant Line Value: CS6630 vs. WS
  misc_feature: MA Experiment 20000030 PARAMETER Experiment Name: At_CS6630_Roots_cDNA_P Parameter: Tissue Value: Roots
  misc_feature: MA Experiment ID: 20000069 Result: Up-regulated in Transcription
  misc_feature: MA Experiment 20000069 PARAMETER Experiment Name: At_100uM_ABA_Mutants_cDNA_P Parameter: Plant Line Value: CS23
  misc_feature: MA Experiment 20000069 PARAMETER Experiment Name: At_100uM_ABA_Mutants_cDNA_P Parameter: Timepoint (hr) Value: 6
  misc_feature: MA Experiment 20000069 PARAMETER Experiment Name: At_100uM_ABA_Mutants_cDNA_P Parameter: Tissue Value: Aerial
  misc_feature: MA Experiment 20000069 PARAMETER Experiment Name: At_100uM_ABA_Mutants_cDNA_P Parameter: Treatment Value: 100uM ABA vs. No Treatment
  misc_feature: MA Experiment ID: 20000070 Result: Up-regulated in Transcription
  misc_feature: MA Experiment 20000070 PARAMETER Experiment Name: At_100uM_ABA_Mutants_cDNA_P Parameter: Plant Line Value: CS24
  misc_feature: MA Experiment 20000070 PARAMETER Experiment Name: At_100uM_ABA_Mutants_cDNA_P Parameter: Timepoint (hr) Value: 6
  misc_feature: MA Experiment 20000070 PARAMETER Experiment Name: At_100uM_ABA_Mutants_cDNA_P Parameter: Tissue Value: Aerial
  misc_feature: MA Experiment 20000070 PARAMETER Experiment Name: At_100uM_ABA_Mutants_cDNA_P Parameter: Treatment Value: 100uM ABA vs. No Treatment
  misc_feature: MA Experiment ID: 20000071 Result: Up-regulated in Transcription
  misc_feature: MA Experiment 20000071 PARAMETER Experiment Name: At_100uM_ABA_Mutants_cDNA_P Parameter: Plant Line Value: CS8104
  misc_feature: MA Experiment 20000071 PARAMETER Experiment Name: At_100uM_ABA_Mutants_cDNA_P Parameter: Timepoint (hr) Value: 6
  misc_feature: MA Experiment 20000071 PARAMETER Experiment Name: At_100uM_ABA_Mutants_cDNA_P Parameter: Tissue Value: Aerial
  misc_feature: MA Experiment 20000071 PARAMETER Experiment Name: At_100uM_ABA_Mutants_cDNA_P Parameter: Treatment Value: 100uM ABA vs. No Treatment
  misc_feature: MA Experiment ID: 20000086 Result: Up-regulated in Transcription
  misc_feature: MA Experiment 20000086 PARAMETER Experiment Name: At_100uM_ABA_Mutants_cDNA_P Parameter: Plant Line Value: CS22
  misc_feature: MA Experiment 20000086 PARAMETER Experiment Name: At_100uM_ABA_Mutants_cDNA_P Parameter: Timepoint (hr) Value: 6
  misc_feature: MA Experiment 20000086 PARAMETER Experiment Name: At_100uM_ABA_Mutants_cDNA_P Parameter: Tissue Value: Aerial
  misc_feature: MA Experiment 20000086 PARAMETER Experiment Name: At_100uM_ABA_Mutants_cDNA_P Parameter: Treatment Value: 100uM ABA vs. No Treatment
  misc_feature: MA Experiment ID: 20000088 Result: Up-regulated in Transcription
  misc_feature: MA Experiment 20000088 PARAMETER Experiment Name: At_100uM_ABA_Mutants_cDNA_P Parameter: Plant Line Value: Landsberg
  misc_feature: MA Experiment 20000088 PARAMETER Experiment Name: At_100uM_ABA_Mutants_cDNA_P Parameter: Timepoint (hr) Value: 6
  misc_feature: MA Experiment 20000088 PARAMETER Experiment Name: At_100uM_ABA_Mutants_cDNA_P Parameter: Tissue Value: Aerial
  misc_feature: MA Experiment 20000088 PARAMETER Experiment Name: At_100uM_ABA_Mutants_cDNA_P Parameter: Treatment Value: 100uM ABA vs. No Treatment
  misc_feature: MA Experiment ID: 20000089 Result: Up-regulated in Transcription
  misc_feature: MA Experiment ID: 20000090 Result: Up-regulated in Transcription
  misc_feature: MA Experiment ID: 20000112 Result: Down-regulated in Transcription
  misc_feature: MA Experiment 20000112 PARAMETER Experiment Name: At_42deg_Heat_cDNA_P Parameter: Temperature (deg C) Value: 42 vs. 22
  misc_feature: MA Experiment 20000112 PARAMETER Experiment Name: At_42deg_Heat_cDNA_P Parameter: Timepoint (hr) Value: 2
  misc_feature: MA Experiment 20000112 PARAMETER Experiment Name: At_42deg_Heat_cDNA_P Parameter: Tissue Value: Aerial
  misc_feature: MA Experiment ID: 20000117 Result: Up-regulated in Transcription
  misc_feature: MA Experiment 20000117 PARAMETER Experiment Name: At_100uM_ABA_Mutants_cDNA_P Parameter: Plant Line Value: Columbia
  misc_feature: MA Experiment 20000117 PARAMETER Experiment Name: At_100uM_ABA_Mutants_cDNA_P Parameter: Timepoint (hr) Value: 6
  misc_feature: MA Experiment 20000117 PARAMETER Experiment Name: At_100uM_ABA_Mutants_cDNA_P Parameter: Tissue Value: Aerial
  misc_feature: MA Experiment 20000117 PARAMETER Experiment Name: At_100uM_ABA_Mutants_cDNA_P Parameter: Treatment Value: 100uM ABA vs. No Treatment
  misc_feature: MA Experiment ID: 20000144 Result: Down-regulated in Transcription
  misc_feature: MA Experiment 20000144 PARAMETER Experiment Name: At_42deg_Heat_cDNA_P Parameter: Temperature (deg C) Value: 42 vs. 22
  misc_feature: MA Experiment 20000144 PARAMETER Experiment Name: At_42deg_Heat_cDNA_P Parameter: Timepoint (hr) Value: 1
  misc_feature: MA Experiment 20000144 PARAMETER Experiment Name: At_42deg_Heat_cDNA_P Parameter: Tissue Value: Aerial
  misc_feature: MA Experiment ID: 20000166 Result: Up-regulated in Transcription
  misc_feature: MA Experiment 20000166 PARAMETER Experiment Name: At_100uM_ABA_P Parameter: Age (day) Value: 14
  misc_feature: MA Experiment 20000166 PARAMETER Experiment Name: At_100uM_ABA_P Parameter: Organism Value: A. thaliana
  misc_feature: MA Experiment 20000166 PARAMETER Experiment Name: At_100uM_ABA_P Parameter: Plant Line Value: WS
  misc_feature: MA Experiment 20000166 PARAMETER Experiment Name: At_100uM_ABA_P Parameter: Timepoint (hr) Value: 1
  misc_feature: MA Experiment 20000166 PARAMETER Experiment Name: At_100uM_ABA_P Parameter: Tissue Value: Aerial
  misc_feature: MA Experiment 20000166 PARAMETER Experiment Name: At_100uM_ABA_P Parameter: Treatment Value: 100uM ABA vs. No Treatment
  misc_feature: MA Experiment ID: 20000171 Result: Down-regulated in Transcription
  misc_feature: MA Experiment 20000171 PARAMETER Experiment Name: At_42deg_Heat_P Parameter: Age (day) Value: 14
  misc_feature: MA Experiment 20000171 PARAMETER Experiment Name: At_42deg_Heat_P Parameter: Organism Value: A. thaliana
  misc_feature: MA Experiment 20000171 PARAMETER Experiment Name: At_42deg_Heat_P Parameter: Plant Line Value: WS
  misc_feature: MA Experiment 20000171 PARAMETER Experiment Name: At_42deg_Heat_P Parameter: Temperature (deg C) Value: 42 vs. 22
  misc_feature: MA Experiment 20000171 PARAMETER Experiment Name: At_42deg_Heat_P Parameter: Timepoint (hr) Value: 1
  misc_feature: MA Experiment 20000171 PARAMETER Experiment Name: At_42deg_Heat_P Parameter: Tissue Value: Aerial
  misc_feature: MA Experiment ID: 20000173 Result: Down-regulated in Transcription
  misc_feature: MA Experiment 20000173 PARAMETER Experiment Name: At_42deg_Heat_P Parameter: Age (day) Value: 14
  misc_feature: MA Experiment 20000173 PARAMETER Experiment Name: At_42deg_Heat_P Parameter: Organism Value: A. thaliana
  misc_feature: MA Experiment 20000173 PARAMETER Experiment Name: At_42deg_Heat_P Parameter: Plant Line Value: WS
  misc_feature: MA Experiment 20000173 PARAMETER Experiment Name: At_42deg_Heat_P Parameter: Temperature (deg C) Value: 42 vs. 22
  misc_feature: MA Experiment 20000173 PARAMETER Experiment Name: At_42deg_Heat_P Parameter: Timepoint (hr) Value: 6
  misc_feature: MA Experiment 20000173 PARAMETER Experiment Name: At_42deg_Heat_P Parameter: Tissue Value: Aerial
  misc_feature: MA Experiment ID: 20000180 Result: Down-regulated in Transcription
  misc_feature: MA Experiment 20000180 PARAMETER Experiment Name: At_Germinating_Seeds_P Parameter: Age (hr) Value: 24 vs. 0
  misc_feature: MA Experiment 20000180 PARAMETER Experiment Name: At_Germinating_Seeds_P Parameter: Tissue Value: Germinating Seeds
  misc_feature: MA Experiment ID: 20000184 Result: Down-regulated in Transcription
  misc_feature: MA Experiment 20000184 PARAMETER Experiment Name: At_Shoots__P Parameter: Age (day) Value: 7
  misc_feature: MA Experiment 20000184 PARAMETER Experiment Name: At_Shoots__P Parameter: Tissue Value: Shoots vs. Whole Plant
  misc_feature: MA Experiment ID: 20000185 Result: Down-regulated in Transcription
  misc_feature: MA Experiment 20000185 PARAMETER Experiment Name: At_Roots__P Parameter: Age (day) Value: 7 vs. 21
  misc_feature: MA Experiment 20000185 PARAMETER Experiment Name: At_Roots__P Parameter: Organism Value: A. thaliana
  misc_feature: MA Experiment 20000185 PARAMETER Experiment Name: At_Roots__P Parameter: Tissue Value: Roots vs. Whole Plant
  misc_feature: MA Experiment ID: 20000213 Result: Up-regulated in Transcription
  misc_feature: MA Experiment 20000213 PARAMETER Experiment Name: At_4deg_Cold_P Parameter: Timepoint (hr) Value: 2
  misc_feature: MA Experiment ID: 20000234 Result: Down-regulated in Transcription
  misc_feature: MA Experiment 20000234 PARAMETER Experiment Name: At_Siliques_P Parameter: Age (day) Value: 21
  misc_feature: MA Experiment 20000234 PARAMETER Experiment Name: At_Siliques_P Parameter: Organism Value: A. thaliana
  misc_feature: MA Experiment 20000234 PARAMETER Experiment Name: At_Siliques_P Parameter: Plant Line Value: WS
  misc_feature: MA Experiment 20000234 PARAMETER Experiment Name: At_Siliques_P Parameter: Tissue Value: Less Than 5mm Siliques vs. Whole Plant
  misc_feature: MA Experiment ID: 20000308 Result: Up-regulated in Transcription
  misc_feature: MA Experiment 20000308 PARAMETER Experiment Name: At_100mM_NaCl__P Parameter: Age (day) Value: 17
  misc_feature: MA Experiment 20000308 PARAMETER Experiment Name: At_100mM_NaCl__P Parameter: Organism Value: A. thaliana
  misc_feature: MA Experiment 20000308 PARAMETER Experiment Name: At_100mM_NaCl__P Parameter: Plant Line Value: WS
  misc_feature: MA Experiment 20000308 PARAMETER Experiment Name: At_100mM_NaCl__P Parameter: Timepoint (hr) Value: 72
  misc_feature: MA Experiment 20000308 PARAMETER Experiment Name: At_100mM_NaCl__P Parameter: Tissue Value: Whole Plant
  misc_feature: MA Experiment 20000308 PARAMETER Experiment Name: At_100mM_NaCl__P Parameter: Treatment Value: 100mM NaCl vs. No Treatment
  misc_feature: MA Experiment ID: 20000437 Result: Up-regulated in Transcription
  misc_feature: MA Experiment 20000437 PARAMETER Experiment Name: At_Drought_P Parameter: Age (day) Value: 8
  misc_feature: MA Experiment 20000437 PARAMETER Experiment Name: At_Drought_P Parameter: Organism Value: A. thaliana
  misc_feature: MA Experiment 20000437 PARAMETER Experiment Name: At_Drought_P Parameter: Plant Line Value: WS
  misc_feature: MA Experiment 20000437 PARAMETER Experiment Name: At_Drought_P Parameter: Timepoint (hr) Value: 24
  misc_feature: MA Experiment 20000437 PARAMETER Experiment Name: At_Drought_P Parameter: Tissue Value: Whole Plant
  misc_feature: MA Experiment 20000437 PARAMETER Experiment Name: At_Drought_P Parameter: Treatment Value: Drought vs. No Drought
  misc_feature: MA Experiment ID: 20000438 Result: Down-regulated in Transcription
  misc_feature: MA Experiment 20000438 PARAMETER Experiment Name: At_Shoots__P Parameter: Age (day) Value: 14
  misc_feature: MA Experiment 20000438 PARAMETER Experiment Name: At_Shoots__P Parameter: Tissue Value: Shoots vs. Whole Plant
  misc_feature: MA Experiment ID: 20000439 Result: Down-regulated in Transcription
  misc_feature: MA Experiment 20000439 PARAMETER Experiment Name: At_Roots__P Parameter: Age (day) Value: 14 vs. 21
  misc_feature: MA Experiment 20000439 PARAMETER Experiment Name: At_Roots__P Parameter: Organism Value: A. thaliana
  misc_feature: MA Experiment 20000439 PARAMETER Experiment Name: At_Roots__P Parameter: Tissue Value: Roots vs. Whole Plant
  misc_feature: MA Experiment ID: 20000495 Result: Down-regulated in Transcription
  misc_feature: MA Experiment 20000495 PARAMETER Experiment Name: At_Guard_Cells_P Parameter: Harvest Date Value: 8/2/2002
  misc_feature: MA Experiment 20000495 PARAMETER Experiment Name: At_Guard_Cells_P Parameter: Organism Value: A. thaliana
  misc_feature: MA Experiment 20000495 PARAMETER Experiment Name: At_Guard_Cells_P Parameter: Tissue Value: Guard Cells vs. Leaves
  misc_feature: MA Experiment ID: 20000574 Result: Up-regulated in Transcription
  misc_feature: MA Experiment 20000574 PARAMETER Experiment Name: At_100uM_ABA_Mutants__P Parameter: Organism Value: A. thaliana
  misc_feature: MA Experiment 20000574 PARAMETER Experiment Name: At_100uM_ABA_Mutants__P Parameter: Plant Line Value: CS23 vs. Ler wt
  misc_feature: MA Experiment 20000574 PARAMETER Experiment Name: At_100uM_ABA_Mutants__P Parameter: Timepoint (hr) Value: N/A
  misc_feature: MA Experiment 20000574 PARAMETER Experiment Name: At_100uM_ABA_Mutants__P Parameter: Tissue Value: Whole Plant
  misc_feature: MA Experiment 20000574 PARAMETER Experiment Name: At_100uM_ABA_Mutants__P Parameter: Treatment Value: None
  misc_feature: MA Experiment ID: 20000794 Result: Up-regulated in Transcription
  misc_feature: MA Experiment 20000794 PARAMETER Experiment Name: At_Petals_P Parameter: Age (day) Value: 23-25 days
  misc_feature: MA Experiment 20000794 PARAMETER Experiment Name: At_Petals_P Parameter: Plant Line Value: WS
  misc_feature: MA Experiment 20000794 PARAMETER Experiment Name: At_Petals_P Parameter: Tissue Value: Petals vs. Whole plant
  misc_feature: MA Experiment ID: 20001451 Result: Down-regulated in Transcription
  misc_feature: MA Experiment 20001451 PARAMETER Experiment Name: At_Far-red-induction_P Parameter: Age (day) Value: 7
  misc_feature: MA Experiment 20001451 PARAMETER Experiment Name: At_Far-red-induction_P Parameter: Light Value: Far-red vs. White
  misc_feature: MA Experiment 20001451 PARAMETER Experiment Name: At_Far-red-induction_P Parameter: Organism Value: A. thaliana
  misc_feature: MA Experiment 20001451 PARAMETER Experiment Name: At_Far-red-induction_P Parameter: Plant Line Value: Columbia
  misc_feature: MA Experiment 20001451 PARAMETER Experiment Name: At_Far-red-induction_P Parameter: Timepoint (hr) Value: 24
  misc_feature: MA Experiment 20001451 PARAMETER Experiment Name: At_Far-red-induction_P Parameter: Tissue Value: Whole Plant
  misc_feature: MA Experiment ID: 20001557 Result: Up-regulated in Transcription
  misc_feature: MA Experiment 20001557 PARAMETER Experiment Name: At_Drought_Soil_Dry_P Parameter: Age (day) Value: 27
  misc_feature: MA Experiment 20001557 PARAMETER Experiment Name: At_Drought_Soil_Dry_P Parameter: Organism Value: A. thaliana
  misc_feature: MA Experiment 20001557 PARAMETER Experiment Name: At_Drought_Soil_Dry_P Parameter: Plant Line Value: WS
  misc_feature: MA Experiment 20001557 PARAMETER Experiment Name: At_Drought_Soil_Dry_P Parameter: Post Timepoint (hr) Value: 3
  misc_feature: MA Experiment 20001557 PARAMETER Experiment Name: At_Drought_Soil_Dry_P Parameter: Post-Treatment Value: Re-Water vs. No Drought
  misc_feature: MA Experiment 20001557 PARAMETER Experiment Name: At_Drought_Soil_Dry_P Parameter: Timepoint (day) Value: 13
  misc_feature: MA Experiment 20001557 PARAMETER Experiment Name: At_Drought_Soil_Dry_P Parameter: Treatment Value: Drought vs. No Drought
  misc_feature: MA Experiment ID: 20001906 Result: Up-regulated in Transcription
  misc_feature: MA Experiment 20001906 PARAMETER Experiment Name: At_Drought_Reproduction_P Parameter: Age (day) Value: 35
  misc_feature: MA Experiment 20001906 PARAMETER Experiment Name: At_Drought_Reproduction_P Parameter: Organism Value: A. thaliana
  misc_feature: MA Experiment 20001906 PARAMETER Experiment Name: At_Drought_Reproduction_P Parameter: Plant Line Value: WS
  misc_feature: MA Experiment 20001906 PARAMETER Experiment Name: At_Drought_Reproduction_P Parameter: Timepoint (day) Value: 5
  misc_feature: MA Experiment 20001906 PARAMETER Experiment Name: At_Drought_Reproduction_P Parameter: Tissue Value: Siliques
  misc_feature: MA Experiment 20001906 PARAMETER Experiment Name: At_Drought_Reproduction_P Parameter: Treatment Value: Drought vs. No Drought

SEQ ID NO: 33466 - protein, 510 aa, Arabidopsis thaliana; identical to SEQ ID NO: 29876
  peptide (1)..(510): Ceres Seq. ID no. 12422369
  misc_feature (27)..(420): Pfam Name: POT family Pfam Description: POT family
  misc_feature (26)..(505): Homolog of NCBI NO: 15221883 NR Description: peptide transporter, putative
  misc_feature (26)..(510): Homolog of NCBI NO: 18408546 NR Description: putative peptide transporter
  misc_feature (26)..(510): Homolog of NCBI NO: 16226701 NR Description: AT3g47960/T17F15_170 [Arabidopsis thaliana]
  misc_feature (26)..(510): Homolog of NCBI NO: 7488141 NR Description: probable peptide transport protein T17F15.170 -
  misc_feature (26)..(484): Homolog of NCBI NO: 15241927 NR Description: peptide transporter; protein id: At5g62680.1
  misc_feature (18)..(485): Homolog of NCBI NO: 34906908 NR Description: putative peptide transporter
  misc_feature (18)..(502): Homolog of NCBI NO: 25403285 NR Description: protein T7N9.14 [imported] - Arabidopsis thaliana
  misc_feature (18)..(502): Homolog of NCBI NO: 15223425 NR Description: peptide transporter, putative; protein id:
  misc_feature (26)..(510): Homolog of NCBI NO: 18409391 NR Description: putative peptide transporter
  misc_feature (21)..(510): Homolog of NCBI NO: 25404847 NR Description: probable peptide transporter T17F3.10

SEQ ID NO: 33467 - protein, 496 aa, Arabidopsis thaliana; identical to SEQ ID NO: 29877
  peptide (1)..(496): Ceres Seq. ID no. 12422370
  misc_feature (13)..(406): Pfam Name: POT family Pfam Description: POT family
  misc_feature (12)..(491): Homolog of NCBI NO: 15221883 NR Description: peptide transporter, putative
  misc_feature (12)..(496): Homolog of NCBI NO: 16226701 NR Description: AT3g47960/T17F15_170 [Arabidopsis thaliana]
  misc_feature (12)..(496): Homolog of NCBI NO: 18408546 NR Description: putative peptide transporter
  misc_feature (12)..(496): Homolog of NCBI NO: 7488141 NR Description: probable peptide transport protein T17F15.170 -
  misc_feature (12)..(470): Homolog of NCBI NO: 15241927 NR Description: peptide transporter; protein id: At5g62680.1
  misc_feature (4)..(471): Homolog of NCBI NO: 34906908 NR Description: putative peptide transporter
  misc_feature (4)..(488): Homolog of NCBI NO: 25403285 NR Description: protein T7N9.14 [imported] - Arabidopsis thaliana
  misc_feature (4)..(488): Homolog of NCBI NO: 15223425 NR Description: peptide transporter, putative; protein id:
  misc_feature (12)..(496): Homolog of NCBI NO: 18409391 NR Description: putative peptide transporter
  misc_feature (7)..(496): Homolog of NCBI NO: 25404847 NR Description: probable peptide transporter T17F3.10

SEQ ID NO: 33468 - protein, 487 aa, Arabidopsis thaliana; identical to SEQ ID NO: 29878
  peptide (1)..(487): Ceres Seq. ID no. 12422371
  misc_feature (4)..(397): Pfam Name: POT family Pfam Description: POT family
  misc_feature (3)..(482): Homolog of NCBI NO: 15221883 NR Description: peptide transporter, putative
  misc_feature (3)..(487): Homolog of NCBI NO: 18408546 NR Description: putative peptide transporter
  misc_feature (3)..(487): Homolog of NCBI NO: 16226701 NR Description: AT3g47960/T17F15_170 [Arabidopsis thaliana]
  misc_feature (3)..(487): Homolog of NCBI NO: 7488141 NR Description: probable peptide transport protein T17F15.170 -
  misc_feature (3)..(461): Homolog of NCBI NO: 15241927 NR Description: peptide transporter; protein id: At5g62680.1
  misc_feature (1)..(462): Homolog of NCBI NO: 34906908 NR Description: putative peptide transporter
  misc_feature (1)..(479): Homolog of NCBI NO: 25403285 NR Description: protein T7N9.14 [imported] - Arabidopsis thaliana
  misc_feature (1)..(479): Homolog of NCBI NO: 15223425 NR Description: peptide transporter, putative; protein id:
  misc_feature (3)..(487): Homolog of NCBI NO: 18409391 NR Description: putative peptide transporter
  misc_feature (1)..(487): Homolog of NCBI NO: 25404847 NR Description: probable peptide transporter T17F3.10

SEQ ID NO: 33469 - DNA, 842 bp, Arabidopsis thaliana; identical to SEQ ID NO: 29879
  misc_feature (1)..(842): Ceres Seq. ID no. 12322334
  misc_feature: MA Experiment ID: 20000180 Result: Up-regulated in Transcription
  misc_feature: MA Experiment 20000180 PARAMETER Experiment Name: At_Germinating_Seeds_P Parameter: Age (hr) Value: 24 vs. 0
  misc_feature: MA Experiment 20000180 PARAMETER Experiment Name: At_Germinating_Seeds_P Parameter: Tissue Value: Germinating Seeds
  misc_feature: MA Experiment ID: 20000184 Result: Down-regulated in Transcription
  misc_feature: MA Experiment 20000184 PARAMETER Experiment Name: At_Shoots__P Parameter: Age (day) Value: 7
  misc_feature: MA Experiment 20000184 PARAMETER Experiment Name: At_Shoots__P Parameter: Tissue Value: Shoots vs. Whole Plant

SEQ ID NO: 33470 - protein, 116 aa, Arabidopsis thaliana; identical to SEQ ID NO: 29880
  peptide (1)..(116): Ceres Seq. ID no. 12322335
  misc_feature (1)..(87): Pfam Name: Ras family Pfam Description: Ras family
  misc_feature (1)..(95): Homolog of NCBI NO: 15238392 NR Description: GTP-binding protein, putative
  misc_feature (1)..(95): Homolog of NCBI NO: 7438430 NR Description: GTP-binding protein - garden pea
  misc_feature (1)..(95): Homolog of NCBI NO: 21617896 NR Description: GTP-binding protein GB3 [Arabidopsis thaliana]
  misc_feature (1)..(95): Homolog of NCBI NO: 15236099 NR Description: GTP-binding protein, putative
  misc_feature (1)..(95): Homolog of NCBI NO: 1184985 NR Description: ATGB3 [Arabidopsis thaliana]
  misc_feature (1)..(116): Homolog of NCBI NO: 15227197 NR Description: GTP-binding protein, putative; protein id:

SEQ ID NO: 33471 - protein, 111 aa, Arabidopsis thaliana; identical to SEQ ID NO: 29881
  peptide (1)..(111): Ceres Seq. ID no. 12322336
  misc_feature (1)..(82): Pfam Name: Ras family Pfam Description: Ras family
  misc_feature (1)..(90): Homolog of NCBI NO: 15238392 NR Description: GTP-binding protein, putative
  misc_feature (1)..(90): Homolog of NCBI NO: 7438430 NR Description: GTP-binding protein - garden pea
  misc_feature (1)..(90): Homolog of NCBI NO: 15236099 NR Description: GTP-binding protein, putative
  misc_feature (1)..(90): Homolog of NCBI NO: 21617896 NR Description: GTP-binding protein GB3 [Arabidopsis thaliana]
  misc_feature (1)..(90): Homolog of NCBI NO: 1184985 NR Description: ATGB3 [Arabidopsis thaliana]
  misc_feature (1)..(111): Homolog of NCBI NO: 15227197 NR Description: GTP-binding protein, putative; protein id:

SEQ ID NO: 33472 - DNA, 1119 bp, Arabidopsis thaliana; identical to SEQ ID NO: 29882
  misc_feature (1)..(1119): Ceres Seq. ID no. 13487755
  misc_feature: MA Experiment ID: 108462 Result: Down-regulated in Transcription
  misc_feature: MA Experiment 108462 PARAMETER Experiment Name: At_Germinating_Seeds_cDNA_P Parameter: Age (day) Value: 2 vs. 0
  misc_feature: MA Experiment 108462 PARAMETER Experiment Name: At_Germinating_Seeds_cDNA_P Parameter: Tissue Value: Germinating Seeds
  misc_feature: MA Experiment ID: 108463 Result: Down-regulated in Transcription
  misc_feature: MA Experiment 108463 PARAMETER Experiment Name: At_Germinating_Seeds_cDNA_P Parameter: Age (day) Value: 3 vs. 0
  misc_feature: MA Experiment 108463 PARAMETER Experiment Name: At_Germinating_Seeds_cDNA_P Parameter: Tissue Value: Germinating Seeds
  misc_feature: MA Experiment ID: 108464 Result: Down-regulated in Transcription
  misc_feature: MA Experiment 108464 PARAMETER Experiment Name: At_Germinating_Seeds_cDNA_P Parameter: Age (day) Value: 4 vs. 0
  misc_feature: MA Experiment 108464 PARAMETER Experiment Name: At_Germinating_Seeds_cDNA_P Parameter: Tissue Value: Germinating Seeds
  misc_feature: MA Experiment ID: 108573 Result: Down-regulated in Transcription
  misc_feature: MA Experiment 108573 PARAMETER Experiment Name: At_Drought_cDNA_P Parameter: Timepoint (hr) Value: 6
  misc_feature: MA Experiment 108573 PARAMETER Experiment Name: At_Drought_cDNA_P Parameter: Tissue Value: Aerial
  misc_feature: MA Experiment 108573 PARAMETER Experiment Name: At_Drought_cDNA_P Parameter: Treatment Value: Drought vs. No Drought
  misc_feature: MA Experiment ID: 108595 Result: Down-regulated in Transcription
  misc_feature: MA Experiment 108595 PARAMETER Experiment Name: At_Ler-pi_Ovule_cDNA_P Parameter: Plant Line Value: null
  misc_feature: MA Experiment ID: 20000113 Result: Down-regulated in Transcription
  misc_feature: MA Experiment 20000113 PARAMETER Experiment Name: At_42deg_Heat_cDNA_P Parameter: Temperature (deg C) Value: 42 vs. 22
  misc_feature: MA Experiment 20000113 PARAMETER Experiment Name: At_42deg_Heat_cDNA_P Parameter: Timepoint (hr) Value: 8
  misc_feature: MA Experiment 20000113 PARAMETER Experiment Name: At_42deg_Heat_cDNA_P Parameter: Tissue Value: Aerial
  misc_feature: MA Experiment ID: 20000173 Result: Down-regulated in Transcription
  misc_feature: MA Experiment 20000173 PARAMETER Experiment Name: At_42deg_Heat_P Parameter: Age (day) Value: 14
  misc_feature: MA Experiment 20000173 PARAMETER Experiment Name: At_42deg_Heat_P Parameter: Organism Value: A. thaliana
  misc_feature: MA Experiment 20000173 PARAMETER Experiment Name: At_42deg_Heat_P Parameter: Plant Line Value: WS
  misc_feature: MA Experiment 20000173 PARAMETER Experiment Name: At_42deg_Heat_P Parameter: Temperature (deg C) Value: 42 vs. 22
  misc_feature: MA Experiment 20000173 PARAMETER Experiment Name: At_42deg_Heat_P Parameter: Timepoint (hr) Value: 6
  misc_feature: MA Experiment 20000173 PARAMETER Experiment Name: At_42deg_Heat_P Parameter: Tissue Value: Aerial
  misc_feature: MA Experiment ID: 20000436 Result: Down-regulated in Transcription
  misc_feature: MA Experiment 20000436 PARAMETER Experiment Name: At_Drought_P Parameter: Age (day) Value: 7
  misc_feature: MA Experiment 20000436 PARAMETER Experiment Name: At_Drought_P Parameter: Organism Value: A. thaliana
  misc_feature: MA Experiment 20000436 PARAMETER Experiment Name: At_Drought_P Parameter: Plant Line Value: WS
  misc_feature: MA Experiment 20000436 PARAMETER Experiment Name: At_Drought_P Parameter: Timepoint (hr) Value: 12
  misc_feature: MA Experiment 20000436 PARAMETER Experiment Name: At_Drought_P Parameter: Tissue Value: Whole Plant
  misc_feature: MA Experiment 20000436 PARAMETER Experiment Name: At_Drought_P Parameter: Treatment Value: Drought vs. No Drought
  misc_feature: MA Experiment ID: 20000437 Result: Down-regulated in Transcription
  misc_feature: MA Experiment 20000437 PARAMETER Experiment Name: At_Drought_P Parameter: Age (day) Value: 8
  misc_feature: MA Experiment 20000437 PARAMETER Experiment Name: At_Drought_P Parameter: Organism Value: A. thaliana
  misc_feature: MA Experiment 20000437 PARAMETER Experiment Name: At_Drought_P Parameter: Plant Line Value: WS
  misc_feature: MA Experiment 20000437 PARAMETER Experiment Name: At_Drought_P Parameter: Timepoint (hr) Value: 24
  misc_feature: MA Experiment 20000437 PARAMETER Experiment Name: At_Drought_P Parameter: Tissue Value: Whole Plant
  misc_feature: MA Experiment 20000437 PARAMETER Experiment Name: At_Drought_P Parameter: Treatment Value: Drought vs. No Drought

SEQ ID NO: 33473 - protein, 261 aa, Arabidopsis thaliana; identical to SEQ ID NO: 29883
  peptide (1)..(261): Ceres Seq. ID no. 13487756
  misc_feature (52)..(186): Pfam Name: Tim17/Tim22/Tim23 family Pfam Description: Tim17/Tim22/Tim23 family
  misc_feature (7)..(252): Homolog of NCBI NO: 32487911 NR Description: OJ000315_02.15 [Oryza sativa (japonica
  misc_feature (19)..(260): Homolog of NCBI NO: 21593899 NR Description: unknown [Arabidopsis thaliana]
  misc_feature (3)..(260): Homolog of NCBI NO: 15238598 NR Description: expressed protein [Arabidopsis thaliana]
  misc_feature (1)..(261): Homolog of NCBI NO: 15229167 NR Description: expressed protein [Arabidopsis thaliana]

SEQ ID NO: 33474 - protein, 244 aa, Arabidopsis thaliana; identical to SEQ ID NO: 29884
  peptide (1)..(244): Ceres Seq. ID no. 13487757
  misc_feature (35)..(169): Pfam Name: Tim17/Tim22/Tim23 family Pfam Description: Tim17/Tim22/Tim23 family
  misc_feature (1)..(235): Homolog of NCBI NO: 32487911 NR Description: OJ000315_02.15 [Oryza sativa (japonica
  misc_feature (2)..(243): Homolog of NCBI NO: 21593899 NR Description: unknown [Arabidopsis thaliana]
  misc_feature (1)..(243): Homolog of NCBI NO: 15238598 NR Description: expressed protein [Arabidopsis thaliana]
  misc_feature (1)..(244): Homolog of NCBI NO: 15229167 NR Description: expressed protein [Arabidopsis thaliana]

SEQ ID NO: 33475 - protein, 243 aa, Arabidopsis thaliana; identical to SEQ ID NO: 29885
  peptide (1)..(243): Ceres Seq. ID no. 13487758
  misc_feature (34)..(168): Pfam Name: Tim17/Tim22/Tim23 family Pfam Description: Tim17/Tim22/Tim23 family
  misc_feature (1)..(234): Homolog of NCBI NO: 32487911 NR Description: OJ000315_02.15 [Oryza sativa (japonica
  misc_feature (1)..(242): Homolog of NCBI NO: 21593899 NR Description: unknown [Arabidopsis thaliana]
  misc_feature (1)..(242): Homolog of NCBI NO: 15238598 NR Description: expressed protein [Arabidopsis thaliana]
  misc_feature (1)..(243): Homolog of NCBI NO: 15229167 NR Description: expressed protein [Arabidopsis thaliana]

SEQ ID NO: 33476 - DNA, 1277 bp, Arabidopsis thaliana; identical to SEQ ID NO: 29886
  misc_feature (1)..(1277): Ceres Seq. ID no. 12370517
  misc_feature: MA Experiment ID: 108434 Result: Down-regulated in Transcription
  misc_feature: MA Experiment 108434 PARAMETER Experiment Name: At_Root_Tips_cDNA_P Parameter: Tissue Value: Root Tips
  misc_feature: MA Experiment ID: 108595 Result: Down-regulated in Transcription
  misc_feature: MA Experiment 108595 PARAMETER Experiment Name: At_Ler-pi_Ovule_cDNA_P Parameter: Plant Line Value: null
  misc_feature: MA Experiment ID: 20000113 Result: Down-regulated in Transcription
  misc_feature: MA Experiment 20000113 PARAMETER Experiment Name: At_42deg_Heat_cDNA_P Parameter: Temperature (deg C) Value: 42 vs. 22
  misc_feature: MA Experiment 20000113 PARAMETER Experiment Name: At_42deg_Heat_cDNA_P Parameter: Timepoint (hr) Value: 8
  misc_feature: MA Experiment 20000113 PARAMETER Experiment Name: At_42deg_Heat_cDNA_P Parameter: Tissue Value: Aerial
  misc_feature: MA Experiment ID: 20000171 Result: Down-regulated in Transcription
  misc_feature: MA Experiment 20000171 PARAMETER Experiment Name: At_42deg_Heat_P Parameter: Age (day) Value: 14
  misc_feature: MA Experiment 20000171 PARAMETER Experiment Name: At_42deg_Heat_P Parameter: Organism Value: A. thaliana
  misc_feature: MA Experiment 20000171 PARAMETER Experiment Name: At_42deg_Heat_P Parameter: Plant Line Value: WS
  misc_feature: MA Experiment 20000171 PARAMETER Experiment Name: At_42deg_Heat_P Parameter: Temperature (deg C) Value: 42 vs. 22
  misc_feature: MA Experiment 20000171 PARAMETER Experiment Name: At_42deg_Heat_P Parameter: Timepoint (hr) Value: 1
  misc_feature: MA Experiment 20000171 PARAMETER Experiment Name: At_42deg_Heat_P Parameter: Tissue Value: Aerial
  misc_feature: MA Experiment ID: 20000173 Result: Down-regulated in Transcription
  misc_feature: MA Experiment 20000173 PARAMETER Experiment Name: At_42deg_Heat_P Parameter: Age (day) Value: 14
  misc_feature: MA Experiment 20000173 PARAMETER Experiment Name: At_42deg_Heat_P Parameter: Organism Value: A. thaliana
  misc_feature: MA Experiment 20000173 PARAMETER Experiment Name: At_42deg_Heat_P Parameter: Plant Line Value: WS
  misc_feature: MA Experiment 20000173 PARAMETER Experiment Name: At_42deg_Heat_P Parameter: Temperature (deg C) Value: 42 vs. 22
  misc_feature: MA Experiment 20000173 PARAMETER Experiment Name: At_42deg_Heat_P Parameter: Timepoint (hr) Value: 6
  misc_feature: MA Experiment 20000173 PARAMETER Experiment Name: At_42deg_Heat_P Parameter: Tissue Value: Aerial
  misc_feature: MA Experiment ID: 20000184 Result: Down-regulated in Transcription
  misc_feature: MA Experiment 20000184 PARAMETER Experiment Name: At_Shoots__P Parameter: Age (day) Value: 7
  misc_feature: MA Experiment 20000184 PARAMETER Experiment Name: At_Shoots__P Parameter: Tissue Value: Shoots vs. Whole Plant
  misc_feature: MA Experiment ID: 20000234 Result: Down-regulated in Transcription
  misc_feature: MA Experiment 20000234 PARAMETER Experiment Name: At_Siliques_P Parameter: Age (day) Value: 21
  misc_feature: MA Experiment 20000234 PARAMETER Experiment Name: At_Siliques_P Parameter: Organism Value: A. thaliana
  misc_feature: MA Experiment 20000234 PARAMETER Experiment Name: At_Siliques_P Parameter: Plant Line Value: WS
  misc_feature: MA Experiment 20000234 PARAMETER Experiment Name: At_Siliques_P Parameter: Tissue Value: Less Than 5mm Siliques vs. Whole Plant
  misc_feature: MA Experiment ID: 20001247 Result: Up-regulated in Transcription
  misc_feature: MA Experiment 20001247 PARAMETER Experiment Name: At_Far-red-induction_P Parameter: Age (day) Value: 7
  misc_feature: MA Experiment 20001247 PARAMETER Experiment Name: At_Far-red-induction_P Parameter: Light Value: Far-red vs. White
  misc_feature: MA Experiment 20001247 PARAMETER Experiment Name: At_Far-red-induction_P Parameter: Organism Value: A. thaliana
  misc_feature: MA Experiment 20001247 PARAMETER Experiment Name: At_Far-red-induction_P Parameter: Plant Line Value: Columbia
  misc_feature: MA Experiment 20001247 PARAMETER Experiment Name: At_Far-red-induction_P Parameter: Timepoint (hr) Value: 1
  misc_feature: MA Experiment 20001247 PARAMETER Experiment Name: At_Far-red-induction_P Parameter: Tissue Value: Whole Plant
  misc_feature: MA Experiment ID: 20001557 Result: Up-regulated in Transcription
  misc_feature: MA Experiment 20001557 PARAMETER Experiment Name: At_Drought_Soil_Dry_P Parameter: Age (day) Value: 27
  misc_feature: MA Experiment 20001557 PARAMETER Experiment Name: At_Drought_Soil_Dry_P Parameter: Organism Value: A. thaliana
  misc_feature: MA Experiment 20001557 PARAMETER Experiment Name: At_Drought_Soil_Dry_P Parameter: Plant Line Value: WS
  misc_feature: MA Experiment 20001557 PARAMETER Experiment Name: At_Drought_Soil_Dry_P Parameter: Post Timepoint (hr) Value: 3
  misc_feature: MA Experiment 20001557 PARAMETER Experiment Name: At_Drought_Soil_Dry_P Parameter: Post-Treatment Value: Re-Water vs. No Drought
  misc_feature: MA Experiment 20001557 PARAMETER Experiment Name: At_Drought_Soil_Dry_P Parameter: Timepoint (day) Value: 13
  misc_feature: MA Experiment 20001557 PARAMETER Experiment Name: At_Drought_Soil_Dry_P Parameter: Treatment Value: Drought vs. No Drought
  misc_feature: MA Experiment ID: 20001558 Result: Up-regulated in Transcription
  misc_feature: MA Experiment 20001558 PARAMETER Experiment Name: At_Drought_Soil_Dry_P Parameter: Age (day) Value: 27
  misc_feature: MA Experiment 20001558 PARAMETER Experiment Name: At_Drought_Soil_Dry_P Parameter: Organism Value: A. thaliana
  misc_feature: MA Experiment 20001558 PARAMETER Experiment Name: At_Drought_Soil_Dry_P Parameter: Plant Line Value: WS
  misc_feature: MA Experiment 20001558 PARAMETER Experiment Name: At_Drought_Soil_Dry_P Parameter: Post Timepoint (hr) Value: 6
  misc_feature: MA Experiment 20001558 PARAMETER Experiment Name: At_Drought_Soil_Dry_P Parameter: Post-Treatment Value: Re-Water vs. No Drought
  misc_feature: MA Experiment 20001558 PARAMETER Experiment Name: At_Drought_Soil_Dry_P Parameter: Timepoint (day) Value: 13
  misc_feature: MA Experiment 20001558 PARAMETER Experiment Name: At_Drought_Soil_Dry_P Parameter: Treatment Value: Drought vs. No Drought

SEQ ID NO: 33477 - protein, 169 aa, Arabidopsis thaliana; identical to SEQ ID NO: 29887
  peptide (1)..(169): Ceres Seq. ID no. 12370518
  misc_feature (1)..(11): Homolog of NCBI NO: 40253501 NR Description: clathrin-coat assembly protein-like
  misc_feature (1)..(12): Homolog of NCBI NO: 18396454 NR Description: putative clathrin-coat assembly protein
  misc_feature (1)..(12): Homolog of NCBI NO: 25403328 NR Description: protein T22C5.15 [imported] - Arabidopsis
  misc_feature (1)..(164): Homolog of NCBI NO: 7486766 NR Description: hypothetical protein F9N11.90 - Arabidopsis
  misc_feature (1)..(166): Homolog of NCBI NO: 18417554 NR Description: putative protein
  misc_feature (1)..(129): Homolog of NCBI NO: 7485788 NR Description: hypothetical protein At2g18860 [imported] -
  misc_feature (1)..(169): Homolog of NCBI NO: 30680486 NR Description: expressed protein [Arabidopsis thaliana]

SEQ ID NO: 33478 - protein, 136 aa, Arabidopsis thaliana; identical to SEQ ID NO: 29888
  peptide (1)..(136): Ceres Seq. ID no. 12370519
  misc_feature (1)..(131): Homolog of NCBI NO: 7486766 NR Description: hypothetical protein F9N11.90 - Arabidopsis
  misc_feature (1)..(133): Homolog of NCBI NO: 18417554 NR Description: putative protein
  misc_feature (1)..(96): Homolog of NCBI NO: 7485788 NR Description: hypothetical protein At2g18860 [imported] -
  misc_feature (1)..(136): Homolog of NCBI NO: 30680486 NR Description: expressed protein [Arabidopsis thaliana]

SEQ ID NO: 33479 - protein, 86 aa, Arabidopsis thaliana; identical to SEQ ID NO: 29889
  peptide (1)..(86): Ceres Seq. ID no. 12370520
  misc_feature (24)..(85): Homolog of NCBI NO: 26006490 NR Description: Hypothetical protein [Oryza sativa (japonica
  misc_feature (10)..(82): Homolog of NCBI NO: 40253501 NR Description: clathrin-coat assembly protein-like
  misc_feature (9)..(82): Homolog of NCBI NO: 18396454 NR Description: putative clathrin-coat assembly protein
  misc_feature (9)..(82): Homolog of NCBI NO: 25403328 NR Description: protein T22C5.15 [imported] - Arabidopsis
  misc_feature (10)..(86): Homolog of NCBI NO: 7486766 NR Description: hypothetical protein F9N11.90 - Arabidopsis
  misc_feature (10)..(86): Homolog of NCBI NO: 18417554 NR Description: putative protein
  misc_feature (10)..(82): Homolog of NCBI NO: 7485788 NR Description: hypothetical protein At2g18860 [imported] -
  misc_feature (10)..(82): Homolog of NCBI NO: 30680486 NR Description: expressed protein [Arabidopsis thaliana]

SEQ ID NO: 33480 - DNA, 1647 bp, Arabidopsis thaliana; identical to SEQ ID NO: 29890
  misc_feature (1)..(1647): Ceres Seq. ID no. 13492901
  misc_feature: MA Experiment ID: 108461 Result: Down-regulated in Transcription
  misc_feature: MA Experiment 108461 PARAMETER Experiment Name: At_Germinating_Seeds_cDNA_P Parameter: Age (day) Value: 1 vs. 0
  misc_feature: MA Experiment 108461 PARAMETER Experiment Name: At_Germinating_Seeds_cDNA_P Parameter: Tissue Value: Germinating Seeds
  misc_feature: MA Experiment ID: 108462 Result: Down-regulated in Transcription
  misc_feature: MA Experiment 108462 PARAMETER Experiment Name: At_Germinating_Seeds_cDNA_P Parameter: Age (day) Value: 2 vs. 0
  misc_feature: MA Experiment 108462 PARAMETER Experiment Name: At_Germinating_Seeds_cDNA_P Parameter: Tissue Value: Germinating Seeds
  misc_feature: MA Experiment ID: 108463 Result: Down-regulated in Transcription
  misc_feature: MA Experiment 108463 PARAMETER Experiment Name: At_Germinating_Seeds_cDNA_P Parameter: Age (day) Value: 3 vs. 0
  misc_feature: MA Experiment 108463 PARAMETER Experiment Name: At_Germinating_Seeds_cDNA_P Parameter: Tissue Value: Germinating Seeds
  misc_feature: MA Experiment ID: 108464 Result: Down-regulated in Transcription
  misc_feature: MA Experiment 108464 PARAMETER Experiment Name: At_Germinating_Seeds_cDNA_P Parameter: Age (day) Value: 4 vs. 0
  misc_feature: MA Experiment 108464 PARAMETER Experiment Name: At_Germinating_Seeds_cDNA_P Parameter: Tissue Value: Germinating Seeds
  misc_feature: MA Experiment ID: 108573 Result: Up-regulated in Transcription
  misc_feature: MA Experiment 108573 PARAMETER Experiment Name: At_Drought_cDNA_P Parameter: Timepoint (hr) Value: 6
  misc_feature: MA Experiment 108573 PARAMETER Experiment Name: At_Drought_cDNA_P Parameter: Tissue Value: Aerial
  misc_feature: MA Experiment 108573 PARAMETER Experiment Name: At_Drought_cDNA_P Parameter: Treatment Value: Drought vs. No Drought
  misc_feature: MA Experiment ID: 108579 Result: Down-regulated in Transcription
  misc_feature: MA Experiment 108579 PARAMETER Experiment Name: At_4deg_Cold_cDNA_P Parameter: Temperature (deg C) Value: 4 vs. 22
  misc_feature: MA Experiment 108579 PARAMETER Experiment Name: At_4deg_Cold_cDNA_P Parameter: Timepoint (hr) Value: 6
  misc_feature: MA Experiment 108579 PARAMETER Experiment Name: At_4deg_Cold_cDNA_P Parameter: Tissue Value: Aerial
  misc_feature: MA Experiment ID: 20000180 Result: Down-regulated in Transcription
  misc_feature: MA Experiment 20000180 PARAMETER Experiment Name: At_Germinating_Seeds_P Parameter: Age (hr) Value: 24 vs. 0
  misc_feature: MA Experiment 20000180 PARAMETER Experiment Name: At_Germinating_Seeds_P Parameter: Tissue Value: Germinating Seeds
  misc_feature: MA Experiment ID: 20000184 Result: Down-regulated in Transcription
  misc_feature: MA Experiment 20000184 PARAMETER Experiment Name: At_Shoots__P Parameter: Age (day) Value: 7
  misc_feature: MA Experiment 20000184 PARAMETER Experiment Name: At_Shoots__P Parameter: Tissue Value: Shoots vs. Whole Plant
  misc_feature: MA Experiment ID: 20000496 Result: Up-regulated in Transcription
  misc_feature: MA Experiment 20000496 PARAMETER Experiment Name: At_Guard_Cells_P Parameter: Harvest Date Value: 7/19/2002
  misc_feature: MA Experiment 20000496 PARAMETER Experiment Name: At_Guard_Cells_P Parameter: Organism Value: Canola
  misc_feature: MA Experiment 20000496 PARAMETER Experiment Name: At_Guard_Cells_P Parameter: Tissue Value: Guard Cells vs. Leaves

SEQ ID NO: 33481 - protein, 499 aa, Arabidopsis thaliana; identical to SEQ ID NO: 29891
  peptide (1)..(499): Ceres Seq. ID no. 13492902
  misc_feature (49)..(450): Pfam Name: Eukaryotic aspartyl protease Pfam Description: Eukaryotic aspartyl protease
  misc_feature (83)..(456): Homolog of NCBI NO: 33340111 NR Description: nucellin-like protein [Oryza sativa]
  misc_feature (106)..(454): Homolog of NCBI NO: 21805926 NR Description: nucellin-like aspartic protease [Zea mays]
  misc_feature (405)..(458): Homolog of NCBI NO: 7484812 NR Description: aspartic proteinase homolog F17M5.250 -
  misc_feature (84)..(403): Homolog of NCBI NO: 7484812 NR Description: aspartic proteinase homolog F17M5.250 -
  misc_feature (81)..(458): Homolog of NCBI NO: 26452545 NR Description: putative nucellin [Arabidopsis thaliana]
  misc_feature (81)..(458): Homolog of NCBI NO: 18418224 NR Description: nucellin protein, putative [Arabidopsis thaliana]
  misc_feature (84)..(456): Homolog of NCBI NO: 15219354 NR Description: nucellin protein, putative [Arabidopsis thaliana]
  misc_feature (34)..(456): Homolog of NCBI NO: 25350204 NR Description: nucellin-like protein, 27671-25467
  misc_feature (34)..(456): Homolog of NCBI NO: 30699263 NR Description: nucellin protein, putative [Arabidopsis thaliana]
  misc_feature (34)..(499): Homolog of NCBI NO: 30699261 NR Description: nucellin protein, putative [Arabidopsis thaliana]

SEQ ID NO: 33482 - protein, 466 aa, Arabidopsis thaliana; identical to SEQ ID NO: 29892
  peptide (1)..(466): Ceres Seq. ID no. 13492903
  misc_feature (16)..(417): Pfam Name: Eukaryotic aspartyl protease Pfam Description: Eukaryotic aspartyl protease
  misc_feature (50)..(423): Homolog of NCBI NO: 33340111 NR Description: nucellin-like protein [Oryza sativa]
  misc_feature (73)..(421): Homolog of NCBI NO: 21805926 NR Description: nucellin-like aspartic protease [Zea mays]
  misc_feature (372)..(425): Homolog of NCBI NO: 7484812 NR Description: aspartic proteinase homolog F17M5.250 -
  misc_feature (51)..(370): Homolog of NCBI NO: 7484812 NR Description: aspartic proteinase homolog F17M5.250 -
  misc_feature (48)..(425): Homolog of NCBI NO: 26452545 NR Description: putative nucellin [Arabidopsis thaliana]
  misc_feature (48)..(425): Homolog of NCBI NO: 18418224 NR Description: nucellin protein, putative [Arabidopsis thaliana]
  misc_feature (51)..(423): Homolog of NCBI NO: 15219354 NR Description: nucellin protein, putative [Arabidopsis thaliana]
  misc_feature (1)..(423): Homolog of NCBI NO: 25350204 NR Description: nucellin-like protein, 27671-25467
  misc_feature (1)..(423): Homolog of NCBI NO: 30699263 NR Description: nucellin protein, putative [Arabidopsis thaliana]
  misc_feature (1)..(466): Homolog of NCBI NO: 30699261 NR Description: nucellin protein, putative [Arabidopsis thaliana]

SEQ ID NO: 33483 - protein, 465 aa, Arabidopsis thaliana; identical to SEQ ID NO: 29893
  peptide (1)..(465): Ceres Seq. ID no. 13492904
  misc_feature (15)..(416): Pfam Name: Eukaryotic aspartyl protease Pfam Description: Eukaryotic aspartyl protease
  misc_feature (49)..(422): Homolog of NCBI NO: 33340111 NR Description: nucellin-like protein [Oryza sativa]
  misc_feature (72)..(420): Homolog of NCBI NO: 21805926 NR Description: nucellin-like aspartic protease [Zea mays]
  misc_feature (371)..(424): Homolog of NCBI NO: 7484812 NR Description: aspartic proteinase homolog F17M5.250 -
  misc_feature (50)..(369): Homolog of NCBI NO: 7484812 NR Description: aspartic proteinase homolog F17M5.250 -
  misc_feature (47)..(424): Homolog of NCBI NO: 26452545 NR Description: putative nucellin [Arabidopsis thaliana]
  misc_feature (47)..(424): Homolog of NCBI NO: 18418224 NR Description: nucellin protein, putative [Arabidopsis thaliana]
  misc_feature (50)..(422): Homolog of NCBI NO: 15219354 NR Description: nucellin protein, putative [Arabidopsis thaliana]
  misc_feature (1)..(422): Homolog of NCBI NO: 25350204 NR Description: nucellin-like protein, 27671-25467
  misc_feature (1)..(422): Homolog of NCBI NO: 30699263 NR Description: nucellin protein, putative [Arabidopsis thaliana]
  misc_feature (1)..(465): Homolog of NCBI NO: 30699261 NR Description: nucellin protein, putative [Arabidopsis thaliana]

SEQ ID NO: 33484 - DNA, 1232 bp, Arabidopsis thaliana; identical to SEQ ID NO: 29894
  misc_feature (1)..(1232): Ceres Seq. ID no. 13490604
  misc_feature: MA Experiment ID: 108573 Result: Up-regulated in Transcription
  misc_feature: MA Experiment 108573 PARAMETER Experiment Name: At_Drought_cDNA_P Parameter: Timepoint (hr) Value: 6
  misc_feature: MA Experiment 108573 PARAMETER Experiment Name: At_Drought_cDNA_P Parameter: Tissue Value: Aerial
  misc_feature: MA Experiment 108573 PARAMETER Experiment Name: At_Drought_cDNA_P Parameter: Treatment Value: Drought vs. No Drought
  misc_feature: MA Experiment ID: 20000111 Result: Up-regulated in Transcription
  misc_feature: MA Experiment 20000111 PARAMETER Experiment Name: At_42deg_Heat_cDNA_P Parameter: Temperature (deg C) Value: 42 vs. 22
  misc_feature: MA Experiment 20000111 PARAMETER Experiment Name: At_42deg_Heat_cDNA_P Parameter: Timepoint (hr) Value: 6
  misc_feature: MA Experiment 20000111 PARAMETER Experiment Name: At_42deg_Heat_cDNA_P Parameter: Tissue Value: Aerial
  misc_feature: MA Experiment ID: 20000112 Result: Up-regulated in Transcription
  misc_feature: MA Experiment 20000112 PARAMETER Experiment Name: At_42deg_Heat_cDNA_P Parameter: Temperature (deg C) Value: 42 vs. 22
  misc_feature: MA Experiment 20000112 PARAMETER Experiment Name: At_42deg_Heat_cDNA_P Parameter: Timepoint (hr) Value: 2
  misc_feature: MA Experiment 20000112 PARAMETER Experiment Name: At_42deg_Heat_cDNA_P Parameter: Tissue Value: Aerial
  misc_feature: MA Experiment ID: 20000113 Result: Up-regulated in Transcription
  misc_feature: MA Experiment 20000113 PARAMETER Experiment Name: At_42deg_Heat_cDNA_P Parameter: Temperature (deg C) Value: 42 vs. 22
  misc_feature: MA Experiment 20000113 PARAMETER Experiment Name: At_42deg_Heat_cDNA_P Parameter: Timepoint (hr) Value: 8
  misc_feature: MA Experiment 20000113 PARAMETER Experiment Name: At_42deg_Heat_cDNA_P Parameter: Tissue Value: Aerial
  misc_feature: MA Experiment ID: 20000171 Result: Up-regulated in Transcription
  misc_feature: MA Experiment 20000171 PARAMETER Experiment Name: At_42deg_Heat_P Parameter: Age (day) Value: 14
  misc_feature: MA Experiment 20000171 PARAMETER Experiment Name: At_42deg_Heat_P Parameter: Organism Value: A. thaliana
  misc_feature: MA Experiment 20000171 PARAMETER Experiment Name: At_42deg_Heat_P Parameter: Plant Line Value: WS
  misc_feature: MA Experiment 20000171 PARAMETER Experiment Name: At_42deg_Heat_P Parameter: Temperature (deg C) Value: 42 vs. 22
  misc_feature: MA Experiment 20000171 PARAMETER Experiment Name: At_42deg_Heat_P Parameter: Timepoint (hr) Value: 1
  misc_feature: MA Experiment 20000171 PARAMETER Experiment Name: At_42deg_Heat_P Parameter: Tissue Value: Aerial
  misc_feature: MA Experiment ID: 20000173 Result: Up-regulated in Transcription
  misc_feature: MA Experiment 20000173 PARAMETER Experiment Name: At_42deg_Heat_P Parameter: Age (day) Value: 14
  misc_feature: MA Experiment 20000173 PARAMETER Experiment Name: At_42deg_Heat_P Parameter: Organism Value: A. thaliana
  misc_feature: MA Experiment 20000173 PARAMETER Experiment Name: At_42deg_Heat_P Parameter: Plant Line Value: WS
  misc_feature: MA Experiment 20000173 PARAMETER Experiment Name: At_42deg_Heat_P Parameter: Temperature (deg C) Value: 42 vs. 22
  misc_feature: MA Experiment 20000173 PARAMETER Experiment Name: At_42deg_Heat_P Parameter: Timepoint (hr) Value: 6
  misc_feature: MA Experiment 20000173 PARAMETER Experiment Name: At_42deg_Heat_P Parameter: Tissue Value: Aerial
  misc_feature: MA Experiment ID: 20001905 Result: Up-regulated in Transcription
  misc_feature: MA Experiment 20001905 PARAMETER Experiment Name: At_Drought_Reproduction_P Parameter: Age (day) Value: 40
  misc_feature: MA Experiment 20001905 PARAMETER Experiment Name: At_Drought_Reproduction_P Parameter: Organism Value: A. thaliana
  misc_feature: MA Experiment 20001905 PARAMETER Experiment Name: At_Drought_Reproduction_P Parameter: Plant Line Value: WS
  misc_feature: MA Experiment 20001905 PARAMETER Experiment Name: At_Drought_Reproduction_P Parameter: Timepoint (day) Value: 10
  misc_feature: MA Experiment 20001905 PARAMETER Experiment Name: At_Drought_Reproduction_P Parameter: Tissue Value: Rosettes
  misc_feature: MA Experiment 20001905 PARAMETER Experiment Name: At_Drought_Reproduction_P Parameter: Treatment Value: Drought vs. No Drought

SEQ ID NO: 33485 - protein, 310 aa, Arabidopsis thaliana; identical to SEQ ID NO: 29895
  peptide (1)..(310): Ceres Seq. ID no. 13490605
  misc_feature (146)..(276): Homolog of NCBI NO: 32414767 NR Description: hypothetical protein [Neurospora crassa]
  misc_feature (4)..(291): Homolog of NCBI NO: 13384956 NR Description: RIKEN cDNA 2310061K06 [Mus musculus]
  misc_feature (4)..(292): Homolog of NCBI NO: 15030017 NR Description: Similar to eNOS interacting protein [Homo sapiens]
  misc_feature (4)..(291): Homolog of NCBI NO: 27731403 NR Description: similar to RIKEN cDNA 2310061K06
  misc_feature (4)..(292): Homolog of NCBI NO: 7705716 NR Description: eNOS interacting protein; CGI-25 protein [Homo
  misc_feature (4)..(292): Homolog of NCBI NO: 38174118 NR Description: Unknown (protein for MGC:75989) [Silurana
  misc_feature (4)..(292): Homolog of NCBI NO: 24643007 NR Description: CG6179-PA [Drosophila melanogaster]
  misc_feature (4)..(294): Homolog of NCBI NO: 31213459 NR Description: ENSANGP00000021661 [Anopheles gambiae]
  misc_feature (1)..(310): Homolog of NCBI NO: 18407260 NR Description: expressed protein [Arabidopsis thaliana]
  misc_feature (1)..(310): Homolog of NCBI NO: 26449463 NR Description: unknown protein [Arabidopsis thaliana]

SEQ ID NO: 33486 - protein, 257 aa, Arabidopsis thaliana; identical to SEQ ID NO: 29896
  peptide (1)..(257): Ceres Seq. ID no. 13490606
  misc_feature (93)..(223): Homolog of NCBI NO: 32414767 NR Description: hypothetical protein [Neurospora crassa]
  misc_feature (1)..(238): Homolog of NCBI NO: 13384956 NR Description: RIKEN cDNA 2310061K06 [Mus musculus]
  misc_feature (1)..(239): Homolog of NCBI NO: 15030017 NR Description: Similar to eNOS interacting protein [Homo sapiens]
  misc_feature (1)..(238): Homolog of NCBI NO: 27731403 NR Description: similar to RIKEN cDNA 2310061K06
  misc_feature (1)..(239): Homolog of NCBI NO: 7705716 NR Description: eNOS interacting protein; CGI-25 protein [Homo
  misc_feature (1)..(239): Homolog of NCBI NO: 38174118 NR Description: Unknown (protein for MGC:75989) [Silurana
  misc_feature (1)..(239): Homolog of NCBI NO: 24643007 NR Description: CG6179-PA [Drosophila melanogaster]
  misc_feature (1)..(241): Homolog of NCBI NO: 31213459 NR Description: ENSANGP00000021661 [Anopheles gambiae]
  misc_feature (1)..(257): Homolog of NCBI NO: 18407260 NR Description: expressed protein [Arabidopsis thaliana]
  misc_feature (1)..(257): Homolog of NCBI NO: 26449463 NR Description: unknown protein [Arabidopsis thaliana]

SEQ ID NO: 33487 - protein, 244 aa, Arabidopsis thaliana; identical to SEQ ID NO: 29897
  peptide (1)..(244): Ceres Seq. ID no. 13490607
  misc_feature (80)..(210): Homolog of NCBI NO: 32414767 NR Description: hypothetical protein [Neurospora crassa]
  misc_feature (1)..(225): Homolog of NCBI NO: 13384956 NR Description: RIKEN cDNA 2310061K06 [Mus musculus]
  misc_feature (1)..(226): Homolog of NCBI NO: 15030017 NR Description: Similar to eNOS interacting protein [Homo sapiens]
  misc_feature (1)..(225): Homolog of NCBI NO: 27731403 NR Description: similar to RIKEN cDNA 2310061K06
  misc_feature (1)..(226): Homolog of NCBI NO: 7705716 NR Description: eNOS interacting protein; CGI-25 protein [Homo
  misc_feature (1)..(226): Homolog of NCBI NO: 38174118 NR Description: Unknown (protein for MGC:75989) [Silurana
  misc_feature (1)..(226): Homolog of NCBI NO: 24643007 NR Description: CG6179-PA [Drosophila melanogaster]
  misc_feature (1)..(228): Homolog of NCBI NO: 31213459 NR Description: ENSANGP00000021661 [Anopheles gambiae]
  misc_feature (1)..(244): Homolog of NCBI NO: 18407260 NR Description: expressed protein [Arabidopsis thaliana]
  misc_feature (1)..(244): Homolog of NCBI NO: 26449463 NR Description: unknown protein [Arabidopsis thaliana]

SEQ ID NO: 33488 - DNA, 1821 bp, Arabidopsis thaliana; identical to SEQ ID NO: 29898
  misc_feature (1)..(1821): Ceres Seq. ID no. 13490490
  misc_feature: MA Experiment ID: 108434 Result: Down-regulated in Transcription
  misc_feature: MA Experiment 108434 PARAMETER Experiment Name: At_Root_Tips_cDNA_P Parameter: Tissue Value: Root Tips
  misc_feature: MA Experiment ID: 108463 Result: Up-regulated in Transcription
  misc_feature: MA Experiment 108463 PARAMETER Experiment Name: At_Germinating_Seeds_cDNA_P Parameter: Age (day) Value: 3 vs. 0
  misc_feature: MA Experiment 108463 PARAMETER Experiment Name: At_Germinating_Seeds_cDNA_P Parameter: Tissue Value: Germinating Seeds
  misc_feature: MA Experiment ID: 108464 Result: Up-regulated in Transcription
  misc_feature: MA Experiment 108464 PARAMETER Experiment Name: At_Germinating_Seeds_cDNA_P Parameter: Age (day) Value: 4 vs. 0
  misc_feature: MA Experiment 108464 PARAMETER Experiment Name: At_Germinating_Seeds_cDNA_P Parameter: Tissue Value: Germinating Seeds
  misc_feature: MA Experiment ID: 108488 Result: Down-regulated in Transcription
  misc_feature: MA Experiment ID: 108489 Result: Up-regulated in Transcription
  misc_feature: MA Experiment ID: 108561 Result: Up-regulated in Transcription
  misc_feature: MA Experiment 108561 PARAMETER Experiment Name: At_100uM_ABA_cDNA_P Parameter: Timepoint (hr) Value: 6
  misc_feature: MA Experiment 108561 PARAMETER Experiment Name: At_100uM_ABA_cDNA_P Parameter: Tissue Value: Aerial
  misc_feature: MA Experiment 108561 PARAMETER Experiment Name: At_100uM_ABA_cDNA_P Parameter: Treatment Value: 100uM ABA vs. No Treatment
  misc_feature: MA Experiment ID: 108572 Result: Up-regulated in Transcription
  misc_feature: MA Experiment 108572 PARAMETER Experiment Name: At_Drought_cDNA_P Parameter: Timepoint (hr) Value: 1
  misc_feature: MA Experiment 108572 PARAMETER Experiment Name: At_Drought_cDNA_P Parameter: Tissue Value: Aerial
  misc_feature: MA Experiment 108572 PARAMETER Experiment Name: At_Drought_cDNA_P Parameter: Treatment Value: Drought vs. No Drought
  misc_feature: MA Experiment ID: 108573 Result: Up-regulated in Transcription
  misc_feature: MA Experiment 108573 PARAMETER Experiment Name: At_Drought_cDNA_P Parameter: Timepoint (hr) Value: 6
  misc_feature: MA Experiment 108573 PARAMETER Experiment Name: At_Drought_cDNA_P Parameter: Tissue Value: Aerial
  misc_feature: MA Experiment 108573 PARAMETER Experiment Name: At_Drought_cDNA_P Parameter: Treatment Value: Drought vs. No Drought
  misc_feature: MA Experiment ID: 108579 Result: Up-regulated in Transcription
  misc_feature: MA Experiment 108579 PARAMETER Experiment Name: At_4deg_Cold_cDNA_P Parameter: Temperature (deg C) Value: 4 vs. 22
  misc_feature: MA Experiment 108579 PARAMETER Experiment Name: At_4deg_Cold_cDNA_P Parameter: Timepoint (hr) Value: 6
  misc_feature: MA Experiment 108579 PARAMETER Experiment Name: At_4deg_Cold_cDNA_P Parameter: Tissue Value: Aerial
  misc_feature: MA Experiment ID: 108585 Result: Up-regulated in Transcription
  misc_feature: MA Experiment 108585 PARAMETER Experiment Name: At_5mM_NaNP_cDNA_P Parameter: Timepoint (hr) Value: 6
  misc_feature: MA Experiment 108585 PARAMETER Experiment Name: At_5mM_NaNP_cDNA_P Parameter: Tissue Value: Aerial
  misc_feature: MA Experiment 108585 PARAMETER Experiment Name: At_5mM_NaNP_cDNA_P Parameter: Treatment Value: null
  misc_feature: MA Experiment ID: 108605 Result: Up-regulated in Transcription
  misc_feature: MA Experiment 108605 PARAMETER Experiment Name: At_100uM_ABA_cDNA_P Parameter: Timepoint (hr) Value: 6
  misc_feature: MA Experiment 108605 PARAMETER Experiment Name: At_100uM_ABA_cDNA_P Parameter: Tissue Value: Aerial
  misc_feature: MA Experiment 108605 PARAMETER Experiment Name: At_100uM_ABA_cDNA_P Parameter: Treatment Value: 100uM ABA vs. No Treatment
  misc_feature: MA Experiment ID: 108607 Result: Up-regulated in Transcription
  misc_feature: MA Experiment 108607 PARAMETER Experiment Name: At_100uM_ABA_cDNA_P Parameter: Timepoint (hr) Value: 4
  misc_feature: MA Experiment 108607 PARAMETER Experiment Name: At_100uM_ABA_cDNA_P Parameter: Tissue Value: Aerial
  misc_feature: MA Experiment 108607 PARAMETER Experiment Name: At_100uM_ABA_cDNA_P Parameter: Treatment Value: 100uM ABA vs. No Treatment
  misc_feature: MA Experiment ID: 108609 Result: Up-regulated in Transcription
  misc_feature: MA Experiment 108609 PARAMETER Experiment Name: At_100uM_ABA_cDNA_P Parameter: Timepoint (hr) Value: 24
  misc_feature: MA Experiment 108609 PARAMETER Experiment Name: At_100uM_ABA_cDNA_P Parameter: Tissue Value: Aerial
  misc_feature: MA Experiment 108609 PARAMETER Experiment Name: At_100uM_ABA_cDNA_P Parameter: Treatment Value: 100uM ABA vs. No Treatment
  misc_feature: MA Experiment ID: 20000069 Result: Up-regulated in Transcription
  misc_feature: MA Experiment 20000069 PARAMETER Experiment Name: At_100uM_ABA_Mutants_cDNA_P Parameter: Plant Line Value: CS23
  misc_feature: MA Experiment 20000069 PARAMETER Experiment Name: At_100uM_ABA_Mutants_cDNA_P Parameter: Timepoint (hr) Value: 6
  misc_feature: MA Experiment 20000069 PARAMETER Experiment Name: At_100uM_ABA_Mutants_cDNA_P Parameter: Tissue Value: Aerial
  misc_feature: MA Experiment 20000069 PARAMETER Experiment Name: At_100uM_ABA_Mutants_cDNA_P Parameter: Treatment Value: 100uM ABA vs. No Treatment
  misc_feature: MA Experiment ID: 20000070 Result: Up-regulated in Transcription
  misc_feature: MA Experiment 20000070 PARAMETER Experiment Name: At_100uM_ABA_Mutants_cDNA_P Parameter: Plant Line Value: CS24
  misc_feature: MA Experiment 20000070 PARAMETER Experiment Name: At_100uM_ABA_Mutants_cDNA_P Parameter: Timepoint (hr) Value: 6
  misc_feature: MA Experiment 20000070 PARAMETER Experiment Name: At_100uM_ABA_Mutants_cDNA_P Parameter: Tissue Value: Aerial
  misc_feature: MA Experiment 20000070 PARAMETER Experiment Name: At_100uM_ABA_Mutants_cDNA_P Parameter: Treatment Value: 100uM ABA vs. No Treatment
  misc_feature: MA Experiment ID: 20000071 Result: Up-regulated in Transcription
  misc_feature: MA Experiment 20000071 PARAMETER Experiment Name: At_100uM_ABA_Mutants_cDNA_P Parameter: Plant Line Value: CS8104
  misc_feature: MA Experiment 20000071 PARAMETER Experiment Name: At_100uM_ABA_Mutants_cDNA_P Parameter: Timepoint (hr) Value: 6
  misc_feature: MA Experiment 20000071 PARAMETER Experiment Name: At_100uM_ABA_Mutants_cDNA_P Parameter: Tissue Value: Aerial
  misc_feature: MA Experiment 20000071 PARAMETER Experiment Name: At_100uM_ABA_Mutants_cDNA_P Parameter: Treatment Value: 100uM ABA vs. No Treatment
  misc_feature: MA Experiment ID: 20000072 Result: Up-regulated in Transcription
  misc_feature: MA Experiment 20000072 PARAMETER Experiment Name: At_100uM_ABA_Mutants_cDNA_P Parameter: Plant Line Value: CS8105
  misc_feature: MA Experiment 20000072 PARAMETER Experiment Name: At_100uM_ABA_Mutants_cDNA_P Parameter: Timepoint (hr) Value: 6
  misc_feature: MA Experiment 20000072 PARAMETER Experiment Name: At_100uM_ABA_Mutants_cDNA_P Parameter: Tissue Value: Aerial
  misc_feature: MA Experiment 20000072 PARAMETER Experiment Name: At_100uM_ABA_Mutants_cDNA_P Parameter: Treatment Value: 100uM ABA vs. No Treatment
  misc_feature: MA Experiment ID: 20000086 Result: Up-regulated in Transcription
  misc_feature: MA Experiment 20000086 PARAMETER Experiment Name: At_100uM_ABA_Mutants_cDNA_P Parameter: Plant Line Value: CS22
  misc_feature: MA Experiment 20000086 PARAMETER Experiment Name: At_100uM_ABA_Mutants_cDNA_P Parameter: Timepoint (hr) Value: 6
  misc_feature: MA Experiment 20000086 PARAMETER Experiment Name: At_100uM_ABA_Mutants_cDNA_P Parameter: Tissue Value: Aerial
  misc_feature: MA Experiment 20000086 PARAMETER Experiment Name: At_100uM_ABA_Mutants_cDNA_P Parameter: Treatment Value: 100uM ABA vs. No Treatment
  misc_feature: MA Experiment ID: 20000087 Result: Up-regulated in Transcription
  misc_feature: MA Experiment 20000087 PARAMETER Experiment Name: At_100uM_ABA_Mutants_cDNA_P Parameter: Plant Line Value: WS
  misc_feature: MA Experiment 20000087 PARAMETER Experiment Name: At_100uM_ABA_Mutants_cDNA_P Parameter: Timepoint (hr) Value: 6
  misc_feature: MA Experiment 20000087 PARAMETER Experiment Name: At_100uM_ABA_Mutants_cDNA_P Parameter: Tissue Value: Aerial
  misc_feature: MA Experiment 20000087 PARAMETER Experiment Name: At_100uM_ABA_Mutants_cDNA_P Parameter: Treatment Value: 100uM ABA vs. No Treatment
  misc_feature: MA Experiment ID: 20000088 Result: Up-regulated in Transcription
  misc_feature: MA Experiment 20000088 PARAMETER Experiment Name: At_100uM_ABA_Mutants_cDNA_P Parameter: Plant Line Value: Landsberg
  misc_feature: MA Experiment 20000088 PARAMETER Experiment Name: At_100uM_ABA_Mutants_cDNA_P Parameter: Timepoint (hr) Value: 6
  misc_feature: MA Experiment 20000088 PARAMETER Experiment Name: At_100uM_ABA_Mutants_cDNA_P Parameter: Tissue Value: Aerial
  misc_feature: MA Experiment 20000088 PARAMETER Experiment Name: At_100uM_ABA_Mutants_cDNA_P Parameter: Treatment Value: 100uM ABA vs. No Treatment
  misc_feature: MA Experiment ID: 20000117 Result: Up-regulated in Transcription
  misc_feature: MA Experiment 20000117 PARAMETER Experiment Name: At_100uM_ABA_Mutants_cDNA_P Parameter: Plant Line Value: Columbia
  misc_feature: MA Experiment 20000117 PARAMETER Experiment Name: At_100uM_ABA_Mutants_cDNA_P Parameter: Timepoint (hr) Value: 6
  misc_feature: MA Experiment 20000117 PARAMETER Experiment Name: At_100uM_ABA_Mutants_cDNA_P Parameter: Tissue Value: Aerial
  misc_feature: MA Experiment 20000117 PARAMETER Experiment Name: At_100uM_ABA_Mutants_cDNA_P Parameter: Treatment Value: 100uM ABA vs. No Treatment
  misc_feature: MA Experiment ID: 20000315 Result: Down-regulated in Transcription
  misc_feature: MA Experiment 20000315 PARAMETER Experiment Name: At_14day_Shoots-Roots_Sub_P Parameter: Age (day) Value: 14
  misc_feature: MA Experiment 20000315 PARAMETER Experiment Name: At_14day_Shoots-Roots_Sub_P Parameter: Organism Value: A. thaliana
  misc_feature: MA Experiment 20000315 PARAMETER Experiment Name: At_14day_Shoots-Roots_Sub_P Parameter: Plant Line Value: WS
  misc_feature: MA Experiment 20000315 PARAMETER Experiment Name: At_14day_Shoots-Roots_Sub_P Parameter: Tissue Value: Shoots vs. Whole Plant
  misc_feature: MA Experiment ID: 20000329 Result: Up-regulated in Transcription
  misc_feature: MA Experiment 20000329 PARAMETER Experiment Name: At_4deg_Cold_Sub_P Parameter: Age (day) Value: 14
  misc_feature: MA Experiment 20000329 PARAMETER Experiment Name: At_4deg_Cold_Sub_P Parameter: Organism Value: A. thaliana
  misc_feature: MA Experiment 20000329 PARAMETER Experiment Name: At_4deg_Cold_Sub_P Parameter: Plant Line Value: WS
  misc_feature: MA Experiment 20000329 PARAMETER Experiment Name: At_4deg_Cold_Sub_P Parameter: Temperature (deg C) Value: 4 vs. 22
  misc_feature: MA Experiment 20000329 PARAMETER Experiment Name: At_4deg_Cold_Sub_P Parameter: Timepoint (hr) Value: 6
  misc_feature: MA Experiment 20000329 PARAMETER Experiment Name: At_4deg_Cold_Sub_P Parameter: Tissue Value: Aerial
  misc_feature: MA Experiment ID: 20000349 Result: Up-regulated in Transcription
  misc_feature: MA Experiment 20000349 PARAMETER Experiment Name: At_100uM_ABA_Sub_P Parameter: Age (day) Value: 14
  misc_feature: MA Experiment 20000349 PARAMETER Experiment Name: At_100uM_ABA_Sub_P Parameter: Organism Value: A. thaliana
  misc_feature: MA Experiment 20000349 PARAMETER Experiment Name: At_100uM_ABA_Sub_P Parameter: Plant Line Value: WS
  misc_feature: MA Experiment 20000349 PARAMETER Experiment Name: At_100uM_ABA_Sub_P Parameter: Timepoint (hr) Value: 6
  misc_feature: MA Experiment 20000349 PARAMETER Experiment Name: At_100uM_ABA_Sub_P Parameter: Tissue Value: Aerial
  misc_feature: MA Experiment 20000349 PARAMETER Experiment Name: At_100uM_ABA_Sub_P Parameter: Treatment Value: 100uM ABA vs. No Treatment
  misc_feature: MA Experiment ID: 20000352 Result: Up-regulated in Transcription
  misc_feature: MA Experiment 20000352 PARAMETER Experiment Name: At_Drought_Sub_P Parameter: Age (day) Value: 7
  misc_feature: MA Experiment 20000352 PARAMETER Experiment Name: At_Drought_Sub_P Parameter: Organism Value: A. thaliana
  misc_feature: MA Experiment 20000352 PARAMETER Experiment Name: At_Drought_Sub_P Parameter: Plant Line Value: WS
  misc_feature: MA Experiment 20000352 PARAMETER Experiment Name: At_Drought_Sub_P Parameter: Timepoint (hr) Value: 6
  misc_feature: MA Experiment 20000352 PARAMETER Experiment Name: At_Drought_Sub_P Parameter: Tissue Value: Whole Plant
  misc_feature: MA Experiment 20000352 PARAMETER Experiment Name: At_Drought_Sub_P Parameter: Treatment Value: Drought vs. No Drought
  misc_feature: MA Experiment ID: 20000355 Result: Down-regulated in Transcription
  misc_feature: MA Experiment 20000355 PARAMETER Experiment Name: At_Siliques_Sub_P Parameter: Age (day) Value: 21
  misc_feature: MA Experiment 20000355 PARAMETER Experiment Name: At_Siliques_Sub_P Parameter: Organism Value: A. thaliana
  misc_feature: MA Experiment 20000355 PARAMETER Experiment Name: At_Siliques_Sub_P Parameter: Plant Line Value: WS
  misc_feature: MA Experiment 20000355 PARAMETER Experiment Name: At_Siliques_Sub_P Parameter: Tissue Value: Less Than 5mm Siliques vs. Whole Plant
  misc_feature: MA Experiment ID: 20000440 Result: Down-regulated in Transcription
  misc_feature: MA Experiment 20000440 PARAMETER Experiment Name: At_Closed-Flower__Sub_P Parameter: Tissue Value: Closed Flower vs. Whole Plant

SEQ ID NO: 33489 - protein, 470 aa, Arabidopsis thaliana; identical to SEQ ID NO: 29899
  peptide (1)..(470): Ceres Seq. ID no. 13490491
  misc_feature (34)..(465): Pfam Name: Sugar (and other) transporter Pfam Description: Sugar (and other) transporter
  misc_feature (1)..(465): Homolog of NCBI NO: 18421106 NR Description: sugar-porter family protein 1 [Arabidopsis
  misc_feature (10)..(466): Homolog of NCBI NO: 18397139 NR Description: sugar transporter, putative [Arabidopsis
  misc_feature (1)..(465): Homolog of NCBI NO: 14585699 NR Description: sugar-porter family protein 1 [Arabidopsis
  misc_feature (1)..(466): Homolog of NCBI NO: 18397141 NR Description: sugar transporter, putative [Arabidopsis thaliana]
  misc_feature (1)..(465): Homolog of NCBI NO: 18421108 NR Description: sugar-porter family protein 2 [Arabidopsis
  misc_feature (16)..(470): Homolog of NCBI NO: 18390959 NR Description: ERD6 protein [Arabidopsis thaliana]
  misc_feature (3)..(438): Homolog of NCBI NO: 25407065 NR Description: hypothetical protein [imported] - Arabidopsis
  misc_feature (1)..(470): Homolog of NCBI NO: 6686827 NR Description: putative sugar transporter [Arabidopsis thaliana]
  misc_feature (1)..(470): Homolog of NCBI NO: 30680865 NR Description: sugar transporter, putative [Arabidopsis thaliana]
  misc_feature (1)..(470): Homolog of NCBI NO: 18390957 NR Description: sugar transporter, putative [Arabidopsis

SEQ ID NO: 33490 - protein, 468 aa, Arabidopsis thaliana; identical to SEQ ID NO: 29900
  peptide (1)..(468): Ceres Seq. ID no. 13490492
  misc_feature (32)..(463): Pfam Name: Sugar (and other) transporter Pfam Description: Sugar (and other) transporter
  misc_feature (1)..(463): Homolog of NCBI NO: 18421106 NR Description: sugar-porter family protein 1 [Arabidopsis
  misc_feature (8)..(464): Homolog of NCBI NO: 18397139 NR Description: sugar transporter, putative [Arabidopsis
  misc_feature (1)..(463): Homolog of NCBI NO: 14585699 NR Description: sugar-porter family protein 1 [Arabidopsis
  misc_feature (1)..(464): Homolog of NCBI NO: 18397141 NR Description: sugar transporter, putative [Arabidopsis thaliana]
  misc_feature (1)..(463): Homolog of NCBI NO: 18421108 NR Description: sugar-porter family protein 2 [Arabidopsis
  misc_feature (14)..(468): Homolog of NCBI NO: 18390959 NR Description: ERD6 protein [Arabidopsis thaliana]
  misc_feature (1)..(436): Homolog of NCBI NO: 25407065 NR Description: hypothetical protein [imported] - Arabidopsis
  misc_feature (1)..(468): Homolog of NCBI NO: 6686827 NR Description: putative sugar transporter [Arabidopsis thaliana]
  misc_feature (1)..(468): Homolog of NCBI NO: 30680865 NR Description: sugar transporter, putative [Arabidopsis thaliana]
  misc_feature (1)..(468): Homolog of NCBI NO: 18390957 NR Description: sugar transporter, putative [Arabidopsis

SEQ ID NO: 33491 - protein, 398 aa, Arabidopsis thaliana; identical to SEQ ID NO: 29901
  peptide (1)..(398): Ceres Seq. ID no. 13490493
  misc_feature (1)..(393): Pfam Name: Sugar (and other) transporter Pfam Description: Sugar (and other) transporter
  misc_feature (1)..(393): Homolog of NCBI NO: 18421106 NR Description: sugar-porter family protein 1 [Arabidopsis
  misc_feature (1)..(394): Homolog of NCBI NO: 18397139 NR Description: sugar transporter, putative [Arabidopsis
  misc_feature (1)..(393): Homolog of NCBI NO: 14585699 NR Description: sugar-porter family protein 1 [Arabidopsis
  misc_feature (1)..(394): Homolog of NCBI NO: 18397141 NR Description: sugar transporter, putative [Arabidopsis thaliana]
  misc_feature (1)..(393): Homolog of NCBI NO: 18421108 NR Description: sugar-porter family protein 2 [Arabidopsis
  misc_feature (1)..(398): Homolog of NCBI NO: 18390959 NR Description: ERD6 protein [Arabidopsis thaliana]
  misc_feature (1)..(366): Homolog of NCBI NO: 25407065 NR Description: hypothetical protein [imported] - Arabidopsis
  misc_feature (1)..(398): Homolog of NCBI NO: 6686827 NR Description: putative sugar transporter [Arabidopsis thaliana]
  misc_feature (1)..(398): Homolog of NCBI NO: 30680865 NR Description: sugar transporter, putative [Arabidopsis thaliana]
  misc_feature (1)..(398): Homolog of NCBI NO: 18390957 NR Description: sugar transporter, putative [Arabidopsis

SEQ ID NO: 33492 - DNA, 1901 bp, Arabidopsis thaliana; identical to SEQ ID NO: 29902
  misc_feature (1)..(1901): Ceres Seq. ID no. 13653850
  misc_feature: MA Experiment ID: 108435 Result: Down-regulated in Transcription
  misc_feature: MA Experiment 108435 PARAMETER Experiment Name: At_stm_Mutants_cDNA_P Parameter: Plant Line Value: wt Landsburg vs stm
  misc_feature: MA Experiment 108435 PARAMETER Experiment Name: At_stm_Mutants_cDNA_P Parameter: Tissue Value: Shoot Apical Meristem Region
  misc_feature: MA Experiment ID: 108461 Result: Up-regulated in Transcription
  misc_feature: MA Experiment 108461 PARAMETER Experiment Name: At_Germinating_Seeds_cDNA_P Parameter: Age (day) Value: 1 vs. 0
  misc_feature: MA Experiment 108461 PARAMETER Experiment Name: At_Germinating_Seeds_cDNA_P Parameter: Tissue Value: Germinating Seeds
  misc_feature: MA Experiment ID: 108462 Result: Up-regulated in Transcription
  misc_feature: MA Experiment 108462 PARAMETER Experiment Name: At_Germinating_Seeds_cDNA_P Parameter: Age (day) Value: 2 vs. 0
  misc_feature: MA Experiment 108462 PARAMETER Experiment Name: At_Germinating_Seeds_cDNA_P Parameter: Tissue Value: Germinating Seeds
  misc_feature: MA Experiment ID: 108463 Result: Up-regulated in Transcription
  misc_feature: MA Experiment 108463 PARAMETER Experiment Name: At_Germinating_Seeds_cDNA_P Parameter: Age (day) Value: 3 vs. 0
  misc_feature: MA Experiment 108463 PARAMETER Experiment Name: At_Germinating_Seeds_cDNA_P Parameter: Tissue Value: Germinating Seeds
  misc_feature: MA Experiment ID: 108464 Result: Up-regulated in Transcription
  misc_feature: MA Experiment 108464 PARAMETER Experiment Name: At_Germinating_Seeds_cDNA_P Parameter: Age (day) Value: 4 vs. 0
  misc_feature: MA Experiment 108464 PARAMETER Experiment Name: At_Germinating_Seeds_cDNA_P Parameter: Tissue Value: Germinating Seeds
  misc_feature: MA Experiment ID: 108579 Result: Up-regulated in Transcription
  misc_feature: MA Experiment 108579 PARAMETER Experiment Name: At_4deg_Cold_cDNA_P Parameter: Temperature (deg C) Value: 4 vs. 22
  misc_feature: MA Experiment 108579 PARAMETER Experiment Name: At_4deg_Cold_cDNA_P Parameter: Timepoint (hr) Value: 6
  misc_feature: MA Experiment 108579 PARAMETER Experiment Name: At_4deg_Cold_cDNA_P Parameter: Tissue Value: Aerial
  misc_feature: MA Experiment ID: 108585 Result: Down-regulated in Transcription
  misc_feature: MA Experiment 108585 PARAMETER Experiment Name: At_5mM_NaNP_cDNA_P Parameter: Timepoint (hr) Value: 6
  misc_feature: MA Experiment 108585 PARAMETER Experiment Name: At_5mM_NaNP_cDNA_P Parameter: Tissue Value: Aerial
  misc_feature: MA Experiment 108585 PARAMETER Experiment Name: At_5mM_NaNP_cDNA_P Parameter: Treatment Value: null
  misc_feature: MA Experiment ID: 108595 Result: Down-regulated in Transcription
  misc_feature: MA Experiment 108595 PARAMETER Experiment Name: At_Ler-pi_Ovule_cDNA_P Parameter: Plant Line Value: null
  misc_feature: MA Experiment ID: 20000069 Result: Down-regulated in Transcription
  misc_feature: MA Experiment 20000069 PARAMETER Experiment Name: At_100uM_ABA_Mutants_cDNA_P Parameter: Plant Line Value: CS23
  misc_feature: MA Experiment 20000069 PARAMETER Experiment Name: At_100uM_ABA_Mutants_cDNA_P Parameter: Timepoint (hr) Value: 6
  misc_feature: MA Experiment 20000069 PARAMETER Experiment Name: At_100uM_ABA_Mutants_cDNA_P Parameter: Tissue Value: Aerial
  misc_feature: MA Experiment 20000069 PARAMETER Experiment Name: At_100uM_ABA_Mutants_cDNA_P Parameter: Treatment Value: 100uM ABA vs. No Treatment
  misc_feature: MA Experiment ID: 20000070 Result: Down-regulated in Transcription
  misc_feature: MA Experiment 20000070 PARAMETER Experiment Name: At_100uM_ABA_Mutants_cDNA_P Parameter: Plant Line Value: CS24
  misc_feature: MA Experiment 20000070 PARAMETER Experiment Name: At_100uM_ABA_Mutants_cDNA_P Parameter: Timepoint (hr) Value: 6
  misc_feature: MA Experiment 20000070 PARAMETER Experiment Name: At_100uM_ABA_Mutants_cDNA_P Parameter: Tissue Value: Aerial
  misc_feature: MA Experiment 20000070 PARAMETER Experiment Name: At_100uM_ABA_Mutants_cDNA_P Parameter: Treatment Value: 100uM ABA vs. No Treatment
  misc_feature: MA Experiment ID: 20000071 Result: Down-regulated in Transcription
  misc_feature: MA Experiment 20000071 PARAMETER Experiment Name: At_100uM_ABA_Mutants_cDNA_P Parameter: Plant Line Value: CS8104
  misc_feature: MA Experiment 20000071 PARAMETER Experiment Name: At_100uM_ABA_Mutants_cDNA_P Parameter: Timepoint (hr) Value: 6
  misc_feature: MA Experiment 20000071 PARAMETER Experiment Name: At_100uM_ABA_Mutants_cDNA_P Parameter: Tissue Value: Aerial
  misc_feature: MA Experiment 20000071 PARAMETER Experiment Name: At_100uM_ABA_Mutants_cDNA_P Parameter: Treatment Value: 100uM ABA vs. No Treatment
  misc_feature: MA Experiment ID: 20000072 Result: Down-regulated in Transcription
  misc_feature: MA Experiment 20000072 PARAMETER Experiment Name: At_100uM_ABA_Mutants_cDNA_P Parameter: Plant Line Value: CS8105
  misc_feature: MA Experiment 20000072 PARAMETER Experiment Name: At_100uM_ABA_Mutants_cDNA_P Parameter: Timepoint (hr) Value: 6
  misc_feature: MA Experiment 20000072 PARAMETER Experiment Name: At_100uM_ABA_Mutants_cDNA_P Parameter: Tissue Value: Aerial
  misc_feature: MA Experiment 20000072 PARAMETER Experiment Name: At_100uM_ABA_Mutants_cDNA_P Parameter: Treatment Value: 100uM ABA vs. No Treatment
  misc_feature: MA Experiment ID: 20000086 Result: Down-regulated in Transcription
  misc_feature: MA Experiment 20000086 PARAMETER Experiment Name: At_100uM_ABA_Mutants_cDNA_P Parameter: Plant Line Value: CS22
  misc_feature: MA Experiment 20000086 PARAMETER Experiment Name: At_100uM_ABA_Mutants_cDNA_P Parameter: Timepoint (hr) Value: 6
  misc_feature: MA Experiment 20000086 PARAMETER Experiment Name: At_100uM_ABA_Mutants_cDNA_P Parameter: Tissue Value: Aerial
  misc_feature: MA Experiment 20000086 PARAMETER Experiment Name: At_100uM_ABA_Mutants_cDNA_P Parameter: Treatment Value: 100uM ABA vs. No Treatment
  misc_feature: MA Experiment ID: 20000087 Result: Down-regulated in Transcription
  misc_feature: MA Experiment 20000087 PARAMETER Experiment Name: At_100uM_ABA_Mutants_cDNA_P Parameter: Plant Line Value: WS
  misc_feature: MA Experiment 20000087 PARAMETER Experiment Name: At_100uM_ABA_Mutants_cDNA_P Parameter: Timepoint (hr) Value: 6
  misc_feature: MA Experiment 20000087 PARAMETER Experiment Name: At_100uM_ABA_Mutants_cDNA_P Parameter: Tissue Value: Aerial
  misc_feature: MA Experiment 20000087 PARAMETER Experiment Name: At_100uM_ABA_Mutants_cDNA_P Parameter: Treatment Value: 100uM ABA vs. No Treatment
  misc_feature: MA Experiment ID: 20000088 Result: Down-regulated in Transcription
  misc_feature: MA Experiment 20000088 PARAMETER Experiment Name: At_100uM_ABA_Mutants_cDNA_P Parameter: Plant Line Value: Landsberg
  misc_feature: MA Experiment 20000088 PARAMETER Experiment Name: At_100uM_ABA_Mutants_cDNA_P Parameter: Timepoint (hr) Value: 6
  misc_feature: MA Experiment 20000088 PARAMETER Experiment Name: At_100uM_ABA_Mutants_cDNA_P Parameter: Tissue Value: Aerial
  misc_feature: MA Experiment 20000088 PARAMETER Experiment Name: At_100uM_ABA_Mutants_cDNA_P Parameter: Treatment Value: 100uM ABA vs. No Treatment
  misc_feature: MA Experiment ID: 20000089 Result: Down-regulated in Transcription
  misc_feature: MA Experiment ID: 20000090 Result: Down-regulated in Transcription
  misc_feature: MA Experiment ID: 20000117 Result: Down-regulated in Transcription
  misc_feature: MA Experiment 20000117 PARAMETER Experiment Name: At_100uM_ABA_Mutants_cDNA_P Parameter: Plant Line Value: Columbia
  misc_feature: MA Experiment 20000117 PARAMETER Experiment Name: At_100uM_ABA_Mutants_cDNA_P Parameter: Timepoint (hr) Value: 6
  misc_feature: MA Experiment 20000117 PARAMETER Experiment Name: At_100uM_ABA_Mutants_cDNA_P Parameter: Tissue Value: Aerial
  misc_feature: MA Experiment 20000117 PARAMETER Experiment Name: At_100uM_ABA_Mutants_cDNA_P Parameter: Treatment Value: 100uM ABA vs. No Treatment
  misc_feature: MA Experiment ID: 20000180 Result: Up-regulated in Transcription
  misc_feature: MA Experiment 20000180 PARAMETER Experiment Name: At_Germinating_Seeds_P Parameter: Age (hr) Value: 24 vs. 0
  misc_feature: MA Experiment 20000180 PARAMETER Experiment Name: At_Germinating_Seeds_P Parameter: Tissue Value: Germinating Seeds
  misc_feature: MA Experiment ID: 20000185 Result: Down-regulated in Transcription
  misc_feature: MA Experiment 20000185 PARAMETER Experiment Name: At_Roots__P Parameter: Age (day) Value: 7 vs. 21
  misc_feature: MA Experiment 20000185 PARAMETER Experiment Name: At_Roots__P Parameter: Organism Value: A. thaliana
  misc_feature: MA Experiment 20000185 PARAMETER Experiment Name: At_Roots__P Parameter: Tissue Value: Roots vs. Whole Plant
  misc_feature: MA Experiment ID: 20000224 Result: Up-regulated in Transcription
  misc_feature: MA Experiment ID: 20000235 Result: Up-regulated in Transcription
  misc_feature: MA Experiment 20000235 PARAMETER Experiment Name: At_Siliques_P Parameter: Age (day) Value: 21
  misc_feature: MA Experiment 20000235 PARAMETER Experiment Name: At_Siliques_P Parameter: Organism Value: A. thaliana
  misc_feature: MA Experiment 20000235 PARAMETER Experiment Name: At_Siliques_P Parameter: Plant Line Value: WS
  misc_feature: MA Experiment 20000235 PARAMETER Experiment Name: At_Siliques_P Parameter: Tissue Value: 5-10mm Siliques vs. Whole Plant
  misc_feature: MA Experiment ID: 20000438 Result: Up-regulated in Transcription
  misc_feature: MA Experiment 20000438 PARAMETER Experiment Name: At_Shoots__P Parameter: Age (day) Value: 14
  misc_feature: MA Experiment 20000438 PARAMETER Experiment Name: At_Shoots__P Parameter: Tissue Value: Shoots vs. Whole Plant
  misc_feature: MA Experiment ID: 20000439 Result: Down-regulated in Transcription
  misc_feature: MA Experiment 20000439 PARAMETER Experiment Name: At_Roots__P Parameter: Age (day) Value: 14 vs. 21
  misc_feature: MA Experiment 20000439 PARAMETER Experiment Name: At_Roots__P Parameter: Organism Value: A. thaliana
  misc_feature: MA Experiment 20000439 PARAMETER Experiment Name: At_Roots__P Parameter: Tissue Value: Roots vs. Whole Plant
  misc_feature: MA Experiment ID: 20000794 Result: Up-regulated in Transcription
  misc_feature: MA Experiment 20000794 PARAMETER Experiment Name: At_Petals_P Parameter: Age (day) Value: 23-25 days
  misc_feature: MA Experiment 20000794 PARAMETER Experiment Name: At_Petals_P Parameter: Plant Line Value: WS
  misc_feature: MA Experiment 20000794 PARAMETER Experiment Name: At_Petals_P Parameter: Tissue Value: Petals vs. Whole plant
  misc_feature: MA Experiment ID: 20001248 Result: Down-regulated in Transcription
  misc_feature: MA Experiment 20001248 PARAMETER Experiment Name: At_Far-red-induction_P Parameter: Age (day) Value: 7
  misc_feature: MA Experiment 20001248 PARAMETER Experiment Name: At_Far-red-induction_P Parameter: Light Value: Far-red vs. White
  misc_feature: MA Experiment 20001248 PARAMETER Experiment Name: At_Far-red-induction_P Parameter: Organism Value: A. thaliana
  misc_feature: MA Experiment 20001248 PARAMETER Experiment Name: At_Far-red-induction_P Parameter: Plant Line Value: Columbia
  misc_feature: MA Experiment 20001248 PARAMETER Experiment Name: At_Far-red-induction_P Parameter: Timepoint (hr) Value: 4
  misc_feature: MA Experiment 20001248 PARAMETER Experiment Name: At_Far-red-induction_P Parameter: Tissue Value: Whole Plant
  misc_feature: MA Experiment ID: 20001450 Result: Down-regulated in Transcription
  misc_feature: MA Experiment 20001450 PARAMETER Experiment Name: At_Far-red-induction_P Parameter: Age (day) Value: 7
  misc_feature: MA Experiment 20001450 PARAMETER Experiment Name: At_Far-red-induction_P Parameter: Light Value: Far-red vs. White
  misc_feature: MA Experiment 20001450 PARAMETER Experiment Name: At_Far-red-induction_P Parameter: Organism Value: A. thaliana
  misc_feature: MA Experiment 20001450 PARAMETER Experiment Name: At_Far-red-induction_P Parameter: Plant Line Value: Columbia
  misc_feature: MA Experiment 20001450 PARAMETER Experiment Name: At_Far-red-induction_P Parameter: Timepoint (hr) Value: 8
  misc_feature: MA Experiment 20001450 PARAMETER Experiment Name: At_Far-red-induction_P Parameter: Tissue Value: Whole Plant

SEQ ID NO: 33493 - protein, 423 aa, Arabidopsis thaliana; identical to SEQ ID NO: 29903
  peptide (1)..(423): Ceres Seq. ID no. 13653851
  misc_feature (71)..(417): Homolog of NCBI NO: 13542332 NR Description: phytoene synthase [Citrus x paradisi]
  misc_feature (68)..(417): Homolog of NCBI NO: 1346882 NR Description: Phytoene synthase, chloroplast precursor (MEL5)
  misc_feature (4)..(422): Homolog of NCBI NO: 11990226 NR Description: phytoene synthase [Helianthus annuus]
  misc_feature (4)..(422): Homolog of NCBI NO: 12584564 NR Description: phytoene synthase [Helianthus annuus]
  misc_feature (71)..(417): Homolog of NCBI NO: 6959860 NR Description: phytoene synthase [Citrus unshiu]
  misc_feature (30)..(417): Homolog of NCBI NO: 40456029 NR Description: phytoene synthase [Momordica charantia var.
  misc_feature (4)..(417): Homolog of NCBI NO: 585749 NR Description: Phytoene synthase, chloroplast precursor
  misc_feature (1)..(423): Homolog of NCBI NO: 21553694 NR Description: phytoene synthase [Arabidopsis thaliana]
  misc_feature (1)..(423): Homolog of NCBI NO: 15237933 NR Description: phytoene synthase
  misc_feature (1)..(423): Homolog of NCBI NO: 413732 NR Description: phytoene synthase

SEQ ID NO: 33494 - protein, 404 aa, Arabidopsis thaliana; identical to SEQ ID NO: 29904
  peptide (1)..(404): Ceres Seq. ID no. 13653852
  misc_feature (52)..(398): Homolog of NCBI NO: 13542332 NR Description: phytoene synthase [Citrus x paradisi]
  misc_feature (49)..(398): Homolog of NCBI NO: 1346882 NR Description: Phytoene synthase, chloroplast precursor (MEL5)
  misc_feature (1)..(403): Homolog of NCBI NO: 11990226 NR Description: phytoene synthase [Helianthus annuus]
  misc_feature (1)..(403): Homolog of NCBI NO: 12584564 NR Description: phytoene synthase [Helianthus annuus]
  misc_feature (52)..(398): Homolog of NCBI NO: 6959860 NR Description: phytoene synthase [Citrus unshiu]
  misc_feature (11)..(398): Homolog of NCBI NO: 40456029 NR Description: phytoene synthase [Momordica charantia var.
  misc_feature (1)..(398): Homolog of NCBI NO: 585749 NR Description: Phytoene synthase, chloroplast precursor
  misc_feature (1)..(404): Homolog of NCBI NO: 21553694 NR Description: phytoene synthase [Arabidopsis thaliana]
  misc_feature (1)..(404): Homolog of NCBI NO: 15237933 NR Description: phytoene synthase
  misc_feature (1)..(404): Homolog of NCBI NO: 413732 NR Description: phytoene synthase

SEQ ID NO: 33495 - protein, 270 aa, Arabidopsis thaliana; identical to SEQ ID NO: 29905
  peptide (1)..(270): Ceres Seq. ID no. 13653853
  misc_feature (1)..(264): Homolog of NCBI NO: 13542332 NR Description: phytoene synthase [Citrus x paradisi]
  misc_feature (1)..(264): Homolog of NCBI NO: 1346882 NR Description: Phytoene synthase, chloroplast precursor (MEL5)
  misc_feature (1)..(269): Homolog of NCBI NO: 11990226 NR Description: phytoene synthase [Helianthus annuus]
  misc_feature (1)..(269): Homolog of NCBI NO: 12584564 NR Description: phytoene synthase [Helianthus annuus]
  misc_feature (1)..(264): Homolog of NCBI NO: 6959860 NR Description: phytoene synthase [Citrus unshiu]
  misc_feature (1)..(264): Homolog of NCBI NO: 40456029 NR Description: phytoene synthase [Momordica charantia var.
  misc_feature (1)..(264): Homolog of NCBI NO: 585749 NR Description: Phytoene synthase, chloroplast precursor
  misc_feature (1)..(270): Homolog of NCBI NO: 21553694 NR Description: phytoene synthase [Arabidopsis thaliana]
  misc_feature (1)..(270): Homolog of NCBI NO: 15237933 NR Description: phytoene synthase
  misc_feature (1)..(270): Homolog of NCBI NO: 413732 NR Description: phytoene synthase

SEQ ID NO: 33496 - DNA, 1303 bp, Arabidopsis thaliana; identical to SEQ ID NO: 29906
  misc_feature (1)..(1303): Ceres Seq. ID no. 12334147
  misc_feature: MA Experiment ID: 108434 Result: Up-regulated in Transcription
  misc_feature: MA Experiment 108434 PARAMETER Experiment Name: At_Root_Tips_cDNA_P Parameter: Tissue Value: Root Tips
  misc_feature: MA Experiment ID: 108463 Result: Down-regulated in Transcription
  misc_feature: MA Experiment 108463 PARAMETER Experiment Name: At_Germinating_Seeds_cDNA_P Parameter: Age (day) Value: 3 vs. 0
  misc_feature: MA Experiment 108463 PARAMETER Experiment Name: At_Germinating_Seeds_cDNA_P Parameter: Tissue Value: Germinating Seeds
  misc_feature: MA Experiment ID: 108595 Result: Up-regulated in Transcription
  misc_feature: MA Experiment 108595 PARAMETER Experiment Name: At_Ler-pi_Ovule_cDNA_P Parameter: Plant Line Value: null
  misc_feature: MA Experiment ID: 20000184 Result: Up-regulated in Transcription
  misc_feature: MA Experiment 20000184 PARAMETER Experiment Name: At_Shoots__P Parameter: Age (day) Value: 7
  misc_feature: MA Experiment 20000184 PARAMETER Experiment Name: At_Shoots__P Parameter: Tissue Value: Shoots vs. Whole Plant
  misc_feature: MA Experiment ID: 20000185 Result: Up-regulated in Transcription
  misc_feature: MA Experiment 20000185 PARAMETER Experiment Name: At_Roots__P Parameter: Age (day) Value: 7 vs. 21
  misc_feature: MA Experiment 20000185 PARAMETER Experiment Name: At_Roots__P Parameter: Organism Value: A. thaliana
  misc_feature: MA Experiment 20000185 PARAMETER Experiment Name: At_Roots__P Parameter: Tissue Value: Roots vs. Whole Plant
  misc_feature: MA Experiment ID: 20000438 Result: Up-regulated in Transcription
  misc_feature: MA Experiment 20000438 PARAMETER Experiment Name: At_Shoots__P Parameter: Age (day) Value: 14
  misc_feature: MA Experiment 20000438 PARAMETER Experiment Name: At_Shoots__P Parameter: Tissue Value: Shoots vs. Whole Plant
  misc_feature: MA Experiment ID: 20000439 Result: Up-regulated in Transcription
  misc_feature: MA Experiment 20000439 PARAMETER Experiment Name: At_Roots__P Parameter: Age (day) Value: 14 vs. 21
  misc_feature: MA Experiment 20000439 PARAMETER Experiment Name: At_Roots__P Parameter: Organism Value: A. thaliana
  misc_feature: MA Experiment 20000439 PARAMETER Experiment Name: At_Roots__P Parameter: Tissue Value: Roots vs. Whole Plant
  misc_feature: MA Experiment ID: 20001451 Result: Up-regulated in Transcription
  misc_feature: MA Experiment 20001451 PARAMETER Experiment Name: At_Far-red-induction_P Parameter: Age (day) Value: 7
  misc_feature: MA Experiment 20001451 PARAMETER Experiment Name: At_Far-red-induction_P Parameter: Light Value: Far-red vs. White
  misc_feature: MA Experiment 20001451 PARAMETER Experiment Name: At_Far-red-induction_P Parameter: Organism Value: A. thaliana
  misc_feature: MA Experiment 20001451 PARAMETER Experiment Name: At_Far-red-induction_P Parameter: Plant Line Value: Columbia
  misc_feature: MA Experiment 20001451 PARAMETER Experiment Name: At_Far-red-induction_P Parameter: Timepoint (hr) Value: 24
  misc_feature: MA Experiment 20001451 PARAMETER Experiment Name: At_Far-red-induction_P Parameter: Tissue Value: Whole Plant

SEQ ID NO: 33497 - protein, 315 aa, Arabidopsis thaliana; identical to SEQ ID NO: 29907
  peptide (1)..(315): Ceres Seq. ID no. 12334148
  misc_feature (246)..(302): Pfam Name: Herpesvirus polymerase accessory protein Pfam Description: Herpesvirus polymerase accessory protein
  misc_feature (79)..(264): Homolog of NCBI NO: 15225475 NR Description: putative AT-hook DNA-binding protein; protein id:
  misc_feature (55)..(286): Homolog of NCBI NO: 15223074 NR Description: unknown protein; protein id: At1g76500.1
  misc_feature (21)..(288): Homolog of NCBI NO: 15235815 NR Description: putative DNA binding protein; protein id:
  misc_feature (42)..(302): Homolog of NCBI NO: 15226945 NR Description: putative AT-hook DNA-binding protein; protein id:
  misc_feature (38)..(278): Homolog of NCBI NO: 15218067 NR Description: putative DNA-binding protein
  misc_feature (59)..(315): Homolog of NCBI NO: 38346718 NR Description: OSJNBa0086O06.16 [Oryza sativa (japonica
  misc_feature (24)..(295): Homolog of NCBI NO: 15236657 NR Description: hypothetical protein
  misc_feature (37)..(312): Homolog of NCBI NO: 21593180 NR Description: putative DNA-binding protein [Arabidopsis
  misc_feature (37)..(312): Homolog of NCBI NO: 18414224 NR Description: Expressed protein
  misc_feature (1)..(315): Homolog of NCBI NO: 18396925 NR Description: expressed protein

SEQ ID NO: 33498 - protein, 282 aa, Arabidopsis thaliana; identical to SEQ ID NO: 29908
  peptide (1)..(282): Ceres Seq. ID no. 12334149
  misc_feature (213)..(269): Pfam Name: Herpesvirus polymerase accessory protein Pfam Description: Herpesvirus polymerase accessory protein
  misc_feature (46)..(231): Homolog of NCBI NO: 15225475 NR Description: putative AT-hook DNA-binding protein; protein id:
  misc_feature (22)..(253): Homolog of NCBI NO: 15223074 NR Description: unknown protein; protein id: At1g76500.1
  misc_feature (1)..(255): Homolog of NCBI NO: 15235815 NR Description: putative DNA binding protein; protein id:
  misc_feature (9)..(269): Homolog of NCBI NO: 15226945 NR Description: putative AT-hook DNA-binding protein; protein id:
  misc_feature (5)..(245): Homolog of NCBI NO: 15218067 NR Description: putative DNA-binding protein
  misc_feature (26)..(282): Homolog of NCBI NO: 38346718 NR Description: OSJNBa0086O06.16 [Oryza sativa (japonica
  misc_feature (1)..(262): Homolog of NCBI NO: 15236657 NR Description: hypothetical protein
  misc_feature (4)..(279): Homolog of NCBI NO: 21593180 NR Description: putative DNA-binding protein [Arabidopsis
  misc_feature (4)..(279): Homolog of NCBI NO: 18414224 NR Description: Expressed protein
  misc_feature (1)..(282): Homolog of NCBI NO: 18396925 NR Description: expressed protein

SEQ ID NO: 33499 - protein, 280 aa, Arabidopsis thaliana; identical to SEQ ID NO: 29909
  peptide (1)..(280): Ceres Seq. ID no. 12334150
  misc_feature (211)..(267): Pfam Name: Herpesvirus polymerase accessory protein Pfam Description: Herpesvirus polymerase accessory protein
  misc_feature (44)..(229): Homolog of NCBI NO: 15225475 NR Description: putative AT-hook DNA-binding protein; protein id:
  misc_feature (20)..(251): Homolog of NCBI NO: 15223074 NR Description: unknown protein; protein id: At1g76500.1
  misc_feature (1)..(253): Homolog of NCBI NO: 15235815 NR Description: putative DNA binding protein; protein id:
  misc_feature (7)..(267): Homolog of NCBI NO: 15226945 NR Description: putative AT-hook DNA-binding protein; protein id:
  misc_feature (3)..(243): Homolog of NCBI NO: 15218067 NR Description: putative DNA-binding protein
  misc_feature (24)..(280): Homolog of NCBI NO: 38346718 NR Description: OSJNBa0086O06.16 [Oryza sativa (japonica
  misc_feature (1)..(260): Homolog of NCBI NO: 15236657 NR Description: hypothetical protein
  misc_feature (2)..(277): Homolog of NCBI NO: 21593180 NR Description: putative DNA-binding protein [Arabidopsis
  misc_feature (2)..(277): Homolog of NCBI NO: 18414224 NR Description: Expressed protein
  misc_feature (1)..(280): Homolog of NCBI NO: 18396925 NR Description: expressed protein

SEQ ID NO: 33500 - DNA, 667 bp, Arabidopsis thaliana; identical to SEQ ID NO: 29910
  misc_feature (1)..(667): Ceres Seq. ID no. 12389141
  misc_feature: MA Experiment ID: 108434 Result: Up-regulated in Transcription
  misc_feature: MA Experiment 108434 PARAMETER Experiment Name: At_Root_Tips_cDNA_P Parameter: Tissue Value: Root Tips
  misc_feature: MA Experiment ID: 108435 Result: Up-regulated in Transcription
  misc_feature: MA Experiment 108435 PARAMETER Experiment Name: At_stm_Mutants_cDNA_P Parameter: Plant Line Value: wt Landsburg vs stm
  misc_feature: MA Experiment 108435 PARAMETER Experiment Name: At_stm_Mutants_cDNA_P Parameter: Tissue Value: Shoot Apical Meristem Region
  misc_feature: MA Experiment ID: 108462 Result: Down-regulated in Transcription
  misc_feature: MA Experiment 108462 PARAMETER Experiment Name: At_Germinating_Seeds_cDNA_P Parameter: Age (day) Value: 2 vs. 0
  misc_feature: MA Experiment 108462 PARAMETER Experiment Name: At_Germinating_Seeds_cDNA_P Parameter: Tissue Value: Germinating Seeds
  misc_feature: MA Experiment ID: 108463 Result: Down-regulated in Transcription
  misc_feature: MA Experiment 108463 PARAMETER Experiment Name: At_Germinating_Seeds_cDNA_P Parameter: Age (day) Value: 3 vs. 0
  misc_feature: MA Experiment 108463 PARAMETER Experiment Name: At_Germinating_Seeds_cDNA_P Parameter: Tissue Value: Germinating Seeds
  misc_feature: MA Experiment ID: 108464 Result: Down-regulated in Transcription
  misc_feature: MA Experiment 108464 PARAMETER Experiment Name: At_Germinating_Seeds_cDNA_P Parameter: Age (day) Value: 4 vs. 0
  misc_feature: MA Experiment 108464 PARAMETER Experiment Name: At_Germinating_Seeds_cDNA_P Parameter: Tissue Value: Germinating Seeds
  misc_feature: MA Experiment ID: 108573 Result: Down-regulated in Transcription
  misc_feature: MA Experiment 108573 PARAMETER Experiment Name: At_Drought_cDNA_P Parameter: Timepoint (hr) Value: 6
  misc_feature: MA Experiment 108573 PARAMETER Experiment Name: At_Drought_cDNA_P Parameter: Tissue Value: Aerial
  misc_feature: MA Experiment 108573 PARAMETER Experiment Name: At_Drought_cDNA_P Parameter: Treatment Value: Drought vs. No Drought
  misc_feature: MA Experiment ID: 20000112 Result: Down-regulated in Transcription
  misc_feature: MA Experiment 20000112 PARAMETER Experiment Name: At_42deg_Heat_cDNA_P Parameter: Temperature (deg C) Value: 42 vs. 22
  misc_feature: MA Experiment 20000112 PARAMETER Experiment Name: At_42deg_Heat_cDNA_P Parameter: Timepoint (hr) Value: 2
  misc_feature: MA Experiment 20000112 PARAMETER Experiment Name: At_42deg_Heat_cDNA_P Parameter: Tissue Value: Aerial
  misc_feature: MA Experiment ID: 20000117 Result: Down-regulated in Transcription
  misc_feature: MA Experiment 20000117 PARAMETER Experiment Name: At_100uM_ABA_Mutants_cDNA_P Parameter: Plant Line Value: Columbia
  misc_feature: MA Experiment 20000117 PARAMETER Experiment Name: At_100uM_ABA_Mutants_cDNA_P Parameter: Timepoint (hr) Value: 6
  misc_feature: MA Experiment 20000117 PARAMETER Experiment Name: At_100uM_ABA_Mutants_cDNA_P Parameter: Tissue Value: Aerial
  misc_feature: MA Experiment 20000117 PARAMETER Experiment Name: At_100uM_ABA_Mutants_cDNA_P Parameter: Treatment Value: 100uM ABA vs. No Treatment
  misc_feature: MA Experiment ID: 20000214 Result: Up-regulated in Transcription
  misc_feature: MA Experiment 20000214 PARAMETER Experiment Name: At_4deg_Cold_P Parameter: Timepoint (hr) Value: 6
  misc_feature: MA Experiment ID: 20000437 Result: Down-regulated in Transcription
  misc_feature: MA Experiment 20000437 PARAMETER Experiment Name: At_Drought_P Parameter: Age (day) Value: 8
  misc_feature: MA Experiment 20000437 PARAMETER Experiment Name: At_Drought_P Parameter: Organism Value: A. thaliana
  misc_feature: MA Experiment 20000437 PARAMETER Experiment Name: At_Drought_P Parameter: Plant Line Value: WS
  misc_feature: MA Experiment 20000437 PARAMETER Experiment Name: At_Drought_P Parameter: Timepoint (hr) Value: 24
  misc_feature: MA Experiment 20000437 PARAMETER Experiment Name: At_Drought_P Parameter: Tissue Value: Whole Plant
  misc_feature: MA Experiment 20000437 PARAMETER Experiment Name: At_Drought_P Parameter: Treatment Value: Drought vs. No Drought
  misc_feature: MA Experiment ID: 20000495 Result: Down-regulated in Transcription
  misc_feature: MA Experiment 20000495 PARAMETER Experiment Name: At_Guard_Cells_P Parameter: Harvest Date Value: 8/2/2002
  misc_feature: MA Experiment 20000495 PARAMETER Experiment Name: At_Guard_Cells_P Parameter: Organism Value: A. thaliana
  misc_feature: MA Experiment 20000495 PARAMETER Experiment Name: At_Guard_Cells_P Parameter: Tissue Value: Guard Cells vs. Leaves
  misc_feature: MA Experiment ID: 20000794 Result: Down-regulated in Transcription
  misc_feature: MA Experiment 20000794 PARAMETER Experiment Name: At_Petals_P Parameter: Age (day) Value: 23-25 days
  misc_feature: MA Experiment 20000794 PARAMETER Experiment Name: At_Petals_P Parameter: Plant Line Value: WS
  misc_feature: MA Experiment 20000794 PARAMETER Experiment Name: At_Petals_P Parameter: Tissue Value: Petals vs. Whole plant
  misc_feature: MA Experiment ID: 20001451 Result: Down-regulated in Transcription
  misc_feature: MA Experiment 20001451 PARAMETER Experiment Name: At_Far-red-induction_P Parameter: Age (day) Value: 7
  misc_feature: MA Experiment 20001451 PARAMETER Experiment Name: At_Far-red-induction_P Parameter: Light Value: Far-red vs. White
  misc_feature: MA Experiment 20001451 PARAMETER Experiment Name: At_Far-red-induction_P Parameter: Organism Value: A. thaliana
  misc_feature: MA Experiment 20001451 PARAMETER Experiment Name: At_Far-red-induction_P Parameter: Plant Line Value: Columbia
  misc_feature: MA Experiment 20001451 PARAMETER Experiment Name: At_Far-red-induction_P Parameter: Timepoint (hr) Value: 24
  misc_feature: MA Experiment 20001451 PARAMETER Experiment Name: At_Far-red-induction_P Parameter: Tissue Value: Whole Plant
  misc_feature: MA Experiment ID: 20001557 Result: Up-regulated in Transcription
  misc_feature: MA Experiment 20001557 PARAMETER Experiment Name: At_Drought_Soil_Dry_P Parameter: Age (day) Value: 27
  misc_feature: MA Experiment 20001557 PARAMETER Experiment Name: At_Drought_Soil_Dry_P Parameter: Organism Value: A. thaliana
  misc_feature: MA Experiment 20001557 PARAMETER Experiment Name: At_Drought_Soil_Dry_P Parameter: Plant Line Value: WS
  misc_feature: MA Experiment 20001557 PARAMETER Experiment Name: At_Drought_Soil_Dry_P Parameter: Post Timepoint (hr) Value: 3
  misc_feature: MA Experiment 20001557 PARAMETER Experiment Name: At_Drought_Soil_Dry_P Parameter: Post-Treatment Value: Re-Water vs. No Drought
  misc_feature: MA Experiment 20001557 PARAMETER Experiment Name: At_Drought_Soil_Dry_P Parameter: Timepoint (day) Value: 13
  misc_feature: MA Experiment 20001557 PARAMETER Experiment Name: At_Drought_Soil_Dry_P Parameter: Treatment Value: Drought vs. No Drought
  misc_feature: MA Experiment ID: 20001558 Result: Up-regulated in Transcription
  misc_feature: MA Experiment 20001558 PARAMETER Experiment Name: At_Drought_Soil_Dry_P Parameter: Age (day) Value: 27
  misc_feature: MA Experiment 20001558 PARAMETER Experiment Name: At_Drought_Soil_Dry_P Parameter: Organism Value: A. thaliana
  misc_feature: MA Experiment 20001558 PARAMETER Experiment Name: At_Drought_Soil_Dry_P Parameter: Plant Line Value: WS
  misc_feature: MA Experiment 20001558 PARAMETER Experiment Name: At_Drought_Soil_Dry_P Parameter: Post Timepoint (hr) Value: 6
  misc_feature: MA Experiment 20001558 PARAMETER Experiment Name: At_Drought_Soil_Dry_P Parameter: Post-Treatment Value: Re-Water vs. No Drought
  misc_feature: MA Experiment 20001558 PARAMETER Experiment Name: At_Drought_Soil_Dry_P Parameter: Timepoint (day) Value: 13
  misc_feature: MA Experiment 20001558 PARAMETER Experiment Name: At_Drought_Soil_Dry_P Parameter: Treatment Value: Drought vs. No Drought
  misc_feature: MA Experiment ID: 20001560 Result: Up-regulated in Transcription
  misc_feature: MA Experiment 20001560 PARAMETER Experiment Name: At_Drought_Soil_Dry_P Parameter: Age (day) Value: 28
  misc_feature: MA Experiment 20001560 PARAMETER Experiment Name: At_Drought_Soil_Dry_P Parameter: Organism Value: A. thaliana
  misc_feature: MA Experiment 20001560 PARAMETER Experiment Name: At_Drought_Soil_Dry_P Parameter: Plant Line Value: WS
  misc_feature: MA Experiment 20001560 PARAMETER Experiment Name: At_Drought_Soil_Dry_P Parameter: Post Timepoint (hr) Value: None
  misc_feature: MA Experiment 20001560 PARAMETER Experiment Name: At_Drought_Soil_Dry_P Parameter: Post-Treatment Value: None
  misc_feature: MA Experiment 20001560 PARAMETER Experiment Name: At_Drought_Soil_Dry_P Parameter: Timepoint (day) Value: 14
  misc_feature: MA Experiment 20001560 PARAMETER Experiment Name: At_Drought_Soil_Dry_P Parameter: Treatment Value: Drought vs. No Drought
  misc_feature: MA Experiment ID: 20001757 Result: Up-regulated in Transcription
  misc_feature: MA Experiment 20001757 PARAMETER Experiment Name: At_50mM_NH4NO3_L-to-H_P Parameter: Timepoint (hr) Value: 6
  misc_feature: MA Experiment 20001757 PARAMETER Experiment Name: At_50mM_NH4NO3_L-to-H_P Parameter: Tissue Value: Leaf
  misc_feature: MA Experiment 20001757 PARAMETER Experiment Name: At_50mM_NH4NO3_L-to-H_P Parameter: Treatment Value: 50mM NH4NO3 vs 100mM Mannitol

SEQ ID NO: 33501 - protein, 163 aa, Arabidopsis thaliana; identical to SEQ ID NO: 29911
  peptide (1)..(163): Ceres Seq. ID no. 12389142
  misc_feature (124)..(157): Pfam Name: Ribosomal protein L15 Pfam Description: Ribosomal protein L15
  misc_feature (18)..(163): Homolog of NCBI NO: 23491401 NR Description: ribosomal protein L27a [Plasmodium yoelii yoelii]
  misc_feature (18)..(163): Homolog of NCBI NO: 23612262 NR Description: 60S ribosomal protein L27a, putative [Plasmodium
  misc_feature (20)..(163): Homolog of NCBI NO: 22758850 NR Description: ribosomal protein L22 [Argopecten irradians]
  misc_feature (18)..(163): Homolog of NCBI NO: 23237917 NR Description: putative 60S ribosomal protein L27a
  misc_feature (18)..(163): Homolog of NCBI NO: 30017566 NR Description: putative ribosomal protein L27a
  misc_feature (18)..(163): Homolog of NCBI NO: 3608481 NR Description: ribosomal protein L27a [Petunia x hybrida]
  misc_feature (18)..(163): Homolog of NCBI NO: 7959355 NR Description: 60S ribosomal protein L27a [Panax ginseng]
  misc_feature (18)..(163): Homolog of NCBI NO: 15220698 NR Description: 60s ribosomal protein l27a.
  misc_feature (18)..(163): Homolog of NCBI NO: 21553702 NR Description: 60S ribosomal protein L27A [Arabidopsis thaliana]
  misc_feature (18)..(163): Homolog of NCBI NO: 15223190 NR Description: 60S ribosomal protein L27A

SEQ ID NO: 33502 - protein, 146 aa, Arabidopsis thaliana [sequence omitted]

SEQ ID NO: 33503 - protein, 109 aa, Arabidopsis thaliana; identical to SEQ ID NO: 29913
  peptide (1)..(109): Ceres Seq. ID no. 12389144
  misc_feature (70)..(103): Pfam Name: Ribosomal protein L15 Pfam Description: Ribosomal protein L15
  misc_feature (1)..(109): Homolog of NCBI NO: 23491401 NR Description: ribosomal protein L27a [Plasmodium yoelii yoelii]
  misc_feature (1)..(109): Homolog of NCBI NO: 23612262 NR Description: 60S ribosomal protein L27a, putative [Plasmodium
  misc_feature (1)..(109): Homolog of NCBI NO: 22758850 NR Description: ribosomal protein L22 [Argopecten irradians]
  misc_feature (1)..(109): Homolog of NCBI NO: 23237917 NR Description: putative 60S ribosomal protein L27a
  misc_feature (1)..(109): Homolog of NCBI NO: 30017566 NR Description: putative ribosomal protein L27a
  misc_feature (1)..(109): Homolog of NCBI NO: 3608481 NR Description: ribosomal protein L27a [Petunia x hybrida]
  misc_feature (1)..(109): Homolog of NCBI NO: 7959355 NR Description: 60S ribosomal protein L27a [Panax ginseng]
  misc_feature (1)..(109): Homolog of NCBI NO: 15220698 NR Description: 60s ribosomal protein l27a.
  misc_feature (1)..(109): Homolog of NCBI NO: 21553702 NR Description: 60S ribosomal protein L27A [Arabidopsis thaliana]
  misc_feature (1)..(109): Homolog of NCBI NO: 15223190 NR Description: 60S ribosomal protein L27A

SEQ ID NO: 33504 - DNA, 969 bp, Arabidopsis thaliana; identical to SEQ ID NO: 29914
  misc_feature (1)..(969): Ceres Seq. ID no. 12421076
  misc_feature: MA Experiment ID: 108434 Result: Down-regulated in Transcription
  misc_feature: MA Experiment 108434 PARAMETER Experiment Name: At_Root_Tips_cDNA_P Parameter: Tissue Value: Root Tips
  misc_feature: MA Experiment ID: 108461 Result: Up-regulated in Transcription
  misc_feature: MA Experiment 108461 PARAMETER Experiment Name: At_Germinating_Seeds_cDNA_P Parameter: Age (day) Value: 1 vs. 0
  misc_feature: MA Experiment 108461 PARAMETER Experiment Name: At_Germinating_Seeds_cDNA_P Parameter: Tissue Value: Germinating Seeds
  misc_feature: MA Experiment ID: 108462 Result: Up-regulated in Transcription
  misc_feature: MA Experiment 108462 PARAMETER Experiment Name: At_Germinating_Seeds_cDNA_P Parameter: Age (day) Value: 2 vs. 0
  misc_feature: MA Experiment 108462 PARAMETER Experiment Name: At_Germinating_Seeds_cDNA_P Parameter: Tissue Value: Germinating Seeds
  misc_feature: MA Experiment ID: 108463 Result: Up-regulated in Transcription
  misc_feature: MA Experiment 108463 PARAMETER Experiment Name: At_Germinating_Seeds_cDNA_P Parameter: Age (day) Value: 3 vs. 0
  misc_feature: MA Experiment 108463 PARAMETER Experiment Name: At_Germinating_Seeds_cDNA_P Parameter: Tissue Value: Germinating Seeds
  misc_feature: MA Experiment ID: 108464 Result: Up-regulated in Transcription
  misc_feature: MA Experiment 108464 PARAMETER Experiment Name: At_Germinating_Seeds_cDNA_P Parameter: Age (day) Value: 4 vs. 0
  misc_feature: MA Experiment 108464 PARAMETER Experiment Name: At_Germinating_Seeds_cDNA_P Parameter: Tissue Value: Germinating Seeds
  misc_feature: MA Experiment ID: 108469 Result: Up-regulated in Transcription
  misc_feature: MA Experiment ID: 108488 Result: Down-regulated in Transcription
  misc_feature: MA Experiment ID: 108573 Result: Up-regulated in Transcription
  misc_feature: MA Experiment 108573 PARAMETER Experiment Name: At_Drought_cDNA_P Parameter: Timepoint (hr) Value: 6
  misc_feature: MA Experiment 108573 PARAMETER Experiment Name: At_Drought_cDNA_P Parameter: Tissue Value: Aerial
  misc_feature: MA Experiment 108573 PARAMETER Experiment Name: At_Drought_cDNA_P Parameter: Treatment Value: Drought vs. No Drought
  misc_feature: MA Experiment ID: 108668 Result: Up-regulated in Transcription
  misc_feature: MA Experiment 108668 PARAMETER Experiment Name: At_2mM_SA_cDNA_P Parameter: Plant Line Value: WS
  misc_feature: MA Experiment 108668 PARAMETER Experiment Name: At_2mM_SA_cDNA_P Parameter: Timepoint (hr) Value: 6
  misc_feature: MA Experiment 108668 PARAMETER Experiment Name: At_2mM_SA_cDNA_P Parameter: Treatment Value: 2mM SA vs. No Treatment
  misc_feature: MA Experiment ID: 20000090 Result: Up-regulated in Transcription
  misc_feature: MA Experiment ID: 20000173 Result: Down-regulated in Transcription
  misc_feature: MA Experiment 20000173 PARAMETER Experiment Name: At_42deg_Heat_P Parameter: Age (day) Value: 14
  misc_feature: MA Experiment 20000173 PARAMETER Experiment Name: At_42deg_Heat_P Parameter: Organism Value: A. thaliana
  misc_feature: MA Experiment 20000173 PARAMETER Experiment Name: At_42deg_Heat_P Parameter: Plant Line Value: WS
  misc_feature: MA Experiment 20000173 PARAMETER Experiment Name: At_42deg_Heat_P Parameter: Temperature (deg C) Value: 42 vs. 22
  misc_feature: MA Experiment 20000173 PARAMETER Experiment Name: At_42deg_Heat_P Parameter: Timepoint (hr) Value: 6
  misc_feature: MA Experiment 20000173 PARAMETER Experiment Name: At_42deg_Heat_P Parameter: Tissue Value: Aerial
  misc_feature: MA Experiment ID: 20000179 Result: Up-regulated in Transcription
  misc_feature: MA Experiment 20000179 PARAMETER Experiment Name: At_Germinating_Seeds_P Parameter: Age (hr) Value: 6 vs. 0
  misc_feature: MA Experiment 20000179 PARAMETER Experiment Name: At_Germinating_Seeds_P Parameter: Tissue Value: Germinating Seeds
  misc_feature: MA Experiment ID: 20000180 Result: Up-regulated in Transcription
  misc_feature: MA Experiment 20000180 PARAMETER Experiment Name: At_Germinating_Seeds_P Parameter: Age (hr) Value: 24 vs. 0
  misc_feature: MA Experiment 20000180 PARAMETER Experiment Name: At_Germinating_Seeds_P Parameter: Tissue Value: Germinating Seeds
  misc_feature: MA Experiment ID: 20000182 Result: Up-regulated in Transcription
  misc_feature: MA Experiment 20000182 PARAMETER Experiment Name: At_2mM_SA_P Parameter: Age (day) Value: 14
  misc_feature: MA Experiment 20000182 PARAMETER Experiment Name: At_2mM_SA_P Parameter: Organism Value: A. thaliana
  misc_feature: MA Experiment 20000182 PARAMETER Experiment Name: At_2mM_SA_P Parameter: Plant Line Value: WS
  misc_feature: MA Experiment 20000182 PARAMETER Experiment Name: At_2mM_SA_P Parameter: Timepoint (hr) Value: 6
  misc_feature: MA Experiment 20000182 PARAMETER Experiment Name: At_2mM_SA_P Parameter: Tissue Value: Aerial
  misc_feature: MA Experiment 20000182 PARAMETER Experiment Name: At_2mM_SA_P Parameter: Treatment Value: 2mM SA vs. No Treatment
  misc_feature: MA Experiment ID: 20000185 Result: Up-regulated in Transcription
  misc_feature: MA Experiment 20000185 PARAMETER Experiment Name: At_Roots__P Parameter: Age (day) Value: 7 vs. 21
  misc_feature: MA Experiment 20000185 PARAMETER Experiment Name: At_Roots__P Parameter: Organism Value: A. thaliana
  misc_feature: MA Experiment 20000185 PARAMETER Experiment Name: At_Roots__P Parameter: Tissue Value: Roots vs. Whole Plant
  misc_feature: MA Experiment ID: 20000439 Result: Up-regulated in Transcription
  misc_feature: MA Experiment 20000439 PARAMETER Experiment Name: At_Roots__P Parameter: Age (day) Value: 14 vs. 21
  misc_feature: MA Experiment 20000439 PARAMETER Experiment Name: At_Roots__P Parameter: Organism Value: A. thaliana
  misc_feature: MA Experiment 20000439 PARAMETER Experiment Name: At_Roots__P Parameter: Tissue Value: Roots vs. Whole Plant
  misc_feature: MA Experiment ID: 20001904 Result: Up-regulated in Transcription
  misc_feature: MA Experiment 20001904 PARAMETER Experiment Name: At_Drought_Reproduction_P Parameter: Age (day) Value: 37
  misc_feature: MA Experiment 20001904 PARAMETER Experiment Name: At_Drought_Reproduction_P Parameter: Organism Value: A. thaliana
  misc_feature: MA Experiment 20001904 PARAMETER Experiment Name: At_Drought_Reproduction_P Parameter: Plant Line Value: WS
  misc_feature: MA Experiment 20001904 PARAMETER Experiment Name: At_Drought_Reproduction_P Parameter: Timepoint (day) Value: 7
  misc_feature: MA Experiment 20001904 PARAMETER Experiment Name: At_Drought_Reproduction_P Parameter: Tissue Value: Rosettes
  misc_feature: MA Experiment 20001904 PARAMETER Experiment Name: At_Drought_Reproduction_P Parameter: Treatment Value: Drought vs. No Drought
  misc_feature: MA Experiment ID: 20001905 Result: Up-regulated in Transcription
  misc_feature: MA Experiment 20001905 PARAMETER Experiment Name: At_Drought_Reproduction_P Parameter: Age (day) Value: 40
  misc_feature: MA Experiment 20001905 PARAMETER Experiment Name: At_Drought_Reproduction_P Parameter: Organism Value: A. thaliana
  misc_feature: MA Experiment 20001905 PARAMETER Experiment Name: At_Drought_Reproduction_P Parameter: Plant Line Value: WS
  misc_feature: MA Experiment 20001905 PARAMETER Experiment Name: At_Drought_Reproduction_P Parameter: Timepoint (day) Value: 10
  misc_feature: MA Experiment 20001905 PARAMETER Experiment Name: At_Drought_Reproduction_P Parameter: Tissue Value: Rosettes
  misc_feature: MA Experiment 20001905 PARAMETER Experiment Name: At_Drought_Reproduction_P Parameter: Treatment Value: Drought vs. No Drought

SEQ ID NO: 33505 - protein, 279 aa, Arabidopsis thaliana; identical to SEQ ID NO: 29915
  peptide (1)..(279): Ceres Seq. ID no. 12421077
  misc_feature (18)..(115): Pfam Name: Phosphoglycerate mutase family Pfam Description: Phosphoglycerate mutase family
  misc_feature (18)..(99): Homolog of NCBI NO: 17230464 NR Description: hypothetical protein [Nostoc sp. PCC 7120]
  misc_feature (18)..(99): Homolog of NCBI NO: 23042637 NR Description: hypothetical protein [Trichodesmium erythraeum
  misc_feature (116)..(212): Homolog of NCBI NO: 23042637 NR Description: hypothetical protein [Trichodesmium erythraeum
  misc_feature (41)..(263): Homolog of NCBI NO: 25347741 NR Description: pRIB5 protein [imported] - Ribes nigrum
  misc_feature (23)..(279): Homolog of NCBI NO: 21592687 NR Description: unknown [Arabidopsis thaliana]
  misc_feature (6)..(279): Homolog of NCBI NO: 15232324 NR Description: putative protein
  misc_feature (1)..(263): Homolog of NCBI NO: 15232326 NR Description: putative protein; protein id: At3g60430.1
  misc_feature (6)..(263): Homolog of NCBI NO: 15232328 NR Description: putative protein; protein id: At3g60440.1
  misc_feature (6)..(279): Homolog of NCBI NO: 15232331 NR Description: putative protein
  misc_feature (6)..(279): Homolog of NCBI NO: 21553703 NR Description: pRIB5 protein [Arabidopsis thaliana]

SEQ ID NO: 33506 - protein, 274 aa, Arabidopsis thaliana; identical to SEQ ID NO: 29916
  peptide (1)..(274): Ceres Seq. ID no. 12421078
  misc_feature (13)..(110): Pfam Name: Phosphoglycerate mutase family Pfam Description: Phosphoglycerate mutase family
  misc_feature (13)..(94): Homolog of NCBI NO: 17230464 NR Description: hypothetical protein [Nostoc sp. PCC 7120]
  misc_feature (13)..(94): Homolog of NCBI NO: 23042637 NR Description: hypothetical protein [Trichodesmium erythraeum
  misc_feature (111)..(207): Homolog of NCBI NO: 23042637 NR Description: hypothetical protein [Trichodesmium erythraeum
  misc_feature (36)..(258): Homolog of NCBI NO: 25347741 NR Description: pRIB5 protein [imported] - Ribes nigrum
  misc_feature (18)..(274): Homolog of NCBI NO: 21592687 NR Description: unknown [Arabidopsis thaliana]
  misc_feature (1)..(274): Homolog of NCBI NO: 15232324 NR Description: putative protein
  misc_feature (1)..(258): Homolog of NCBI NO: 15232326 NR Description: putative protein; protein id: At3g60430.1
  misc_feature (1)..(258): Homolog of NCBI NO: 15232328 NR Description: putative protein; protein id: At3g60440.1
  misc_feature (1)..(274): Homolog of NCBI NO: 15232331 NR Description: putative protein
  misc_feature (1)..(274): Homolog of NCBI NO: 21553703 NR Description: pRIB5 protein [Arabidopsis thaliana]

SEQ ID NO: 33507 - protein, 257 aa, Arabidopsis thaliana; identical to SEQ ID NO: 29917
  peptide (1)..(257): Ceres Seq. ID no. 12421079
  misc_feature (1)..(93): Pfam Name: Phosphoglycerate mutase family Pfam Description: Phosphoglycerate mutase family
  misc_feature (1)..(77): Homolog of NCBI NO: 17230464 NR Description: hypothetical protein [Nostoc sp. PCC 7120]
  misc_feature (1)..(77): Homolog of NCBI NO: 23042637 NR Description: hypothetical protein [Trichodesmium erythraeum
  misc_feature (94)..(190): Homolog of NCBI NO: 23042637 NR Description: hypothetical protein [Trichodesmium erythraeum
  misc_feature (19)..(241): Homolog of NCBI NO: 25347741 NR Description: pRIB5 protein [imported] - Ribes nigrum
  misc_feature (1)..(257): Homolog of NCBI NO: 21592687 NR Description: unknown [Arabidopsis thaliana]
  misc_feature (1)..(257): Homolog of NCBI NO: 15232324 NR Description: putative protein
  misc_feature (1)..(241): Homolog of NCBI NO: 15232326 NR Description: putative protein; protein id: At3g60430.1
  misc_feature (1)..(241): Homolog of NCBI NO: 15232328 NR Description: putative protein; protein id: At3g60440.1
  misc_feature (1)..(257): Homolog of NCBI NO: 15232331 NR Description: putative protein
  misc_feature (1)..(257): Homolog of NCBI NO: 21553703 NR Description: pRIB5 protein [Arabidopsis thaliana]

SEQ ID NO: 33508 - DNA, 617 bp, Arabidopsis thaliana; identical to SEQ ID NO: 29918
  misc_feature (1)..(617): Ceres Seq. ID no. 12333456
  misc_feature: MA Experiment ID: 108434 Result: Down-regulated in Transcription
  misc_feature: MA Experiment 108434 PARAMETER Experiment Name: At_Root_Tips_cDNA_P Parameter: Tissue Value: Root Tips
  misc_feature: MA Experiment ID: 108462 Result: Up-regulated in Transcription
  misc_feature: MA Experiment 108462 PARAMETER Experiment Name: At_Germinating_Seeds_cDNA_P Parameter: Age (day) Value: 2 vs. 0
  misc_feature: MA Experiment 108462 PARAMETER Experiment Name: At_Germinating_Seeds_cDNA_P Parameter: Tissue Value: Germinating Seeds
  misc_feature: MA Experiment ID: 108595 Result: Down-regulated in Transcription
  misc_feature: MA Experiment 108595 PARAMETER Experiment Name: At_Ler-pi_Ovule_cDNA_P Parameter: Plant Line Value: null
  misc_feature: MA Experiment ID: 20000179 Result: Up-regulated in Transcription
  misc_feature: MA Experiment 20000179 PARAMETER Experiment Name: At_Germinating_Seeds_P Parameter: Age (hr) Value: 6 vs. 0
  misc_feature: MA Experiment 20000179 PARAMETER Experiment Name: At_Germinating_Seeds_P Parameter: Tissue Value: Germinating Seeds
  misc_feature: MA Experiment ID: 20000180 Result: Up-regulated in Transcription
  misc_feature: MA Experiment 20000180 PARAMETER Experiment Name: At_Germinating_Seeds_P Parameter: Age (hr) Value: 24 vs. 0
  misc_feature: MA Experiment 20000180 PARAMETER Experiment Name: At_Germinating_Seeds_P Parameter: Tissue Value: Germinating Seeds
  misc_feature: MA Experiment ID: 20000185 Result: Up-regulated in Transcription
  misc_feature: MA Experiment 20000185 PARAMETER Experiment Name: At_Roots__P Parameter: Age (day) Value: 7 vs. 21
  misc_feature: MA Experiment 20000185 PARAMETER Experiment Name: At_Roots__P Parameter: Organism Value: A. thaliana
  misc_feature: MA Experiment 20000185 PARAMETER Experiment Name: At_Roots__P Parameter: Tissue Value: Roots vs. Whole Plant
  misc_feature: MA Experiment ID: 20000224 Result: Down-regulated in Transcription
  misc_feature: MA Experiment ID: 20000234 Result: Up-regulated in Transcription
  misc_feature: MA Experiment 20000234 PARAMETER Experiment Name: At_Siliques_P Parameter: Age (day) Value: 21
  misc_feature: MA Experiment 20000234 PARAMETER Experiment Name: At_Siliques_P Parameter: Organism Value: A. thaliana
  misc_feature: MA Experiment 20000234 PARAMETER Experiment Name: At_Siliques_P Parameter: Plant Line Value: WS
  misc_feature: MA Experiment 20000234 PARAMETER Experiment Name: At_Siliques_P Parameter: Tissue Value: Less Than 5mm Siliques vs. Whole Plant
  misc_feature: MA Experiment ID: 20000235 Result: Up-regulated in Transcription
  misc_feature: MA Experiment 20000235 PARAMETER Experiment Name: At_Siliques_P Parameter: Age (day) Value: 21
  misc_feature: MA Experiment 20000235 PARAMETER Experiment Name: At_Siliques_P Parameter: Organism Value: A. thaliana
  misc_feature: MA Experiment 20000235 PARAMETER Experiment Name: At_Siliques_P Parameter: Plant Line Value: WS
  misc_feature: MA Experiment 20000235 PARAMETER Experiment Name: At_Siliques_P Parameter: Tissue Value: 5-10mm Siliques vs. Whole Plant
  misc_feature: MA Experiment ID: 20000439 Result: Up-regulated in Transcription
  misc_feature: MA Experiment 20000439 PARAMETER Experiment Name: At_Roots__P Parameter: Age (day) Value: 14 vs. 21
  misc_feature: MA Experiment 20000439 PARAMETER Experiment Name: At_Roots__P Parameter: Organism Value: A. thaliana
  misc_feature: MA Experiment 20000439 PARAMETER Experiment Name: At_Roots__P Parameter: Tissue Value: Roots vs. Whole Plant
  misc_feature: MA Experiment ID: 20001555 Result: Down-regulated in Transcription
  misc_feature: MA Experiment 20001555 PARAMETER Experiment Name: At_Drought_Soil_Dry_P Parameter: Age (day) Value: 24
  misc_feature: MA Experiment 20001555 PARAMETER Experiment Name: At_Drought_Soil_Dry_P Parameter: Organism Value: A. thaliana
  misc_feature: MA Experiment 20001555 PARAMETER Experiment Name: At_Drought_Soil_Dry_P Parameter: Plant Line Value: WS
  misc_feature: MA Experiment 20001555 PARAMETER Experiment Name: At_Drought_Soil_Dry_P Parameter: Post Timepoint (hr) Value: None
  misc_feature: MA Experiment 20001555 PARAMETER Experiment Name: At_Drought_Soil_Dry_P Parameter: Post-Treatment Value: None
  misc_feature: MA Experiment 20001555 PARAMETER Experiment Name: At_Drought_Soil_Dry_P Parameter: Timepoint (day) Value: 10
  misc_feature: MA Experiment 20001555 PARAMETER Experiment Name: At_Drought_Soil_Dry_P Parameter: Treatment Value: Drought vs. No Drought
  misc_feature: MA Experiment ID: 20001556 Result: Down-regulated in Transcription
  misc_feature: MA Experiment 20001556 PARAMETER Experiment Name: At_Drought_Soil_Dry_P Parameter: Age (day) Value: 26
  misc_feature: MA Experiment 20001556 PARAMETER Experiment Name: At_Drought_Soil_Dry_P Parameter: Organism Value: A. thaliana
  misc_feature: MA Experiment 20001556 PARAMETER Experiment Name: At_Drought_Soil_Dry_P Parameter: Plant Line Value: WS
  misc_feature: MA Experiment 20001556 PARAMETER Experiment Name: At_Drought_Soil_Dry_P Parameter: Post Timepoint (hr) Value: None
  misc_feature: MA Experiment 20001556 PARAMETER Experiment Name: At_Drought_Soil_Dry_P Parameter: Post-Treatment Value: None
  misc_feature: MA Experiment 20001556 PARAMETER Experiment Name: At_Drought_Soil_Dry_P Parameter: Timepoint (day) Value: 12
  misc_feature: MA Experiment 20001556 PARAMETER Experiment Name: At_Drought_Soil_Dry_P Parameter: Treatment Value: Drought vs. No Drought
  misc_feature: MA Experiment ID: 20001560 Result: Up-regulated in Transcription
  misc_feature: MA Experiment 20001560 PARAMETER Experiment Name: At_Drought_Soil_Dry_P Parameter: Age (day) Value: 28
  misc_feature: MA Experiment 20001560 PARAMETER Experiment Name: At_Drought_Soil_Dry_P Parameter: Organism Value: A. thaliana
  misc_feature: MA Experiment 20001560 PARAMETER Experiment Name: At_Drought_Soil_Dry_P Parameter: Plant Line Value: WS
  misc_feature: MA Experiment 20001560 PARAMETER Experiment Name: At_Drought_Soil_Dry_P Parameter: Post Timepoint (hr) Value: None
  misc_feature: MA Experiment 20001560 PARAMETER Experiment Name: At_Drought_Soil_Dry_P Parameter: Post-Treatment Value: None
  misc_feature: MA Experiment 20001560 PARAMETER Experiment Name: At_Drought_Soil_Dry_P Parameter: Timepoint (day) Value: 14
  misc_feature: MA Experiment 20001560 PARAMETER Experiment Name: At_Drought_Soil_Dry_P Parameter: Treatment Value: Drought vs. No Drought

SEQ ID NO: 33509 - protein, 133 aa, Arabidopsis thaliana; identical to SEQ ID NO: 29919
  peptide (1)..(133): Ceres Seq. ID no. 12333457
  misc_feature (6)..(73): Pfam Name: C2 domain Pfam Description: C2 domain
  misc_feature (1)..(114): Homolog of NCBI NO: 5565983 NR Description: unknown [Zea mays]
  misc_feature (1)..(126): Homolog of NCBI NO: 7489756 NR Description: hypothetical protein - maize
  misc_feature (1)..(133): Homolog of NCBI NO: 3860331 NR Description: hypothetical protein [Cicer arietinum]
  misc_feature (1)..(126): Homolog of NCBI NO: 38345558 NR Description: OSJNBa0032F06.15 [Oryza sativa (japonica
  misc_feature (1)..(129): Homolog of NCBI NO: 11358958 NR Description: elicitor-responsive gene 3 [imported] - rice
  misc_feature (1)..(133): Homolog of NCBI NO: 21553977 NR Description: putative elicitor-responsive gene [Arabidopsis
  misc_feature (1)..(133): Homolog of NCBI NO: 15221718 NR Description: putative elicitor-responsive gene

SEQ ID NO: 33510 - protein, 102 aa, Arabidopsis thaliana; identical to SEQ ID NO: 29920
  peptide (1)..(102): Ceres Seq. ID no. 12333458
  misc_feature (1)..(83): Homolog of NCBI NO: 5565983 NR Description: unknown [Zea mays]
  misc_feature (1)..(95): Homolog of NCBI NO: 7489756 NR Description: hypothetical protein - maize
  misc_feature (1)..(102): Homolog of NCBI NO: 3860331 NR Description: hypothetical protein [Cicer arietinum]
  misc_feature (1)..(95): Homolog of NCBI NO: 38345558 NR Description: OSJNBa0032F06.15 [Oryza sativa (japonica
  misc_feature (1)..(98): Homolog of NCBI NO: 11358958 NR Description: elicitor-responsive gene 3 [imported] - rice
  misc_feature (1)..(102): Homolog of NCBI NO: 21553977 NR Description: putative elicitor-responsive gene [Arabidopsis
  misc_feature (1)..(102): Homolog of NCBI NO: 15221718 NR Description: putative elicitor-responsive gene

SEQ ID NO: 33511 - DNA, 1371 bp, Arabidopsis thaliana; identical to SEQ ID NO: 29921
  misc_feature (1)..(1371): Ceres Seq. ID no. 13497131
  misc_feature: MA Experiment ID: 108434 Result: Up-regulated in Transcription
  misc_feature: MA Experiment 108434 PARAMETER Experiment Name: At_Root_Tips_cDNA_P Parameter: Tissue Value: Root Tips
  misc_feature: MA Experiment ID: 108462 Result: Down-regulated in Transcription
  misc_feature: MA Experiment 108462 PARAMETER Experiment Name: At_Germinating_Seeds_cDNA_P Parameter: Age (day) Value: 2 vs. 0
  misc_feature: MA Experiment 108462 PARAMETER Experiment Name: At_Germinating_Seeds_cDNA_P Parameter: Tissue Value: Germinating Seeds
  misc_feature: MA Experiment ID: 108463 Result: Down-regulated in Transcription
  misc_feature: MA Experiment 108463 PARAMETER Experiment Name: At_Germinating_Seeds_cDNA_P Parameter: Age (day) Value: 3 vs. 0
  misc_feature: MA Experiment 108463 PARAMETER Experiment Name: At_Germinating_Seeds_cDNA_P Parameter: Tissue Value: Germinating Seeds
  misc_feature: MA Experiment ID: 108464 Result: Down-regulated in Transcription
  misc_feature: MA Experiment 108464 PARAMETER Experiment Name: At_Germinating_Seeds_cDNA_P Parameter: Age (day) Value: 4 vs. 0
  misc_feature: MA Experiment 108464 PARAMETER Experiment Name: At_Germinating_Seeds_cDNA_P Parameter: Tissue Value: Germinating Seeds
  misc_feature: MA Experiment ID: 108585 Result: Up-regulated in Transcription
  misc_feature: MA Experiment 108585 PARAMETER Experiment Name: At_5mM_NaNP_cDNA_P Parameter: Timepoint (hr) Value: 6
  misc_feature: MA Experiment 108585 PARAMETER Experiment Name: At_5mM_NaNP_cDNA_P Parameter: Tissue Value: Aerial
  misc_feature: MA Experiment 108585 PARAMETER Experiment Name: At_5mM_NaNP_cDNA_P Parameter: Treatment Value: null
  misc_feature: MA Experiment ID: 108595 Result: Down-regulated in Transcription
  misc_feature: MA Experiment 108595 PARAMETER Experiment Name: At_Ler-pi_Ovule_cDNA_P Parameter: Plant Line Value: null
  misc_feature: MA Experiment ID: 20000214 Result: Up-regulated in Transcription
  misc_feature: MA Experiment 20000214 PARAMETER Experiment Name: At_4deg_Cold_P Parameter: Timepoint (hr) Value: 6
  misc_feature: MA Experiment ID: 20000227 Result: Up-regulated in Transcription
  misc_feature: MA Experiment 20000227 PARAMETER Experiment Name: At_Root-Tips-vs-Tops_P Parameter: Tissue Value: Root Tips vs. Root Tops
  misc_feature: MA Experiment ID: 20001557 Result: Up-regulated in Transcription
  misc_feature: MA Experiment 20001557 PARAMETER Experiment Name: At_Drought_Soil_Dry_P Parameter: Age (day) Value: 27
  misc_feature: MA Experiment 20001557 PARAMETER Experiment Name: At_Drought_Soil_Dry_P Parameter: Organism Value: A. thaliana
  misc_feature: MA Experiment 20001557 PARAMETER Experiment Name: At_Drought_Soil_Dry_P Parameter: Plant Line Value: WS
  misc_feature: MA Experiment 20001557 PARAMETER Experiment Name: At_Drought_Soil_Dry_P Parameter: Post Timepoint (hr) Value: 3
  misc_feature: MA Experiment 20001557 PARAMETER Experiment Name: At_Drought_Soil_Dry_P Parameter: Post-Treatment Value: Re-Water vs. No Drought
  misc_feature: MA Experiment 20001557 PARAMETER Experiment Name: At_Drought_Soil_Dry_P Parameter: Timepoint (day) Value: 13
  misc_feature: MA Experiment 20001557 PARAMETER Experiment Name: At_Drought_Soil_Dry_P Parameter: Treatment Value: Drought vs. No Drought
  misc_feature: MA Experiment ID: 20001558 Result: Up-regulated in Transcription
  misc_feature: MA Experiment 20001558 PARAMETER Experiment Name: At_Drought_Soil_Dry_P Parameter: Age (day) Value: 27
  misc_feature: MA Experiment 20001558 PARAMETER Experiment Name: At_Drought_Soil_Dry_P Parameter: Organism Value: A. thaliana
  misc_feature: MA Experiment 20001558 PARAMETER Experiment Name: At_Drought_Soil_Dry_P Parameter: Plant Line Value: WS
  misc_feature: MA Experiment 20001558 PARAMETER Experiment Name: At_Drought_Soil_Dry_P Parameter: Post Timepoint (hr) Value: 6
  misc_feature: MA Experiment 20001558 PARAMETER Experiment Name: At_Drought_Soil_Dry_P Parameter: Post-Treatment Value: Re-Water vs. No Drought
  misc_feature: MA Experiment 20001558 PARAMETER Experiment Name: At_Drought_Soil_Dry_P Parameter: Timepoint (day) Value: 13
  misc_feature: MA Experiment 20001558 PARAMETER Experiment Name: At_Drought_Soil_Dry_P Parameter: Treatment Value: Drought vs. No Drought
  misc_feature: MA Experiment ID: 20001560 Result: Up-regulated in Transcription
  misc_feature: MA Experiment 20001560 PARAMETER Experiment Name: At_Drought_Soil_Dry_P Parameter: Age (day) Value: 28
  misc_feature: MA Experiment 20001560 PARAMETER Experiment Name: At_Drought_Soil_Dry_P Parameter: Organism Value: A. thaliana
  misc_feature: MA Experiment 20001560 PARAMETER Experiment Name: At_Drought_Soil_Dry_P Parameter: Plant Line Value: WS
  misc_feature: MA Experiment 20001560 PARAMETER Experiment Name: At_Drought_Soil_Dry_P Parameter: Post Timepoint (hr) Value: None
  misc_feature: MA Experiment 20001560 PARAMETER Experiment Name: At_Drought_Soil_Dry_P Parameter: Post-Treatment Value: None
  misc_feature: MA Experiment 20001560 PARAMETER Experiment Name: At_Drought_Soil_Dry_P Parameter: Timepoint (day) Value: 14
  misc_feature: MA Experiment 20001560 PARAMETER Experiment Name: At_Drought_Soil_Dry_P Parameter: Treatment Value: Drought vs. No Drought

SEQ ID NO: 33512 - protein, 300 aa, Arabidopsis thaliana; identical to SEQ ID NO: 29922
  peptide (1)..(300): Ceres Seq. ID no. 13497132
  misc_feature (72)..(190): Pfam Name: Adenylate kinase Pfam Description: Adenylate kinase
  misc_feature (71)..(291): Homolog of NCBI NO: 26985214 NR Description: adenylate kinase [Thermotoga neapolitana]
  misc_feature (71)..(276): Homolog of NCBI NO: 23510140 NR Description: adenylate kinase 1 [Plasmodium falciparum 3D7]
  misc_feature (71)..(271): Homolog of NCBI NO: 28212159 NR Description: adenylate kinase [Clostridium tetani E88]
  misc_feature (71)..(295): Homolog of NCBI NO: 15644227 NR Description: adenylate kinase [Thermotoga maritima]
  misc_feature (71)..(287): Homolog of NCBI NO: 11498284 NR Description: adenylate kinase (adk) [Archaeoglobus fulgidus
  misc_feature (19)..(300): Homolog of NCBI NO: 30687836 NR Description: adenylate kinase -related [Arabidopsis thaliana]
  misc_feature (14)..(122): Homolog of NCBI NO: 6063552 NR Description: ESTs AU065232(E60855),C23624(S1554), correspond to a region of the predicted gene.~similar to putative
  misc_feature (113)..(300): Homolog of NCBI NO: 6063552 NR Description: ESTs AU065232(E60855),C23624(S1554), correspond to a region of the predicted gene.~similar to putative
  misc_feature (14)..(300): Homolog of NCBI NO: 29427816 NR Description: Adenylate kinase, chloroplast precursor (ATP-AMP
  misc_feature (17)..(300): Homolog of NCBI NO: 15228109 NR Description: adenylate kinase -related [Arabidopsis thaliana]

SEQ ID NO: 33513 - protein, 284 aa, Arabidopsis thaliana; identical to SEQ ID NO: 29923
  peptide (1)..(284): Ceres Seq. ID no. 13497133
  misc_feature (56)..(174): Pfam Name: Adenylate kinase Pfam Description: Adenylate kinase
  misc_feature (55)..(275): Homolog of NCBI NO: 26985214 NR Description: adenylate kinase [Thermotoga neapolitana]
  misc_feature (55)..(260): Homolog of NCBI NO: 23510140 NR Description: adenylate kinase 1 [Plasmodium falciparum 3D7]
  misc_feature (55)..(255): Homolog of NCBI NO: 28212159 NR Description: adenylate kinase [Clostridium tetani E88]
  misc_feature (55)..(279): Homolog of NCBI NO: 15644227 NR Description: adenylate kinase [Thermotoga maritima]
  misc_feature (55)..(271): Homolog of NCBI NO: 11498284 NR Description: adenylate kinase (adk) [Archaeoglobus fulgidus
  misc_feature (3)..(284): Homolog of NCBI NO: 30687836 NR Description: adenylate kinase -related [Arabidopsis thaliana]
  misc_feature (1)..(106): Homolog of NCBI NO: 6063552 NR Description: ESTs AU065232(E60855),C23624(S1554), correspond to a region of the predicted gene.~similar to putative
  misc_feature (97)..(284): Homolog of NCBI NO: 6063552 NR Description: ESTs AU065232(E60855),C23624(S1554), correspond to a region of the predicted gene.~similar to putative
  misc_feature (1)..(284): Homolog of NCBI NO: 29427816 NR Description: Adenylate kinase, chloroplast precursor (ATP-AMP
  misc_feature (1)..(284): Homolog of NCBI NO: 15228109 NR Description: adenylate kinase -related [Arabidopsis thaliana]

SEQ ID NO: 33514 - DNA, 1609 bp, Arabidopsis thaliana; identical to SEQ ID NO: 29924
  misc_feature (1)..(1609): Ceres Seq. ID no. 12333595
  misc_feature: MA Experiment ID: 108473 Result: Down-regulated in Transcription
  misc_feature: MA Experiment 108473 PARAMETER Experiment Name: At_Drought_Flowers_cDNA_P Parameter: Timepoint (hr) Value: 7 d
  misc_feature: MA Experiment 108473 PARAMETER Experiment Name: At_Drought_Flowers_cDNA_P Parameter: Tissue Value: Flower
  misc_feature: MA Experiment 108473 PARAMETER Experiment Name: At_Drought_Flowers_cDNA_P Parameter: Treatment Value: Drought vs. No Drought
  misc_feature: MA Experiment ID: 108474 Result: Down-regulated in Transcription
  misc_feature: MA Experiment 108474 PARAMETER Experiment Name: At_Drought_Flowers_cDNA_P Parameter: Timepoint (hr) Value: null
  misc_feature: MA Experiment 108474 PARAMETER Experiment Name: At_Drought_Flowers_cDNA_P Parameter: Treatment Value: Drought vs. No Drought
  misc_feature: MA Experiment ID: 108501 Result: Down-regulated in Transcription
  misc_feature: MA Experiment 108501 PARAMETER Experiment Name: At_ap2_floral_buds_cDNA_P Parameter: Plant Line Value: ap2 (Ler.)
  misc_feature: MA Experiment 108501 PARAMETER Experiment Name: At_ap2_floral_buds_cDNA_P Parameter: Tissue Value: Closed Flower
  misc_feature: MA Experiment ID: 108595 Result: Up-regulated in Transcription
  misc_feature: MA Experiment 108595 PARAMETER Experiment Name: At_Ler-pi_Ovule_cDNA_P Parameter: Plant Line Value: null
  misc_feature: MA Experiment ID: 20000171 Result: Up-regulated in Transcription
  misc_feature: MA Experiment 20000171 PARAMETER Experiment Name: At_42deg_Heat_P Parameter: Age (day) Value: 14
  misc_feature: MA Experiment 20000171 PARAMETER Experiment Name: At_42deg_Heat_P Parameter: Organism Value: A. thaliana
  misc_feature: MA Experiment 20000171 PARAMETER Experiment Name: At_42deg_Heat_P Parameter: Plant Line Value: WS
  misc_feature: MA Experiment 20000171 PARAMETER Experiment Name: At_42deg_Heat_P Parameter: Temperature (deg C) Value: 42 vs. 22
  misc_feature: MA Experiment 20000171 PARAMETER Experiment Name: At_42deg_Heat_P Parameter: Timepoint (hr) Value: 1
  misc_feature: MA Experiment 20000171 PARAMETER Experiment Name: At_42deg_Heat_P Parameter: Tissue Value: Aerial
  misc_feature: MA Experiment ID: 20000173 Result: Up-regulated in Transcription
  misc_feature: MA Experiment 20000173 PARAMETER Experiment Name: At_42deg_Heat_P Parameter: Age (day) Value: 14
  misc_feature: MA Experiment 20000173 PARAMETER Experiment Name: At_42deg_Heat_P Parameter: Organism Value: A. thaliana
  misc_feature: MA Experiment 20000173 PARAMETER Experiment Name: At_42deg_Heat_P Parameter: Plant Line Value: WS
  misc_feature: MA Experiment 20000173 PARAMETER Experiment Name: At_42deg_Heat_P Parameter: Temperature (deg C) Value: 42 vs. 22
  misc_feature: MA Experiment 20000173 PARAMETER Experiment Name: At_42deg_Heat_P Parameter: Timepoint (hr) Value: 6
  misc_feature: MA Experiment 20000173 PARAMETER Experiment Name: At_42deg_Heat_P Parameter: Tissue Value: Aerial
  misc_feature: MA Experiment ID: 20000184 Result: Down-regulated in Transcription
  misc_feature: MA Experiment 20000184 PARAMETER Experiment Name: At_Shoots__P Parameter: Age (day) Value: 7
  misc_feature: MA Experiment 20000184 PARAMETER Experiment Name: At_Shoots__P Parameter: Tissue Value: Shoots vs. Whole Plant
  misc_feature: MA Experiment ID: 20000185 Result: Down-regulated in Transcription
  misc_feature: MA Experiment 20000185 PARAMETER Experiment Name: At_Roots__P Parameter: Age (day) Value: 7 vs. 21
  misc_feature: MA Experiment 20000185 PARAMETER Experiment Name: At_Roots__P Parameter: Organism Value: A. thaliana
  misc_feature: MA Experiment 20000185 PARAMETER Experiment Name: At_Roots__P Parameter: Tissue Value: Roots vs. Whole Plant
  misc_feature: MA Experiment ID: 20000234 Result: Up-regulated in Transcription
  misc_feature: MA Experiment 20000234 PARAMETER Experiment Name: At_Siliques_P Parameter: Age (day) Value: 21
  misc_feature: MA Experiment 20000234 PARAMETER Experiment Name: At_Siliques_P Parameter: Organism Value: A. thaliana
  misc_feature: MA Experiment 20000234 PARAMETER Experiment Name: At_Siliques_P Parameter: Plant Line Value: WS
  misc_feature: MA Experiment 20000234 PARAMETER Experiment Name: At_Siliques_P Parameter: Tissue Value: Less Than 5mm Siliques vs. Whole Plant
  misc_feature: MA Experiment ID: 20000235 Result: Up-regulated in Transcription
  misc_feature: MA Experiment 20000235 PARAMETER Experiment Name: At_Siliques_P Parameter: Age (day) Value: 21
  misc_feature: MA Experiment 20000235 PARAMETER Experiment Name: At_Siliques_P Parameter: Organism Value: A. thaliana
  misc_feature: MA Experiment 20000235 PARAMETER Experiment Name: At_Siliques_P Parameter: Plant Line Value: WS
  misc_feature: MA Experiment 20000235 PARAMETER Experiment Name: At_Siliques_P Parameter: Tissue Value: 5-10mm Siliques vs. Whole Plant
  misc_feature: MA Experiment ID: 20000265 Result: Up-regulated in Transcription
  misc_feature: MA Experiment 20000265 PARAMETER Experiment Name: At_Open_Flower_P Parameter: Age (day) Value: 21
  misc_feature: MA Experiment 20000265 PARAMETER Experiment Name: At_Open_Flower_P Parameter: Plant Line Value: WS
  misc_feature: MA Experiment 20000265 PARAMETER Experiment Name: At_Open_Flower_P Parameter: Tissue Value: Closed Flower vs. Whole Plant
  misc_feature: MA Experiment ID: 20000286 Result: Up-regulated in Transcription
  misc_feature: MA Experiment 20000286 PARAMETER Experiment Name: At_Open_Flower_P Parameter: Age (day) Value: 21
  misc_feature: MA Experiment 20000286 PARAMETER Experiment Name: At_Open_Flower_P Parameter: Plant Line Value: WS
  misc_feature: MA Experiment 20000286 PARAMETER Experiment Name: At_Open_Flower_P Parameter: Tissue Value: Half Open vs. Whole Plant
  misc_feature: MA Experiment ID: 20000438 Result: Down-regulated in Transcription
  misc_feature: MA Experiment 20000438 PARAMETER Experiment Name: At_Shoots__P Parameter: Age (day) Value: 14
  misc_feature: MA Experiment 20000438 PARAMETER Experiment Name: At_Shoots__P Parameter: Tissue Value: Shoots vs. Whole Plant
  misc_feature: MA Experiment ID: 20001760 Result: Up-regulated in Transcription
  misc_feature: MA Experiment 20001760 PARAMETER Experiment Name: At_50mM_NH4NO3_L-to-H_P Parameter: Timepoint (hr) Value: 2
  misc_feature: MA Experiment 20001760 PARAMETER Experiment Name: At_50mM_NH4NO3_L-to-H_P Parameter: Tissue Value: Siliques
  misc_feature: MA Experiment 20001760 PARAMETER Experiment Name: At_50mM_NH4NO3_L-to-H_P Parameter: Treatment Value: 50mM NH4NO3 vs 100mM Mannitol
  misc_feature: MA Experiment ID: 20001773 Result: Up-regulated in Transcription
  misc_feature: MA Experiment 20001773 PARAMETER Experiment Name: At_Far-red-enriched-adult_P Parameter: Age (day) Value: 30
  misc_feature: MA Experiment 20001773 PARAMETER Experiment Name: At_Far-red-enriched-adult_P Parameter: Light Value: Far-red enriched vs. White
  misc_feature: MA Experiment 20001773 PARAMETER Experiment Name: At_Far-red-enriched-adult_P Parameter: Organism Value: A. thaliana
  misc_feature: MA Experiment 20001773 PARAMETER Experiment Name: At_Far-red-enriched-adult_P Parameter: Plant Line Value: Columbia
  misc_feature: MA Experiment 20001773 PARAMETER Experiment Name: At_Far-red-enriched-adult_P Parameter: Timepoint (hr) Value: 48
  misc_feature: MA Experiment 20001773 PARAMETER Experiment Name: At_Far-red-enriched-adult_P Parameter: Tissue Value: Aerial

SEQ ID NO: 33515 - protein, 291 aa, Arabidopsis thaliana; identical to SEQ ID NO: 29925
  peptide (1)..(291): Ceres Seq. ID no. 12333596
  misc_feature (119)..(291): Homolog of NCBI NO: 18415427 NR Description: putative protein
  misc_feature (119)..(291): Homolog of NCBI NO: 7485728 NR Description: hypothetical protein F18F4.140 - Arabidopsis
  misc_feature (38)..(291): Homolog of NCBI NO: 38347355 NR Description: OSJNBa0070C17.16 [Oryza sativa (japonica
  misc_feature (1)..(291): Homolog of NCBI NO: 15235269 NR Description: putative protein; protein id: At4g20050.1

SEQ ID NO: 33516 - protein, 282 aa, Arabidopsis thaliana; identical to SEQ ID NO: 29926
  peptide (1)..(282): Ceres Seq. ID no. 12333597
  misc_feature (110)..(282): Homolog of NCBI NO: 18415427 NR Description: putative protein
  misc_feature (110)..(282): Homolog of NCBI NO: 7485728 NR Description: hypothetical protein F18F4.140 - Arabidopsis
  misc_feature (29)..(282): Homolog of NCBI NO: 38347355 NR Description: OSJNBa0070C17.16 [Oryza sativa (japonica
  misc_feature (1)..(282): Homolog of NCBI NO: 15235269 NR Description: putative protein; protein id: At4g20050.1

SEQ ID NO: 33517 - protein, 275 aa, Arabidopsis thaliana; identical to SEQ ID NO: 29927
  peptide (1)..(275): Ceres Seq. ID no. 12333598
  misc_feature (103)..(275): Homolog of NCBI NO: 18415427 NR Description: putative protein
  misc_feature (103)..(275): Homolog of NCBI NO: 7485728 NR Description: hypothetical protein F18F4.140 - Arabidopsis
  misc_feature (22)..(275): Homolog of NCBI NO: 38347355 NR Description: OSJNBa0070C17.16 [Oryza sativa (japonica
  misc_feature (1)..(275): Homolog of NCBI NO: 15235269 NR Description: putative protein; protein id: At4g20050.1

SEQ ID NO: 33518 - DNA, 1237 bp, Arabidopsis thaliana; identical to SEQ ID NO: 29928
  misc_feature (1)..(1237): Ceres Seq. ID no. 13580595
  misc_feature: MA Experiment ID: 108434 Result: Down-regulated in Transcription
  misc_feature: MA Experiment 108434 PARAMETER Experiment Name: At_Root_Tips_cDNA_P Parameter: Tissue Value: Root Tips
  misc_feature: MA Experiment ID: 108469 Result: Up-regulated in Transcription
  misc_feature: MA Experiment ID: 108572 Result: Down-regulated in Transcription
  misc_feature: MA Experiment 108572 PARAMETER Experiment Name: At_Drought_cDNA_P Parameter: Timepoint (hr) Value: 1
  misc_feature: MA Experiment 108572 PARAMETER Experiment Name: At_Drought_cDNA_P Parameter: Tissue Value: Aerial
  misc_feature: MA Experiment 108572 PARAMETER Experiment Name: At_Drought_cDNA_P Parameter: Treatment Value: Drought vs. No Drought
  misc_feature: MA Experiment ID: 108579 Result: Up-regulated in Transcription
  misc_feature: MA Experiment 108579 PARAMETER Experiment Name: At_4deg_Cold_cDNA_P Parameter: Temperature (deg C) Value: 4 vs. 22
  misc_feature: MA Experiment 108579 PARAMETER Experiment Name: At_4deg_Cold_cDNA_P Parameter: Timepoint (hr) Value: 6
  misc_feature: MA Experiment 108579 PARAMETER Experiment Name: At_4deg_Cold_cDNA_P Parameter: Tissue Value: Aerial
  misc_feature: MA Experiment ID: 108585 Result: Up-regulated in Transcription
  misc_feature: MA Experiment 108585 PARAMETER Experiment Name: At_5mM_NaNP_cDNA_P Parameter: Timepoint (hr) Value: 6
  misc_feature: MA Experiment 108585 PARAMETER Experiment Name: At_5mM_NaNP_cDNA_P Parameter: Tissue Value: Aerial
  misc_feature: MA Experiment 108585 PARAMETER Experiment Name: At_5mM_NaNP_cDNA_P Parameter: Treatment Value: null
  misc_feature: MA Experiment ID: 108594 Result: Up-regulated in Transcription
  misc_feature: MA Experiment 108594 PARAMETER Experiment Name: At_Ler-rhl_Root_cDNA_P Parameter: Plant Line Value: null
  misc_feature: MA Experiment ID: 108667 Result: Up-regulated in Transcription
  misc_feature: MA Experiment 108667 PARAMETER Experiment Name: At_2mM_SA_cDNA_P Parameter: Plant Line Value: WS
  misc_feature: MA Experiment 108667 PARAMETER Experiment Name: At_2mM_SA_cDNA_P Parameter: Timepoint (hr) Value: 1
  misc_feature: MA Experiment 108667 PARAMETER Experiment Name: At_2mM_SA_cDNA_P Parameter: Treatment Value: 2mM SA vs. No Treatment
  misc_feature: MA Experiment ID: 20000224 Result: Down-regulated in Transcription
  misc_feature: MA Experiment ID: 20000314 Result: Down-regulated in Transcription
  misc_feature: MA Experiment 20000314 PARAMETER Experiment Name: At_14day_Shoots-Roots_Sub_P Parameter: Age (day) Value: 14
  misc_feature: MA Experiment 20000314 PARAMETER Experiment Name: At_14day_Shoots-Roots_Sub_P Parameter: Organism Value: A. thaliana
  misc_feature: MA Experiment 20000314 PARAMETER Experiment Name: At_14day_Shoots-Roots_Sub_P Parameter: Plant Line Value: WS
  misc_feature: MA Experiment 20000314 PARAMETER Experiment Name: At_14day_Shoots-Roots_Sub_P Parameter: Tissue Value: Roots vs. Whole Plant
  misc_feature: MA Experiment ID: 20000315 Result: Down-regulated in Transcription
  misc_feature: MA Experiment 20000315 PARAMETER Experiment Name: At_14day_Shoots-Roots_Sub_P Parameter: Age (day) Value: 14
  misc_feature: MA Experiment 20000315 PARAMETER Experiment Name: At_14day_Shoots-Roots_Sub_P Parameter: Organism Value: A. thaliana
  misc_feature: MA Experiment 20000315 PARAMETER Experiment Name: At_14day_Shoots-Roots_Sub_P Parameter: Plant Line Value: WS
  misc_feature: MA Experiment 20000315 PARAMETER Experiment Name: At_14day_Shoots-Roots_Sub_P Parameter: Tissue Value: Shoots vs. Whole Plant
  misc_feature: MA Experiment ID: 20000347 Result: Up-regulated in Transcription
  misc_feature: MA Experiment 20000347 PARAMETER Experiment Name: At_2mM_SA_Sub_P Parameter: Age (day) Value: 14
  misc_feature: MA Experiment 20000347 PARAMETER Experiment Name: At_2mM_SA_Sub_P Parameter: Organism Value: A. thaliana
  misc_feature: MA Experiment 20000347 PARAMETER Experiment Name: At_2mM_SA_Sub_P Parameter: Plant Line Value: WS
  misc_feature: MA Experiment 20000347 PARAMETER Experiment Name: At_2mM_SA_Sub_P Parameter: Timepoint (hr) Value: 6
  misc_feature: MA Experiment 20000347 PARAMETER Experiment Name: At_2mM_SA_Sub_P Parameter: Tissue Value: Aerial
  misc_feature: MA Experiment 20000347 PARAMETER Experiment Name: At_2mM_SA_Sub_P Parameter: Treatment Value: 2mM SA vs. No Treatment
  misc_feature: MA Experiment ID: 20000355 Result: Down-regulated in Transcription
  misc_feature: MA Experiment 20000355 PARAMETER Experiment Name: At_Siliques_Sub_P Parameter: Age (day) Value: 21
  misc_feature: MA Experiment 20000355 PARAMETER Experiment Name: At_Siliques_Sub_P Parameter: Organism Value: A. thaliana
  misc_feature: MA Experiment 20000355 PARAMETER Experiment Name: At_Siliques_Sub_P Parameter: Plant Line Value: WS
  misc_feature: MA Experiment 20000355 PARAMETER Experiment Name: At_Siliques_Sub_P Parameter: Tissue Value: Less Than 5mm Siliques vs. Whole Plant
  misc_feature: MA Experiment ID: 20000440 Result: Down-regulated in Transcription
  misc_feature: MA Experiment 20000440 PARAMETER Experiment Name: At_Closed-Flower__Sub_P Parameter: Tissue Value: Closed Flower vs. Whole Plant

SEQ ID NO: 33519 - protein, 165 aa, Arabidopsis thaliana; identical to SEQ ID NO: 29929
  peptide (1)..(165): Ceres Seq. ID no. 13580596
  misc_feature (3)..(161): Homolog of NCBI NO: 7716468 NR Description: hypersensitive-induced response protein [Zea mays]
  misc_feature (12)..(159): Homolog of NCBI NO: 14150732 NR Description: hypersensitive-induced response protein [Oryza
  misc_feature (3)..(161): Homolog of NCBI NO: 7716466 NR Description: hypersensitive-induced response protein [Zea mays]
  misc_feature (3)..(163): Homolog of NCBI NO: 15241939 NR Description: hypersensitive-induced response protein
  misc_feature (3)..(162): Homolog of NCBI NO: 28476864 NR Description: hypersensitive-induced reaction protein 2
  misc_feature (13)..(164): Homolog of NCBI NO: 18395770 NR Description: expressed protein [Arabidopsis thaliana]
  misc_feature (12)..(165): Homolog of NCBI NO: 7716470 NR Description: hypersensitive-induced response protein [Zea mays]
  misc_feature (12)..(160): Homolog of NCBI NO: 23345042 NR Description: hypersensitive-induced reaction protein 1
  misc_feature (12)..(163): Homolog of NCBI NO: 3928150 NR Description: hypothetical protein [Cicer arietinum]
  misc_feature (3)..(165): Homolog of NCBI NO: 15222481 NR Description: expressed protein [Arabidopsis thaliana]
  misc_feature (3)..(161): Homolog of NCBI NO: 7716468 NR Description: hypersensitive-induced response protein [Zea mays]
  misc_feature (12)..(159): Homolog of NCBI NO: 14150732 NR Description: hypersensitive-induced response protein [Oryza
  misc_feature (3)..(161): Homolog of NCBI NO: 7716466 NR Description: hypersensitive-induced response protein [Zea mays]
  misc_feature (3)..(163): Homolog of NCBI NO: 15241939 NR Description: hypersensitive-induced response protein
  misc_feature (3)..(162): Homolog of NCBI NO: 28476864 NR Description: hypersensitive-induced reaction protein 2
  misc_feature (13)..(164): Homolog of NCBI NO: 18395770 NR Description: expressed protein [Arabidopsis thaliana]
  misc_feature (12)..(165): Homolog of NCBI NO: 7716470 NR Description: hypersensitive-induced response protein [Zea mays]
  misc_feature (12)..(160): Homolog of NCBI NO: 23345042 NR Description: hypersensitive-induced reaction protein 1
  misc_feature (12)..(163): Homolog of NCBI NO: 3928150 NR Description: hypothetical protein [Cicer arietinum]
  misc_feature (3)..(165): Homolog of NCBI NO: 15222481 NR Description: expressed protein [Arabidopsis thaliana]

SEQ ID NO: 33520 - protein, 151 aa, Arabidopsis thaliana; identical to SEQ ID NO: 23095
  peptide (1)..(151): Ceres Seq. ID no. 13580597
  misc_feature (1)..(147): Homolog of NCBI NO: 7716468 NR Description: hypersensitive-induced response protein [Zea mays]
  misc_feature (1)..(145): Homolog of NCBI NO: 14150732 NR Description: hypersensitive-induced response protein [Oryza
  misc_feature (1)..(147): Homolog of NCBI NO: 7716466 NR Description: hypersensitive-induced response protein [Zea mays]
  misc_feature (1)..(149): Homolog of NCBI NO: 15241939 NR Description: hypersensitive-induced response protein
  misc_feature (1)..(148): Homolog of NCBI NO: 28476864 NR Description: hypersensitive-induced reaction protein 2
  misc_feature (1)..(150): Homolog of NCBI NO: 18395770 NR Description: expressed protein [Arabidopsis thaliana]
  misc_feature (1)..(151): Homolog of NCBI NO: 7716470 NR Description: hypersensitive-induced response protein [Zea mays]
  misc_feature (1)..(146): Homolog of NCBI NO: 23345042 NR Description: hypersensitive-induced reaction protein 1
  misc_feature (1)..(149): Homolog of NCBI NO: 3928150 NR Description: hypothetical protein [Cicer arietinum]
  misc_feature (1)..(151): Homolog of NCBI NO: 15222481 NR Description: expressed protein [Arabidopsis thaliana]
  misc_feature (1)..(147): Homolog of NCBI NO: 7716468 NR Description: hypersensitive-induced response protein [Zea mays]
  misc_feature (1)..(145): Homolog of NCBI NO: 14150732 NR Description: hypersensitive-induced response protein [Oryza
  misc_feature (1)..(147): Homolog of NCBI NO: 7716466 NR Description: hypersensitive-induced response protein [Zea mays]
  misc_feature (1)..(149): Homolog of NCBI NO: 15241939 NR Description: hypersensitive-induced response protein
  misc_feature (1)..(148): Homolog of NCBI NO: 28476864 NR Description: hypersensitive-induced reaction protein 2
  misc_feature (1)..(150): Homolog of NCBI NO: 18395770 NR Description: expressed protein [Arabidopsis thaliana]
  misc_feature (1)..(151): Homolog of NCBI NO: 7716470 NR Description: hypersensitive-induced response protein [Zea mays]
  misc_feature (1)..(146): Homolog of NCBI NO: 23345042 NR Description: hypersensitive-induced reaction protein 1
  misc_feature (1)..(149): Homolog of NCBI NO: 3928150 NR Description: hypothetical protein [Cicer arietinum]
  misc_feature (1)..(151): Homolog of NCBI NO: 15222481 NR Description: expressed protein [Arabidopsis thaliana]

SEQ ID NO: 33521 - protein, 126 aa, Arabidopsis thaliana; identical to SEQ ID NO: 29931
  peptide (1)..(126): Ceres Seq. ID no. 13580598
  misc_feature (1)..(122): Homolog of NCBI NO: 7716468 NR Description: hypersensitive-induced response protein [Zea mays]
  misc_feature (1)..(120): Homolog of NCBI NO: 14150732 NR Description: hypersensitive-induced response protein [Oryza
  misc_feature (1)..(122): Homolog of NCBI NO: 7716466 NR Description: hypersensitive-induced response protein [Zea mays]
  misc_feature (1)..(124): Homolog of NCBI NO: 15241939 NR Description: hypersensitive-induced response protein
  misc_feature (1)..(123): Homolog of NCBI NO: 28476864 NR Description: hypersensitive-induced reaction protein 2
  misc_feature (1)..(125): Homolog of NCBI NO: 18395770 NR Description: expressed protein [Arabidopsis thaliana]
  misc_feature (1)..(126): Homolog of NCBI NO: 7716470 NR Description: hypersensitive-induced response protein [Zea mays]
  misc_feature (1)..(121): Homolog of NCBI NO: 23345042 NR Description: hypersensitive-induced reaction protein 1
  misc_feature (1)..(124): Homolog of NCBI NO: 3928150 NR Description: hypothetical protein [Cicer arietinum]
  misc_feature (1)..(126): Homolog of NCBI NO: 15222481 NR Description: expressed protein [Arabidopsis thaliana]
  misc_feature (1)..(122): Homolog of NCBI NO: 7716468 NR Description: hypersensitive-induced response protein [Zea mays]
  misc_feature (1)..(120): Homolog of NCBI NO: 14150732 NR Description: hypersensitive-induced response protein [Oryza
  misc_feature (1)..(122): Homolog of NCBI NO: 7716466 NR Description: hypersensitive-induced response protein [Zea mays]
  misc_feature (1)..(124): Homolog of NCBI NO: 15241939 NR Description: hypersensitive-induced response protein
  misc_feature (1)..(123): Homolog of NCBI NO: 28476864 NR Description: hypersensitive-induced reaction protein 2
  misc_feature (1)..(125): Homolog of NCBI NO: 18395770 NR Description: expressed protein [Arabidopsis thaliana]
  misc_feature (1)..(126): Homolog of NCBI NO: 7716470 NR Description: hypersensitive-induced response protein [Zea mays]
  misc_feature (1)..(121): Homolog of NCBI NO: 23345042 NR Description: hypersensitive-induced reaction protein 1
  misc_feature (1)..(124): Homolog of NCBI NO: 3928150 NR Description: hypothetical protein [Cicer arietinum]
  misc_feature (1)..(126): Homolog of NCBI NO: 15222481 NR Description: expressed protein [Arabidopsis thaliana]

SEQ ID NO: 33522 - DNA, 740 bp, Arabidopsis thaliana; identical to SEQ ID NO: 29932
  misc_feature (1)..(740): Ceres Seq. ID no. 13494290
  misc_feature: MA Experiment ID: 108435 Result: Down-regulated in Transcription
  misc_feature: MA Experiment 108435 PARAMETER Experiment Name: At_stm_Mutants_cDNA_P Parameter: Plant Line Value: wt Landsburg vs stm
  misc_feature: MA Experiment 108435 PARAMETER Experiment Name: At_stm_Mutants_cDNA_P Parameter: Tissue Value: Shoot Apical Meristem Region
  misc_feature: MA Experiment ID: 108461 Result: Up-regulated in Transcription
  misc_feature: MA Experiment 108461 PARAMETER Experiment Name: At_Germinating_Seeds_cDNA_P Parameter: Age (day) Value: 1 vs. 0
  misc_feature: MA Experiment 108461 PARAMETER Experiment Name: At_Germinating_Seeds_cDNA_P Parameter: Tissue Value: Germinating Seeds
  misc_feature: MA Experiment ID: 108462 Result: Up-regulated in Transcription
  misc_feature: MA Experiment 108462 PARAMETER Experiment Name: At_Germinating_Seeds_cDNA_P Parameter: Age (day) Value: 2 vs. 0
  misc_feature: MA Experiment 108462 PARAMETER Experiment Name: At_Germinating_Seeds_cDNA_P Parameter: Tissue Value: Germinating Seeds
  misc_feature: MA Experiment ID: 108463 Result: Up-regulated in Transcription
  misc_feature: MA Experiment 108463 PARAMETER Experiment Name: At_Germinating_Seeds_cDNA_P Parameter: Age (day) Value: 3 vs. 0
  misc_feature: MA Experiment 108463 PARAMETER Experiment Name: At_Germinating_Seeds_cDNA_P Parameter: Tissue Value: Germinating Seeds
  misc_feature: MA Experiment ID: 108464 Result: Up-regulated in Transcription
  misc_feature: MA Experiment 108464 PARAMETER Experiment Name: At_Germinating_Seeds_cDNA_P Parameter: Age (day) Value: 4 vs. 0
  misc_feature: MA Experiment 108464 PARAMETER Experiment Name: At_Germinating_Seeds_cDNA_P Parameter: Tissue Value: Germinating Seeds
  misc_feature: MA Experiment ID: 108489 Result: Down-regulated in Transcription
  misc_feature: MA Experiment ID: 108573 Result: Down-regulated in Transcription
  misc_feature: MA Experiment 108573 PARAMETER Experiment Name: At_Drought_cDNA_P Parameter: Timepoint (hr) Value: 6
  misc_feature: MA Experiment 108573 PARAMETER Experiment Name: At_Drought_cDNA_P Parameter: Tissue Value: Aerial
  misc_feature: MA Experiment 108573 PARAMETER Experiment Name: At_Drought_cDNA_P Parameter: Treatment Value: Drought vs. No Drought
  misc_feature: MA Experiment ID: 108585 Result: Down-regulated in Transcription
  misc_feature: MA Experiment 108585 PARAMETER Experiment Name: At_5mM_NaNP_cDNA_P Parameter: Timepoint (hr) Value: 6
  misc_feature: MA Experiment 108585 PARAMETER Experiment Name: At_5mM_NaNP_cDNA_P Parameter: Tissue Value: Aerial
  misc_feature: MA Experiment 108585 PARAMETER Experiment Name: At_5mM_NaNP_cDNA_P Parameter: Treatment Value: null
  misc_feature: MA Experiment ID: 108595 Result: Down-regulated in Transcription
  misc_feature: MA Experiment 108595 PARAMETER Experiment Name: At_Ler-pi_Ovule_cDNA_P Parameter: Plant Line Value: null
  misc_feature: MA Experiment ID: 20000030 Result: Down-regulated in Transcription
  misc_feature: MA Experiment 20000030 PARAMETER Experiment Name: At_CS6630_Roots_cDNA_P Parameter: Plant Line Value: CS6630 vs. WS
  misc_feature: MA Experiment 20000030 PARAMETER Experiment Name: At_CS6630_Roots_cDNA_P Parameter: Tissue Value: Roots
  misc_feature: MA Experiment ID: 20000069 Result: Down-regulated in Transcription
  misc_feature: MA Experiment 20000069 PARAMETER Experiment Name: At_100uM_ABA_Mutants_cDNA_P Parameter: Plant Line Value: CS23
  misc_feature: MA Experiment 20000069 PARAMETER Experiment Name: At_100uM_ABA_Mutants_cDNA_P Parameter: Timepoint (hr) Value: 6
  misc_feature: MA Experiment 20000069 PARAMETER Experiment Name: At_100uM_ABA_Mutants_cDNA_P Parameter: Tissue Value: Aerial
  misc_feature: MA Experiment 20000069 PARAMETER Experiment Name: At_100uM_ABA_Mutants_cDNA_P Parameter: Treatment Value: 100uM ABA vs. No Treatment
  misc_feature: MA Experiment ID: 20000070 Result: Down-regulated in Transcription
  misc_feature: MA Experiment 20000070 PARAMETER Experiment Name: At_100uM_ABA_Mutants_cDNA_P Parameter: Plant Line Value: CS24
  misc_feature: MA Experiment 20000070 PARAMETER Experiment Name: At_100uM_ABA_Mutants_cDNA_P Parameter: Timepoint (hr) Value: 6
  misc_feature: MA Experiment 20000070 PARAMETER Experiment Name: At_100uM_ABA_Mutants_cDNA_P Parameter: Tissue Value: Aerial
  misc_feature: MA Experiment 20000070 PARAMETER Experiment Name: At_100uM_ABA_Mutants_cDNA_P Parameter: Treatment Value: 100uM ABA vs. No Treatment
  misc_feature: MA Experiment ID: 20000071 Result: Down-regulated in Transcription
  misc_feature: MA Experiment 20000071 PARAMETER Experiment Name: At_100uM_ABA_Mutants_cDNA_P Parameter: Plant Line Value: CS8104
  misc_feature: MA Experiment 20000071 PARAMETER Experiment Name: At_100uM_ABA_Mutants_cDNA_P Parameter: Timepoint (hr) Value: 6
  misc_feature: MA Experiment 20000071 PARAMETER Experiment Name: At_100uM_ABA_Mutants_cDNA_P Parameter: Tissue Value: Aerial
  misc_feature: MA Experiment 20000071 PARAMETER Experiment Name: At_100uM_ABA_Mutants_cDNA_P Parameter: Treatment Value: 100uM ABA vs. No Treatment
  misc_feature: MA Experiment ID: 20000072 Result: Down-regulated in Transcription
  misc_feature: MA Experiment 20000072 PARAMETER Experiment Name: At_100uM_ABA_Mutants_cDNA_P Parameter: Plant Line Value: CS8105
  misc_feature: MA Experiment 20000072 PARAMETER Experiment Name: At_100uM_ABA_Mutants_cDNA_P Parameter: Timepoint (hr) Value: 6
  misc_feature: MA Experiment 20000072 PARAMETER Experiment Name: At_100uM_ABA_Mutants_cDNA_P Parameter: Tissue Value: Aerial
  misc_feature: MA Experiment 20000072 PARAMETER Experiment Name: At_100uM_ABA_Mutants_cDNA_P Parameter: Treatment Value: 100uM ABA vs. No Treatment
  misc_feature: MA Experiment ID: 20000086 Result: Down-regulated in Transcription
  misc_feature: MA Experiment 20000086 PARAMETER Experiment Name: At_100uM_ABA_Mutants_cDNA_P Parameter: Plant Line Value: CS22
  misc_feature: MA Experiment 20000086 PARAMETER Experiment Name: At_100uM_ABA_Mutants_cDNA_P Parameter: Timepoint (hr) Value: 6
  misc_feature: MA Experiment 20000086 PARAMETER Experiment Name: At_100uM_ABA_Mutants_cDNA_P Parameter: Tissue Value: Aerial
  misc_feature: MA Experiment 20000086 PARAMETER Experiment Name: At_100uM_ABA_Mutants_cDNA_P Parameter: Treatment Value: 100uM ABA vs. No Treatment
  misc_feature: MA Experiment ID: 20000087 Result: Down-regulated in Transcription
  misc_feature: MA Experiment 20000087 PARAMETER Experiment Name: At_100uM_ABA_Mutants_cDNA_P Parameter: Plant Line Value: WS
  misc_feature: MA Experiment 20000087 PARAMETER Experiment Name: At_100uM_ABA_Mutants_cDNA_P Parameter: Timepoint (hr) Value: 6
  misc_feature: MA Experiment 20000087 PARAMETER Experiment Name: At_100uM_ABA_Mutants_cDNA_P Parameter: Tissue Value: Aerial
  misc_feature: MA Experiment 20000087 PARAMETER Experiment Name: At_100uM_ABA_Mutants_cDNA_P Parameter: Treatment Value: 100uM ABA vs. No Treatment
  misc_feature: MA Experiment ID: 20000088 Result: Down-regulated in Transcription
  misc_feature: MA Experiment 20000088 PARAMETER Experiment Name: At_100uM_ABA_Mutants_cDNA_P Parameter: Plant Line Value: Landsberg
  misc_feature: MA Experiment 20000088 PARAMETER Experiment Name: At_100uM_ABA_Mutants_cDNA_P Parameter: Timepoint (hr) Value: 6
  misc_feature: MA Experiment 20000088 PARAMETER Experiment Name: At_100uM_ABA_Mutants_cDNA_P Parameter: Tissue Value: Aerial
  misc_feature: MA Experiment 20000088 PARAMETER Experiment Name: At_100uM_ABA_Mutants_cDNA_P Parameter: Treatment Value: 100uM ABA vs. No Treatment
  misc_feature: MA Experiment ID: 20000090 Result: Down-regulated in Transcription
  misc_feature: MA Experiment ID: 20000117 Result: Down-regulated in Transcription
  misc_feature: MA Experiment 20000117 PARAMETER Experiment Name: At_100uM_ABA_Mutants_cDNA_P Parameter: Plant Line Value: Columbia
  misc_feature: MA Experiment 20000117 PARAMETER Experiment Name: At_100uM_ABA_Mutants_cDNA_P Parameter: Timepoint (hr) Value: 6
  misc_feature: MA Experiment 20000117 PARAMETER Experiment Name: At_100uM_ABA_Mutants_cDNA_P Parameter: Tissue Value: Aerial
  misc_feature: MA Experiment 20000117 PARAMETER Experiment Name: At_100uM_ABA_Mutants_cDNA_P Parameter: Treatment Value: 100uM ABA vs. No Treatment
  misc_feature: MA Experiment ID: 20000180 Result: Up-regulated in Transcription
  misc_feature: MA Experiment 20000180 PARAMETER Experiment Name: At_Germinating_Seeds_P Parameter: Age (hr) Value: 24 vs. 0
  misc_feature: MA Experiment 20000180 PARAMETER Experiment Name: At_Germinating_Seeds_P Parameter: Tissue Value: Germinating Seeds
  misc_feature: MA Experiment ID: 20000185 Result: Down-regulated in Transcription
  misc_feature: MA Experiment 20000185 PARAMETER Experiment Name: At_Roots__P Parameter: Age (day) Value: 7 vs. 21
  misc_feature: MA Experiment 20000185 PARAMETER Experiment Name: At_Roots__P Parameter: Organism Value: A. thaliana
  misc_feature: MA Experiment 20000185 PARAMETER Experiment Name: At_Roots__P Parameter: Tissue Value: Roots vs. Whole Plant
  misc_feature: MA Experiment ID: 20000224 Result: Up-regulated in Transcription
  misc_feature: MA Experiment ID: 20000264 Result: Down-regulated in Transcription
  misc_feature: MA Experiment 20000264 PARAMETER Experiment Name: At_Open_Flower_P Parameter: Age (day) Value: 21
  misc_feature: MA Experiment 20000264 PARAMETER Experiment Name: At_Open_Flower_P Parameter: Plant Line Value: WS
  misc_feature: MA Experiment 20000264 PARAMETER Experiment Name: At_Open_Flower_P Parameter: Tissue Value: Open Flower vs. Whole Plant
  misc_feature: MA Experiment ID: 20000438 Result: Up-regulated in Transcription
  misc_feature: MA Experiment 20000438 PARAMETER Experiment Name: At_Shoots__P Parameter: Age (day) Value: 14
  misc_feature: MA Experiment 20000438 PARAMETER Experiment Name: At_Shoots__P Parameter: Tissue Value: Shoots vs. Whole Plant
  misc_feature: MA Experiment ID: 20000439 Result: Down-regulated in Transcription
  misc_feature: MA Experiment 20000439 PARAMETER Experiment Name: At_Roots__P Parameter: Age (day) Value: 14 vs. 21
  misc_feature: MA Experiment 20000439 PARAMETER Experiment Name: At_Roots__P Parameter: Organism Value: A. thaliana
  misc_feature: MA Experiment 20000439 PARAMETER Experiment Name: At_Roots__P Parameter: Tissue Value: Roots vs. Whole Plant
  misc_feature: MA Experiment ID: 20000794 Result: Down-regulated in Transcription
  misc_feature: MA Experiment 20000794 PARAMETER Experiment Name: At_Petals_P Parameter: Age (day) Value: 23-25 days
  misc_feature: MA Experiment 20000794 PARAMETER Experiment Name: At_Petals_P Parameter: Plant Line Value: WS
  misc_feature: MA Experiment 20000794 PARAMETER Experiment Name: At_Petals_P Parameter: Tissue Value: Petals vs. Whole plant
  misc_feature: MA Experiment ID: 20001248 Result: Down-regulated in Transcription
  misc_feature: MA Experiment 20001248 PARAMETER Experiment Name: At_Far-red-induction_P Parameter: Age (day) Value: 7
  misc_feature: MA Experiment 20001248 PARAMETER Experiment Name: At_Far-red-induction_P Parameter: Light Value: Far-red vs. White
  misc_feature: MA Experiment 20001248 PARAMETER Experiment Name: At_Far-red-induction_P Parameter: Organism Value: A. thaliana
  misc_feature: MA Experiment 20001248 PARAMETER Experiment Name: At_Far-red-induction_P Parameter: Plant Line Value: Columbia
  misc_feature: MA Experiment 20001248 PARAMETER Experiment Name: At_Far-red-induction_P Parameter: Timepoint (hr) Value: 4
  misc_feature: MA Experiment 20001248 PARAMETER Experiment Name: At_Far-red-induction_P Parameter: Tissue Value: Whole Plant
  misc_feature: MA Experiment ID: 20001557 Result: Down-regulated in Transcription
  misc_feature: MA Experiment 20001557 PARAMETER Experiment Name: At_Drought_Soil_Dry_P Parameter: Age (day) Value: 27
  misc_feature: MA Experiment 20001557 PARAMETER Experiment Name: At_Drought_Soil_Dry_P Parameter: Organism Value: A. thaliana
  misc_feature: MA Experiment 20001557 PARAMETER Experiment Name: At_Drought_Soil_Dry_P Parameter: Plant Line Value: WS
  misc_feature: MA Experiment 20001557 PARAMETER Experiment Name: At_Drought_Soil_Dry_P Parameter: Post Timepoint (hr) Value: 3
  misc_feature: MA Experiment 20001557 PARAMETER Experiment Name: At_Drought_Soil_Dry_P Parameter: Post-Treatment Value: Re-Water vs. No Drought
  misc_feature: MA Experiment 20001557 PARAMETER Experiment Name: At_Drought_Soil_Dry_P Parameter: Timepoint (day) Value: 13
  misc_feature: MA Experiment 20001557 PARAMETER Experiment Name: At_Drought_Soil_Dry_P Parameter: Treatment Value: Drought vs. No Drought
  misc_feature: MA Experiment ID: 20001904 Result: Down-regulated in Transcription
  misc_feature: MA Experiment 20001904 PARAMETER Experiment Name: At_Drought_Reproduction_P Parameter: Age (day) Value: 37
  misc_feature: MA Experiment 20001904 PARAMETER Experiment Name: At_Drought_Reproduction_P Parameter: Organism Value: A. thaliana
  misc_feature: MA Experiment 20001904 PARAMETER Experiment Name: At_Drought_Reproduction_P Parameter: Plant Line Value: WS
  misc_feature: MA Experiment 20001904 PARAMETER Experiment Name: At_Drought_Reproduction_P Parameter: Timepoint (day) Value: 7
  misc_feature: MA Experiment 20001904 PARAMETER Experiment Name: At_Drought_Reproduction_P Parameter: Tissue Value: Rosettes
  misc_feature: MA Experiment 20001904 PARAMETER Experiment Name: At_Drought_Reproduction_P Parameter: Treatment Value: Drought vs. No Drought
  misc_feature: MA Experiment ID: 20001906 Result: Down-regulated in Transcription
  misc_feature: MA Experiment 20001906 PARAMETER Experiment Name: At_Drought_Reproduction_P Parameter: Age (day) Value: 35
  misc_feature: MA Experiment 20001906 PARAMETER Experiment Name: At_Drought_Reproduction_P Parameter: Organism Value: A. thaliana
  misc_feature: MA Experiment 20001906 PARAMETER Experiment Name: At_Drought_Reproduction_P Parameter: Plant Line Value: WS
  misc_feature: MA Experiment 20001906 PARAMETER Experiment Name: At_Drought_Reproduction_P Parameter: Timepoint (day) Value: 5
  misc_feature: MA Experiment 20001906 PARAMETER Experiment Name: At_Drought_Reproduction_P Parameter: Tissue Value: Siliques
  misc_feature: MA Experiment 20001906 PARAMETER Experiment Name: At_Drought_Reproduction_P Parameter: Treatment Value: Drought vs. No Drought
  misc_feature: MA Experiment ID: 20001908 Result: Down-regulated in Transcription
  misc_feature: MA Experiment 20001908 PARAMETER Experiment Name: At_Drought_Reproduction_P Parameter: Age (day) Value: 40
  misc_feature: MA Experiment 20001908 PARAMETER Experiment Name: At_Drought_Reproduction_P Parameter: Organism Value: A. thaliana
  misc_feature: MA Experiment 20001908 PARAMETER Experiment Name: At_Drought_Reproduction_P Parameter: Plant Line Value: WS
  misc_feature: MA Experiment 20001908 PARAMETER Experiment Name: At_Drought_Reproduction_P Parameter: Timepoint (day) Value: 10
  misc_feature: MA Experiment 20001908 PARAMETER Experiment Name: At_Drought_Reproduction_P Parameter: Tissue Value: Siliques
  misc_feature: MA Experiment 20001908 PARAMETER Experiment Name: At_Drought_Reproduction_P Parameter: Treatment Value: Drought vs. No Drought

SEQ ID NO: 33523 - protein, 177 aa, Arabidopsis thaliana; identical to SEQ ID NO: 29933
  peptide (1)..(177): Ceres Seq. ID no. 13494291
  misc_feature (24)..(166): Homolog of NCBI NO: 34905786 NR Description: P0401G10.19 [Oryza sativa (japonica
  misc_feature (20)..(177): Homolog of NCBI NO: 18410719 NR Description: expressed protein [Arabidopsis thaliana]

SEQ ID NO: 33524 - protein, 158 aa, Arabidopsis thaliana; identical to SEQ ID NO: 29934
  peptide (1)..(158): Ceres Seq. ID no. 13494292
  misc_feature (5)..(147): Homolog of NCBI NO: 34905786 NR Description: P0401G10.19 [Oryza sativa (japonica
  misc_feature (1)..(158): Homolog of NCBI NO: 18410719 NR Description: expressed protein [Arabidopsis thaliana]

SEQ ID NO: 33525 - protein, 94 aa, Arabidopsis thaliana; identical to SEQ ID NO: 29935
  peptide (1)..(94): Ceres Seq. ID no. 13494293

SEQ ID NO: 33526 - DNA, 1758 bp, Arabidopsis thaliana; identical to SEQ ID NO: 25899
  misc_feature (1)..(1758): Ceres Seq. ID no. 13490176
  misc_feature: MA Experiment ID: 108577 Result: Up-regulated in Transcription
  misc_feature: MA Experiment 108577 PARAMETER Experiment Name: At_42deg_Heat_cDNA_P Parameter: Temperature (deg C) Value: 42 vs. 22
  misc_feature: MA Experiment 108577 PARAMETER Experiment Name: At_42deg_Heat_cDNA_P Parameter: Timepoint (hr) Value: 6
  misc_feature: MA Experiment 108577 PARAMETER Experiment Name: At_42deg_Heat_cDNA_P Parameter: Tissue Value: Aerial
  misc_feature: MA Experiment ID: 20000111 Result: Up-regulated in Transcription
  misc_feature: MA Experiment 20000111 PARAMETER Experiment Name: At_42deg_Heat_cDNA_P Parameter: Temperature (deg C) Value: 42 vs. 22
  misc_feature: MA Experiment 20000111 PARAMETER Experiment Name: At_42deg_Heat_cDNA_P Parameter: Timepoint (hr) Value: 6
  misc_feature: MA Experiment 20000111 PARAMETER Experiment Name: At_42deg_Heat_cDNA_P Parameter: Tissue Value: Aerial
  misc_feature: MA Experiment ID: 20000112 Result: Up-regulated in Transcription
  misc_feature: MA Experiment 20000112 PARAMETER Experiment Name: At_42deg_Heat_cDNA_P Parameter: Temperature (deg C) Value: 42 vs. 22
  misc_feature: MA Experiment 20000112 PARAMETER Experiment Name: At_42deg_Heat_cDNA_P Parameter: Timepoint (hr) Value: 2
  misc_feature: MA Experiment 20000112 PARAMETER Experiment Name: At_42deg_Heat_cDNA_P Parameter: Tissue Value: Aerial
  misc_feature: MA Experiment ID: 20000173 Result: Up-regulated in Transcription
  misc_feature: MA Experiment 20000173 PARAMETER Experiment Name: At_42deg_Heat_P Parameter: Age (day) Value: 14
  misc_feature: MA Experiment 20000173 PARAMETER Experiment Name: At_42deg_Heat_P Parameter: Organism Value: A. thaliana
  misc_feature: MA Experiment 20000173 PARAMETER Experiment Name: At_42deg_Heat_P Parameter: Plant Line Value: WS
  misc_feature: MA Experiment 20000173 PARAMETER Experiment Name: At_42deg_Heat_P Parameter: Temperature (deg C) Value: 42 vs. 22
  misc_feature: MA Experiment 20000173 PARAMETER Experiment Name: At_42deg_Heat_P Parameter: Timepoint (hr) Value: 6
  misc_feature: MA Experiment 20000173 PARAMETER Experiment Name: At_42deg_Heat_P Parameter: Tissue Value: Aerial

SEQ ID NO: 33527 - protein, 524 aa, Arabidopsis thaliana; identical to SEQ ID NO: 25900
  peptide (1)..(524): Ceres Seq. ID no. 13490177
  misc_feature (133)..(344): Pfam Name: DEAD/DEAH box helicase Pfam Description: DEAD/DEAH box helicase
  misc_feature (133)..(344): Pfam Name: DEAD/DEAH box helicase Pfam Description: DEAD/DEAH box helicase
  misc_feature (68)..(510): Homolog of NCBI NO: 33186912 NR Description: DEAD (aspartate-glutamate-alanine-aspartate) box
  misc_feature (34)..(510): Homolog of NCBI NO: 28436904 NR Description: Similar to DEAD/H (Asp-Glu-Ala-Asp/His) box
  misc_feature (27)..(510): Homolog of NCBI NO: 38511935 NR Description: DEAD (Asp-Glu-Ala-As) box polypeptide 19
  misc_feature (68)..(510): Homolog of NCBI NO: 30749194 NR Description: gonadotropin-regulated testicular RNA helicase;
  misc_feature (29)..(518): Homolog of NCBI NO: 6324620 NR Description: Dead-Box protein 5; Dbp5p [Saccharomyces
  misc_feature (68)..(510): Homolog of NCBI NO: 33186912 NR Description: DEAD (aspartate-glutamate-alanine-aspartate) box
  misc_feature (27)..(510): Homolog of NCBI NO: 38511935 NR Description: DEAD (Asp-Glu-Ala-As) box polypeptide 19
  misc_feature (29)..(518): Homolog of NCBI NO: 6324620 NR Description: Dead-Box protein 5; Dbp5p [Saccharomyces
  misc_feature (29)..(524): Homolog of NCBI NO: 15231748 NR Description: DEAD/DEAH box helicase, putative [Arabidopsis
  misc_feature (29)..(524): Homolog of NCBI NO: 15982881 NR Description: AT3g53110/T4D2_40 [Arabidopsis thaliana]
  misc_feature (27)..(284): Homolog of NCBI NO: 22773229 NR Description: Putative DEAD/DEAH box RNA helicase protein
  misc_feature (277)..(523): Homolog of NCBI NO: 22773229 NR Description: Putative DEAD/DEAH box RNA helicase protein
  misc_feature (28)..(519): Homolog of NCBI NO: 19112808 NR Description: putative ATP-dependent cytosolic RNA helicase,
  misc_feature (68)..(510): Homolog of NCBI NO: 30749194 NR Description: gonadotropin-regulated testicular RNA helicase;
  misc_feature (34)..(510): Homolog of NCBI NO: 28436904 NR Description: Similar to DEAD/H (Asp-Glu-Ala-Asp/His) box
  misc_feature (28)..(519): Homolog of NCBI NO: 19112808 NR Description: putative ATP-dependent cytosolic RNA helicase,
  misc_feature (277)..(523): Homolog of NCBI NO: 22773229 NR Description: Putative DEAD/DEAH box RNA helicase protein
  misc_feature (27)..(284): Homolog of NCBI NO: 22773229 NR Description: Putative DEAD/DEAH box RNA helicase protein
  misc_feature (29)..(524): Homolog of NCBI NO: 15982881 NR Description: AT3g53110/T4D2_40 [Arabidopsis thaliana]
  misc_feature (29)..(524): Homolog of NCBI NO: 15231748 NR Description: DEAD/DEAH box helicase, putative [Arabidopsis

SEQ ID NO: 33528 - protein, 496 aa, Arabidopsis thaliana; identical to SEQ ID NO: 25901
  peptide (1)..(496): Ceres Seq. ID no. 13490178
  misc_feature (105)..(316): Pfam Name: DEAD/DEAH box helicase Pfam Description: DEAD/DEAH box helicase
  misc_feature (105)..(316): Pfam Name: DEAD/DEAH box helicase Pfam Description: DEAD/DEAH box helicase
  misc_feature (40)..(482): Homolog of NCBI NO: 33186912 NR Description: DEAD (aspartate-glutamate-alanine-aspartate) box
  misc_feature (6)..(482): Homolog of NCBI NO: 28436904 NR Description: Similar to DEAD/H (Asp-Glu-Ala-Asp/His) box
  misc_feature (1)..(482): Homolog of NCBI NO: 38511935 NR Description: DEAD (Asp-Glu-Ala-As) box polypeptide 19
  misc_feature (40)..(482): Homolog of NCBI NO: 30749194 NR Description: gonadotropin-regulated testicular RNA helicase;
  misc_feature (1)..(490): Homolog of NCBI NO: 6324620 NR Description: Dead-Box protein 5; Dbp5p [Saccharomyces
  misc_feature (40)..(482): Homolog of NCBI NO: 33186912 NR Description: DEAD (aspartate-glutamate-alanine-aspartate) box
  misc_feature (1)..(482): Homolog of NCBI NO: 38511935 NR Description: DEAD (Asp-Glu-Ala-As) box polypeptide 19
  misc_feature (1)..(490): Homolog of NCBI NO: 6324620 NR Description: Dead-Box protein 5; Dbp5p [Saccharomyces
  misc_feature (1)..(496): Homolog of NCBI NO: 15231748 NR Description: DEAD/DEAH box helicase, putative [Arabidopsis
  misc_feature (1)..(496): Homolog of NCBI NO: 15982881 NR Description: AT3g53110/T4D2_40 [Arabidopsis thaliana]
  misc_feature (1)..(256): Homolog of NCBI NO: 22773229 NR Description: Putative DEAD/DEAH box RNA helicase protein
  misc_feature (249)..(495): Homolog of NCBI NO: 22773229 NR Description: Putative DEAD/DEAH box RNA helicase protein
  misc_feature (1)..(491): Homolog of NCBI NO: 19112808 NR Description: putative ATP-dependent cytosolic RNA helicase,
  misc_feature (40)..(482): Homolog of NCBI NO: 30749194 NR Description: gonadotropin-regulated testicular RNA helicase;
  misc_feature (6)..(482): Homolog of NCBI NO: 28436904 NR Description: Similar to DEAD/H (Asp-Glu-Ala-Asp/His) box
  misc_feature (1)..(491): Homolog of NCBI NO: 19112808 NR Description: putative ATP-dependent cytosolic RNA helicase,
  misc_feature (249)..(495): Homolog of NCBI NO: 22773229 NR Description: Putative DEAD/DEAH box RNA helicase protein
  misc_feature (1)..(256): Homolog of NCBI NO: 22773229 NR Description: Putative DEAD/DEAH box RNA helicase protein
  misc_feature (1)..(496): Homolog of NCBI NO: 15982881 NR Description: AT3g53110/T4D2_40 [Arabidopsis thaliana]
  misc_feature (1)..(496): Homolog of NCBI NO: 15231748 NR Description: DEAD/DEAH box helicase, putative [Arabidopsis

SEQ ID NO: 33529 - protein, 394 aa, Arabidopsis thaliana; identical to SEQ ID NO: 25902
  peptide (1)..(394): Ceres Seq. ID no. 13490179
  misc_feature (3)..(214): Pfam Name: DEAD/DEAH box helicase Pfam Description: DEAD/DEAH box helicase
  misc_feature (3)..(214): Pfam Name: DEAD/DEAH box helicase Pfam Description: DEAD/DEAH box helicase
  misc_feature (1)..(380): Homolog of NCBI NO: 33186912 NR Description: DEAD (aspartate-glutamate-alanine-aspartate) box
  misc_feature (1)..(380): Homolog of NCBI NO: 28436904 NR Description: Similar to DEAD/H (Asp-Glu-Ala-Asp/His) box
  misc_feature (1)..(380): Homolog of NCBI NO: 38511935 NR Description: DEAD (Asp-Glu-Ala-As) box polypeptide 19
  misc_feature (1)..(380): Homolog of NCBI NO: 30749194 NR Description: gonadotropin-regulated testicular RNA helicase;
  misc_feature (1)..(388): Homolog of NCBI NO: 6324620 NR Description: Dead-Box protein 5; Dbp5p [Saccharomyces
  misc_feature (1)..(380): Homolog of NCBI NO: 33186912 NR Description: DEAD (aspartate-glutamate-alanine-aspartate) box
  misc_feature (1)..(380): Homolog of NCBI NO: 38511935 NR Description: DEAD (Asp-Glu-Ala-As) box polypeptide 19
  misc_feature (1)..(388): Homolog of NCBI NO: 6324620 NR Description: Dead-Box protein 5; Dbp5p [Saccharomyces
  misc_feature (1)..(394): Homolog of NCBI NO: 15231748 NR Description: DEAD/DEAH box helicase, putative [Arabidopsis
  misc_feature (1)..(394): Homolog of NCBI NO: 15982881 NR Description: AT3g53110/T4D2_40 [Arabidopsis thaliana]
  misc_feature (1)..(154): Homolog of NCBI NO: 22773229 NR Description: Putative DEAD/DEAH box RNA helicase protein
  misc_feature (147)..(393): Homolog of NCBI NO: 22773229 NR Description: Putative DEAD/DEAH box RNA helicase protein
  misc_feature (1)..(389): Homolog of NCBI NO: 19112808 NR Description: putative ATP-dependent cytosolic RNA helicase,
  misc_feature (1)..(380): Homolog of NCBI NO: 30749194 NR Description: gonadotropin-regulated testicular RNA helicase;
  misc_feature (1)..(380): Homolog of NCBI NO: 28436904 NR Description: Similar to DEAD/H (Asp-Glu-Ala-Asp/His) box
  misc_feature (1)..(389): Homolog of NCBI NO: 19112808 NR Description: putative ATP-dependent cytosolic RNA helicase,
  misc_feature (147)..(393): Homolog of NCBI NO: 22773229 NR Description: Putative DEAD/DEAH box RNA helicase protein
  misc_feature (1)..(154): Homolog of NCBI NO: 22773229 NR Description: Putative DEAD/DEAH box RNA helicase protein
  misc_feature (1)..(394): Homolog of NCBI NO: 15982881 NR Description: AT3g53110/T4D2_40 [Arabidopsis thaliana]
  misc_feature (1)..(394): Homolog of NCBI NO: 15231748 NR Description: DEAD/DEAH box helicase, putative [Arabidopsis

SEQ ID NO: 33530 - DNA, 2360 bp, Arabidopsis thaliana; identical to SEQ ID NO: 29940
  misc_feature (1)..(2360): Ceres Seq. ID no. 12339318
  misc_feature: MA Experiment ID: 108434 Result: Up-regulated in Transcription
  misc_feature: MA Experiment 108434 PARAMETER Experiment Name: At_Root_Tips_cDNA_P Parameter: Tissue Value: Root Tips
  misc_feature: MA Experiment ID: 108573 Result: Up-regulated in Transcription
  misc_feature: MA Experiment 108573 PARAMETER Experiment Name: At_Drought_cDNA_P Parameter: Timepoint (hr) Value: 6
  misc_feature: MA Experiment 108573 PARAMETER Experiment Name: At_Drought_cDNA_P Parameter: Tissue Value: Aerial
  misc_feature: MA Experiment 108573 PARAMETER Experiment Name: At_Drought_cDNA_P Parameter: Treatment Value: Drought vs. No Drought
  misc_feature: MA Experiment ID: 108577 Result: Down-regulated in Transcription
  misc_feature: MA Experiment 108577 PARAMETER Experiment Name: At_42deg_Heat_cDNA_P Parameter: Temperature (deg C) Value: 42 vs. 22
  misc_feature: MA Experiment 108577 PARAMETER Experiment Name: At_42deg_Heat_cDNA_P Parameter: Timepoint (hr) Value: 6
  misc_feature: MA Experiment 108577 PARAMETER Experiment Name: At_42deg_Heat_cDNA_P Parameter: Tissue Value: Aerial
  misc_feature: MA Experiment ID: 108579 Result: Down-regulated in Transcription
  misc_feature: MA Experiment 108579 PARAMETER Experiment Name: At_4deg_Cold_cDNA_P Parameter: Temperature (deg C) Value: 4 vs. 22
  misc_feature: MA Experiment 108579 PARAMETER Experiment Name: At_4deg_Cold_cDNA_P Parameter: Timepoint (hr) Value: 6
  misc_feature: MA Experiment 108579 PARAMETER Experiment Name: At_4deg_Cold_cDNA_P Parameter: Tissue Value: Aerial
  misc_feature: MA Experiment ID: 108585 Result: Up-regulated in Transcription
  misc_feature: MA Experiment 108585 PARAMETER Experiment Name: At_5mM_NaNP_cDNA_P Parameter: Timepoint (hr) Value: 6
  misc_feature: MA Experiment 108585 PARAMETER Experiment Name: At_5mM_NaNP_cDNA_P Parameter: Tissue Value: Aerial
  misc_feature: MA Experiment 108585 PARAMETER Experiment Name: At_5mM_NaNP_cDNA_P Parameter: Treatment Value: null
  misc_feature: MA Experiment ID: 108595 Result: Down-regulated in Transcription
  misc_feature: MA Experiment 108595 PARAMETER Experiment Name: At_Ler-pi_Ovule_cDNA_P Parameter: Plant Line Value: null
  misc_feature: MA Experiment ID: 20000087 Result: Down-regulated in Transcription
  misc_feature: MA Experiment 20000087 PARAMETER Experiment Name: At_100uM_ABA_Mutants_cDNA_P Parameter: Plant Line Value: WS
  misc_feature: MA Experiment 20000087 PARAMETER Experiment Name: At_100uM_ABA_Mutants_cDNA_P Parameter: Timepoint (hr) Value: 6
  misc_feature: MA Experiment 20000087 PARAMETER Experiment Name: At_100uM_ABA_Mutants_cDNA_P Parameter: Tissue Value: Aerial
  misc_feature: MA Experiment 20000087 PARAMETER Experiment Name: At_100uM_ABA_Mutants_cDNA_P Parameter: Treatment Value: 100uM ABA vs. No Treatment
  misc_feature: MA Experiment ID: 20000113 Result: Down-regulated in Transcription
  misc_feature: MA Experiment 20000113 PARAMETER Experiment Name: At_42deg_Heat_cDNA_P Parameter: Temperature (deg C) Value: 42 vs. 22
  misc_feature: MA Experiment 20000113 PARAMETER Experiment Name: At_42deg_Heat_cDNA_P Parameter: Timepoint (hr) Value: 8
  misc_feature: MA Experiment 20000113 PARAMETER Experiment Name: At_42deg_Heat_cDNA_P Parameter: Tissue Value: Aerial
  misc_feature: MA Experiment ID: 20000224 Result: Down-regulated in Transcription
  misc_feature: MA Experiment ID: 20001451 Result: Up-regulated in Transcription
  misc_feature: MA Experiment 20001451 PARAMETER Experiment Name: At_Far-red-induction_P Parameter: Age (day) Value: 7
  misc_feature: MA Experiment 20001451 PARAMETER Experiment Name: At_Far-red-induction_P Parameter: Light Value: Far-red vs. White
  misc_feature: MA Experiment 20001451 PARAMETER Experiment Name: At_Far-red-induction_P Parameter: Organism Value: A. thaliana
  misc_feature: MA Experiment 20001451 PARAMETER Experiment Name: At_Far-red-induction_P Parameter: Plant Line Value: Columbia
  misc_feature: MA Experiment 20001451 PARAMETER Experiment Name: At_Far-red-induction_P Parameter: Timepoint (hr) Value: 24
  misc_feature: MA Experiment 20001451 PARAMETER Experiment Name: At_Far-red-induction_P Parameter: Tissue Value: Whole Plant

SEQ ID NO: 33531 - protein, 594 aa, Arabidopsis thaliana; identical to SEQ ID NO: 29941
  peptide (1)..(594): Ceres Seq. ID no. 12339319
  misc_feature (11)..(573): Homolog of NCBI NO: 7487322 NR Description: hypothetical protein T22A6.220 - Arabidopsis
  misc_feature (11)..(573): Homolog of NCBI NO: 18423092 NR Description: transport inhibitor response 1 (TIR1), putative
  misc_feature (11)..(573): Homolog of NCBI NO: 13249030 NR Description: F-box containing protein TIR1
  misc_feature (9)..(573): Homolog of NCBI NO: 18391439 NR Description: transport inhibitor response 1 (TIR1), putative
  misc_feature (9)..(574): Homolog of NCBI NO: 18405102 NR Description: transport inhibitor response 1 (TIR1), putative
  misc_feature (9)..(573): Homolog of NCBI NO: 21740736 NR Description: OSJNBa0072K14.1 [Oryza sativa (japonica
  misc_feature (8)..(573): Homolog of NCBI NO: 12083523 NR Description: similar to Arabidopsis thaliana transport
  misc_feature (5)..(579): Homolog of NCBI NO: 15027885 NR Description: putative F-box protein GRR1 protein 1, AtFBL18
  misc_feature (5)..(579): Homolog of NCBI NO: 12658970 NR Description: GRR1-like protein 1 [Arabidopsis thaliana]
  misc_feature (5)..(579): Homolog of NCBI NO: 18412177 NR Description: F-box protein GRR1-like protein 1, AtFBL18

SEQ ID NO: 33532 - protein, 495 aa, Arabidopsis thaliana; identical to SEQ ID NO: 29942
  peptide (1)..(495): Ceres Seq. ID no. 12339320
  misc_feature (1)..(474): Homolog of NCBI NO: 7487322 NR Description: hypothetical protein T22A6.220 - Arabidopsis
  misc_feature (1)..(474): Homolog of NCBI NO: 18423092 NR Description: transport inhibitor response 1 (TIR1), putative
  misc_feature (1)..(474): Homolog of NCBI NO: 13249030 NR Description: F-box containing protein TIR1
  misc_feature (1)..(474): Homolog of NCBI NO: 18391439 NR Description: transport inhibitor response 1 (TIR1), putative
  misc_feature (1)..(475): Homolog of NCBI NO: 18405102 NR Description: transport inhibitor response 1 (TIR1), putative
  misc_feature (1)..(474): Homolog of NCBI NO: 21740736 NR Description: OSJNBa0072K14.1 [Oryza sativa (japonica
  misc_feature (1)..(474): Homolog of NCBI NO: 12083523 NR Description: similar to Arabidopsis thaliana transport
  misc_feature (1)..(480): Homolog of NCBI NO: 15027885 NR Description: putative F-box protein GRR1 protein 1, AtFBL18
  misc_feature (1)..(480): Homolog of NCBI NO: 12658970 NR Description: GRR1-like protein 1 [Arabidopsis thaliana]
  misc_feature (1)..(480): Homolog of NCBI NO: 18412177 NR Description: F-box protein GRR1-like protein 1, AtFBL18

SEQ ID NO: 33533 - protein, 480 aa, Arabidopsis thaliana; identical to SEQ ID NO: 29943
  peptide (1)..(480): Ceres Seq. ID no. 12339322
  misc_feature (1)..(459): Homolog of NCBI NO: 7487322 NR Description: hypothetical protein T22A6.220 - Arabidopsis
  misc_feature (1)..(459): Homolog of NCBI NO: 18423092 NR Description: transport inhibitor response 1 (TIR1), putative
  misc_feature (1)..(459): Homolog of NCBI NO: 13249030 NR Description: F-box containing protein TIR1
  misc_feature (1)..(459): Homolog of NCBI NO: 18391439 NR Description: transport inhibitor response 1 (TIR1), putative
  misc_feature (1)..(460): Homolog of NCBI NO: 18405102 NR Description: transport inhibitor response 1 (TIR1), putative
  misc_feature (1)..(459): Homolog of NCBI NO: 21740736 NR Description: OSJNBa0072K14.1 [Oryza sativa (japonica
  misc_feature (1)..(459): Homolog of NCBI NO: 12083523 NR Description: similar to Arabidopsis thaliana transport
  misc_feature (1)..(465): Homolog of NCBI NO: 15027885 NR Description: putative F-box protein GRR1 protein 1, AtFBL18
  misc_feature (1)..(465): Homolog of NCBI NO: 12658970 NR Description: GRR1-like protein 1 [Arabidopsis thaliana]
  misc_feature (1)..(465): Homolog of NCBI NO: 18412177 NR Description: F-box protein GRR1-like protein 1, AtFBL18

SEQ ID NO: 33534 - DNA, 727 bp, Arabidopsis thaliana; identical to SEQ ID NO: 29944
  misc_feature (1)..(727): Ceres Seq. ID no. 12738409
  misc_feature: MA Experiment ID: 108434 Result: Up-regulated in Transcription
  misc_feature: MA Experiment 108434 PARAMETER Experiment Name: At_Root_Tips_cDNA_P Parameter: Tissue Value: Root Tips
  misc_feature: MA Experiment ID: 108462 Result: Down-regulated in Transcription
  misc_feature: MA Experiment 108462 PARAMETER Experiment Name: At_Germinating_Seeds_cDNA_P Parameter: Age (day) Value: 2 vs. 0
  misc_feature: MA Experiment 108462 PARAMETER Experiment Name: At_Germinating_Seeds_cDNA_P Parameter: Tissue Value: Germinating Seeds
  misc_feature: MA Experiment ID: 108463 Result: Down-regulated in Transcription
  misc_feature: MA Experiment 108463 PARAMETER Experiment Name: At_Germinating_Seeds_cDNA_P Parameter: Age (day) Value: 3 vs. 0
  misc_feature: MA Experiment 108463 PARAMETER Experiment Name: At_Germinating_Seeds_cDNA_P Parameter: Tissue Value: Germinating Seeds
  misc_feature: MA Experiment ID: 108464 Result: Down-regulated in Transcription
  misc_feature: MA Experiment 108464 PARAMETER Experiment Name: At_Germinating_Seeds_cDNA_P Parameter: Age (day) Value: 4 vs. 0
  misc_feature: MA Experiment 108464 PARAMETER Experiment Name: At_Germinating_Seeds_cDNA_P Parameter: Tissue Value: Germinating Seeds
  misc_feature: MA Experiment ID: 108489 Result: Up-regulated in Transcription
  misc_feature: MA Experiment ID: 108561 Result: Down-regulated in Transcription
  misc_feature: MA Experiment 108561 PARAMETER Experiment Name: At_100uM_ABA_cDNA_P Parameter: Timepoint (hr) Value: 6
  misc_feature: MA Experiment 108561 PARAMETER Experiment Name: At_100uM_ABA_cDNA_P Parameter: Tissue Value: Aerial
  misc_feature: MA Experiment 108561 PARAMETER Experiment Name: At_100uM_ABA_cDNA_P Parameter: Treatment Value: 100uM ABA vs. No Treatment
  misc_feature: MA Experiment ID: 108573 Result: Down-regulated in Transcription
  misc_feature: MA Experiment 108573 PARAMETER Experiment Name: At_Drought_cDNA_P Parameter: Timepoint (hr) Value: 6
  misc_feature: MA Experiment 108573 PARAMETER Experiment Name: At_Drought_cDNA_P Parameter: Tissue Value: Aerial
  misc_feature: MA Experiment 108573 PARAMETER Experiment Name: At_Drought_cDNA_P Parameter: Treatment Value: Drought vs. No Drought
  misc_feature: MA Experiment ID: 108595 Result: Down-regulated in Transcription
  misc_feature: MA Experiment 108595 PARAMETER Experiment Name: At_Ler-pi_Ovule_cDNA_P Parameter: Plant Line Value: null
  misc_feature: MA Experiment ID: 108605 Result: Down-regulated in Transcription
  misc_feature: MA Experiment 108605 PARAMETER Experiment Name: At_100uM_ABA_cDNA_P Parameter: Timepoint (hr) Value: 6
  misc_feature: MA Experiment 108605 PARAMETER Experiment Name: At_100uM_ABA_cDNA_P Parameter: Tissue Value: Aerial
  misc_feature: MA Experiment 108605 PARAMETER Experiment Name: At_100uM_ABA_cDNA_P Parameter: Treatment Value: 100uM ABA vs. No Treatment
  misc_feature: MA Experiment ID: 108609 Result: Down-regulated in Transcription
  misc_feature: MA Experiment 108609 PARAMETER Experiment Name: At_100uM_ABA_cDNA_P Parameter: Timepoint (hr) Value: 24
  misc_feature: MA Experiment 108609 PARAMETER Experiment Name: At_100uM_ABA_cDNA_P Parameter: Tissue Value: Aerial
  misc_feature: MA Experiment 108609 PARAMETER Experiment Name: At_100uM_ABA_cDNA_P Parameter: Treatment Value: 100uM ABA vs. No Treatment
  misc_feature: MA Experiment ID: 20000069 Result: Down-regulated in Transcription
  misc_feature: MA Experiment 20000069 PARAMETER Experiment Name: At_100uM_ABA_Mutants_cDNA_P Parameter: Plant Line Value: CS23
  misc_feature: MA Experiment 20000069 PARAMETER Experiment Name: At_100uM_ABA_Mutants_cDNA_P Parameter: Timepoint (hr) Value: 6
  misc_feature: MA Experiment 20000069 PARAMETER Experiment Name: At_100uM_ABA_Mutants_cDNA_P Parameter: Tissue Value: Aerial
  misc_feature: MA Experiment 20000069 PARAMETER Experiment Name: At_100uM_ABA_Mutants_cDNA_P Parameter: Treatment Value: 100uM ABA vs. No Treatment
  misc_feature: MA Experiment ID: 20000070 Result: Down-regulated in Transcription
  misc_feature: MA Experiment 20000070 PARAMETER Experiment Name: At_100uM_ABA_Mutants_cDNA_P Parameter: Plant Line Value: CS24
  misc_feature: MA Experiment 20000070 PARAMETER Experiment Name: At_100uM_ABA_Mutants_cDNA_P Parameter: Timepoint (hr) Value: 6
  misc_feature: MA Experiment 20000070 PARAMETER Experiment Name: At_100uM_ABA_Mutants_cDNA_P Parameter: Tissue Value: Aerial
  misc_feature: MA Experiment 20000070 PARAMETER Experiment Name: At_100uM_ABA_Mutants_cDNA_P Parameter: Treatment Value: 100uM ABA vs. No Treatment
  misc_feature: MA Experiment ID: 20000071 Result: Down-regulated in Transcription
  misc_feature: MA Experiment 20000071 PARAMETER Experiment Name: At_100uM_ABA_Mutants_cDNA_P Parameter: Plant Line Value: CS8104
  misc_feature: MA Experiment 20000071 PARAMETER Experiment Name: At_100uM_ABA_Mutants_cDNA_P Parameter: Timepoint (hr) Value: 6
  misc_feature: MA Experiment 20000071 PARAMETER Experiment Name: At_100uM_ABA_Mutants_cDNA_P Parameter: Tissue Value: Aerial
  misc_feature: MA Experiment 20000071 PARAMETER Experiment Name: At_100uM_ABA_Mutants_cDNA_P Parameter: Treatment Value: 100uM ABA vs. No Treatment
  misc_feature: MA Experiment ID: 20000087 Result: Down-regulated in Transcription
  misc_feature: MA Experiment 20000087 PARAMETER Experiment Name: At_100uM_ABA_Mutants_cDNA_P Parameter: Plant Line Value: WS
  misc_feature: MA Experiment 20000087 PARAMETER Experiment Name: At_100uM_ABA_Mutants_cDNA_P Parameter: Timepoint (hr) Value: 6
  misc_feature: MA Experiment 20000087 PARAMETER Experiment Name: At_100uM_ABA_Mutants_cDNA_P Parameter: Tissue Value: Aerial
  misc_feature: MA Experiment 20000087 PARAMETER Experiment Name: At_100uM_ABA_Mutants_cDNA_P Parameter: Treatment Value: 100uM ABA vs. No Treatment
  misc_feature: MA Experiment ID: 20000093 Result: Up-regulated in Transcription
  misc_feature: MA Experiment 20000093 PARAMETER Experiment Name: At_42deg_Heat_cDNA_P Parameter: Temperature (deg C) Value: 42 vs. 22
  misc_feature: MA Experiment 20000093 PARAMETER Experiment Name: At_42deg_Heat_cDNA_P Parameter: Timepoint (hr) Value: 0.5
  misc_feature: MA Experiment 20000093 PARAMETER Experiment Name: At_42deg_Heat_cDNA_P Parameter: Tissue Value: Aerial
  misc_feature: MA Experiment ID: 20000117 Result: Down-regulated in Transcription
  misc_feature: MA Experiment 20000117 PARAMETER Experiment Name: At_100uM_ABA_Mutants_cDNA_P Parameter: Plant Line Value: Columbia
  misc_feature: MA Experiment 20000117 PARAMETER Experiment Name: At_100uM_ABA_Mutants_cDNA_P Parameter: Timepoint (hr) Value: 6
  misc_feature: MA Experiment 20000117 PARAMETER Experiment Name: At_100uM_ABA_Mutants_cDNA_P Parameter: Tissue Value: Aerial
  misc_feature: MA Experiment 20000117 PARAMETER Experiment Name: At_100uM_ABA_Mutants_cDNA_P Parameter: Treatment Value: 100uM ABA vs. No Treatment
  misc_feature: MA Experiment ID: 20000169 Result: Down-regulated in Transcription
  misc_feature: MA Experiment 20000169 PARAMETER Experiment Name: At_100uM_ABA_P Parameter: Age (day) Value: 14
  misc_feature: MA Experiment 20000169 PARAMETER Experiment Name: At_100uM_ABA_P Parameter: Organism Value: A. thaliana
  misc_feature: MA Experiment 20000169 PARAMETER Experiment Name: At_100uM_ABA_P Parameter: Plant Line Value: WS
  misc_feature: MA Experiment 20000169 PARAMETER Experiment Name: At_100uM_ABA_P Parameter: Timepoint (hr) Value: 6
  misc_feature: MA Experiment 20000169 PARAMETER Experiment Name: At_100uM_ABA_P Parameter: Tissue Value: Aerial
  misc_feature: MA Experiment 20000169 PARAMETER Experiment Name: At_100uM_ABA_P Parameter: Treatment Value: 100uM ABA vs. No Treatment
  misc_feature: MA Experiment ID: 20000185 Result: Down-regulated in Transcription
  misc_feature: MA Experiment 20000185 PARAMETER Experiment Name: At_Roots__P Parameter: Age (day) Value: 7 vs. 21
  misc_feature: MA Experiment 20000185 PARAMETER Experiment Name: At_Roots__P Parameter: Organism Value: A. thaliana
  misc_feature: MA Experiment 20000185 PARAMETER Experiment Name: At_Roots__P Parameter: Tissue Value: Roots vs. Whole Plant
  misc_feature: MA Experiment ID: 20000224 Result: Up-regulated in Transcription
  misc_feature: MA Experiment ID: 20000234 Result: Up-regulated in Transcription
  misc_feature: MA Experiment 20000234 PARAMETER Experiment Name: At_Siliques_P Parameter: Age (day) Value: 21
  misc_feature: MA Experiment 20000234 PARAMETER Experiment Name: At_Siliques_P Parameter: Organism Value: A. thaliana
  misc_feature: MA Experiment 20000234 PARAMETER Experiment Name: At_Siliques_P Parameter: Plant Line Value: WS
  misc_feature: MA Experiment 20000234 PARAMETER Experiment Name: At_Siliques_P Parameter: Tissue Value: Less Than 5mm Siliques vs. Whole Plant
  misc_feature: MA Experiment ID: 20000436 Result: Down-regulated in Transcription
  misc_feature: MA Experiment 20000436 PARAMETER Experiment Name: At_Drought_P Parameter: Age (day) Value: 7
  misc_feature: MA Experiment 20000436 PARAMETER Experiment Name: At_Drought_P Parameter: Organism Value: A. thaliana
  misc_feature: MA Experiment 20000436 PARAMETER Experiment Name: At_Drought_P Parameter: Plant Line Value: WS
  misc_feature: MA Experiment 20000436 PARAMETER Experiment Name: At_Drought_P Parameter: Timepoint (hr) Value: 12
  misc_feature: MA Experiment 20000436 PARAMETER Experiment Name: At_Drought_P Parameter: Tissue Value: Whole Plant
  misc_feature: MA Experiment 20000436 PARAMETER Experiment Name: At_Drought_P Parameter: Treatment Value: Drought vs. No Drought
  misc_feature: MA Experiment ID: 20000437 Result: Down-regulated in Transcription
  misc_feature: MA Experiment 20000437 PARAMETER Experiment Name: At_Drought_P Parameter: Age (day) Value: 8
  misc_feature: MA Experiment 20000437 PARAMETER Experiment Name: At_Drought_P Parameter: Organism Value: A. thaliana
  misc_feature: MA Experiment 20000437 PARAMETER Experiment Name: At_Drought_P Parameter: Plant Line Value: WS
  misc_feature: MA Experiment 20000437 PARAMETER Experiment Name: At_Drought_P Parameter: Timepoint (hr) Value: 24
  misc_feature: MA Experiment 20000437 PARAMETER Experiment Name: At_Drought_P Parameter: Tissue Value: Whole Plant
  misc_feature: MA Experiment 20000437 PARAMETER Experiment Name: At_Drought_P Parameter: Treatment Value: Drought vs. No Drought
  misc_feature: MA Experiment ID: 20000439 Result: Down-regulated in Transcription
  misc_feature: MA Experiment 20000439 PARAMETER Experiment Name: At_Roots__P Parameter: Age (day) Value: 14 vs. 21
  misc_feature: MA Experiment 20000439 PARAMETER Experiment Name: At_Roots__P Parameter: Organism Value: A. thaliana
  misc_feature: MA Experiment 20000439 PARAMETER Experiment Name: At_Roots__P Parameter: Tissue Value: Roots vs. Whole Plant
  misc_feature: MA Experiment ID: 20000453 Result: Down-regulated in Transcription
  misc_feature: MA Experiment 20000453 PARAMETER Experiment Name: At_100uM_ABA_P Parameter: Age (day) Value: 15
  misc_feature: MA Experiment 20000453 PARAMETER Experiment Name: At_100uM_ABA_P Parameter: Organism Value: A. thaliana
  misc_feature: MA Experiment 20000453 PARAMETER Experiment Name: At_100uM_ABA_P Parameter: Plant Line Value: WS
  misc_feature: MA Experiment 20000453 PARAMETER Experiment Name: At_100uM_ABA_P Parameter: Timepoint (hr) Value: 24
  misc_feature: MA Experiment 20000453 PARAMETER Experiment Name: At_100uM_ABA_P Parameter: Tissue Value: Aerial
  misc_feature: MA Experiment 20000453 PARAMETER Experiment Name: At_100uM_ABA_P Parameter: Treatment Value: 100uM ABA vs. No Treatment
  misc_feature: MA Experiment ID: 20000794 Result: Down-regulated in Transcription
  misc_feature: MA Experiment 20000794 PARAMETER Experiment Name: At_Petals_P Parameter: Age (day) Value: 23-25 days
  misc_feature: MA Experiment 20000794 PARAMETER Experiment Name: At_Petals_P Parameter: Plant Line Value: WS
  misc_feature: MA Experiment 20000794 PARAMETER Experiment Name: At_Petals_P Parameter: Tissue Value: Petals vs. Whole plant
  misc_feature: MA Experiment ID: 20001450 Result: Down-regulated in Transcription
  misc_feature: MA Experiment 20001450 PARAMETER Experiment Name: At_Far-red-induction_P Parameter: Age (day) Value: 7
  misc_feature: MA Experiment 20001450 PARAMETER Experiment Name: At_Far-red-induction_P Parameter: Light Value: Far-red vs. White
  misc_feature: MA Experiment 20001450 PARAMETER Experiment Name: At_Far-red-induction_P Parameter: Organism Value: A. thaliana
  misc_feature: MA Experiment 20001450 PARAMETER Experiment Name: At_Far-red-induction_P Parameter: Plant Line Value: Columbia
  misc_feature: MA Experiment 20001450 PARAMETER Experiment Name: At_Far-red-induction_P Parameter: Timepoint (hr) Value: 8
  misc_feature: MA Experiment 20001450 PARAMETER Experiment Name: At_Far-red-induction_P Parameter: Tissue Value: Whole Plant
  misc_feature: MA Experiment ID: 20001451 Result: Down-regulated in Transcription
  misc_feature: MA Experiment 20001451 PARAMETER Experiment Name: At_Far-red-induction_P Parameter: Age (day) Value: 7
  misc_feature: MA Experiment 20001451 PARAMETER Experiment Name: At_Far-red-induction_P Parameter: Light Value: Far-red vs. White
  misc_feature: MA Experiment 20001451 PARAMETER Experiment Name: At_Far-red-induction_P Parameter: Organism Value: A. thaliana
  misc_feature: MA Experiment 20001451 PARAMETER Experiment Name: At_Far-red-induction_P Parameter: Plant Line Value: Columbia
  misc_feature: MA Experiment 20001451 PARAMETER Experiment Name: At_Far-red-induction_P Parameter: Timepoint (hr) Value: 24
  misc_feature: MA Experiment 20001451 PARAMETER Experiment Name: At_Far-red-induction_P Parameter: Tissue Value: Whole Plant
  misc_feature: MA Experiment ID: 20001458 Result: Up-regulated in Transcription
  misc_feature: MA Experiment 20001458 PARAMETER Experiment Name: At_50mM_NH4NO3_L-to-H_P Parameter: Age (day) Value: Undefined
  misc_feature: MA Experiment 20001458 PARAMETER Experiment Name: At_50mM_NH4NO3_L-to-H_P Parameter: Organism Value: Undefined
  misc_feature: MA Experiment 20001458 PARAMETER Experiment Name: At_50mM_NH4NO3_L-to-H_P Parameter: Plant Line Value: Undefined
  misc_feature: MA Experiment 20001458 PARAMETER Experiment Name: At_50mM_NH4NO3_L-to-H_P Parameter: Timepoint (hr) Value: 2
  misc_feature: MA Experiment 20001458 PARAMETER Experiment Name: At_50mM_NH4NO3_L-to-H_P Parameter: Tissue Value: Siliques
  misc_feature: MA Experiment 20001458 PARAMETER Experiment Name: At_50mM_NH4NO3_L-to-H_P Parameter: Treatment Value: 50mM NH4NO3 vs. 100mM Manitol
  misc_feature: MA Experiment ID: 20001556 Result: Up-regulated in Transcription
  misc_feature: MA Experiment 20001556 PARAMETER Experiment Name: At_Drought_Soil_Dry_P Parameter: Age (day) Value: 26
  misc_feature: MA Experiment 20001556 PARAMETER Experiment Name: At_Drought_Soil_Dry_P Parameter: Organism Value: A. thaliana
  misc_feature: MA Experiment 20001556 PARAMETER Experiment Name: At_Drought_Soil_Dry_P Parameter: Plant Line Value: WS
  misc_feature: MA Experiment 20001556 PARAMETER Experiment Name: At_Drought_Soil_Dry_P Parameter: Post Timepoint (hr) Value: None
  misc_feature: MA Experiment 20001556 PARAMETER Experiment Name: At_Drought_Soil_Dry_P Parameter: Post-Treatment Value: None
  misc_feature: MA Experiment 20001556 PARAMETER Experiment Name: At_Drought_Soil_Dry_P Parameter: Timepoint (day) Value: 12
  misc_feature: MA Experiment 20001556 PARAMETER Experiment Name: At_Drought_Soil_Dry_P Parameter: Treatment Value: Drought vs. No Drought
  misc_feature: MA Experiment ID: 20001558 Result: Up-regulated in Transcription
  misc_feature: MA Experiment 20001558 PARAMETER Experiment Name: At_Drought_Soil_Dry_P Parameter: Age (day) Value: 27
  misc_feature: MA Experiment 20001558 PARAMETER Experiment Name: At_Drought_Soil_Dry_P Parameter: Organism Value: A. thaliana
  misc_feature: MA Experiment 20001558 PARAMETER Experiment Name: At_Drought_Soil_Dry_P Parameter: Plant Line Value: WS
  misc_feature: MA Experiment 20001558 PARAMETER Experiment Name: At_Drought_Soil_Dry_P Parameter: Post Timepoint (hr) Value: 6
  misc_feature: MA Experiment 20001558 PARAMETER Experiment Name: At_Drought_Soil_Dry_P Parameter: Post-Treatment Value: Re-Water vs. No Drought
  misc_feature: MA Experiment 20001558 PARAMETER Experiment Name: At_Drought_Soil_Dry_P Parameter: Timepoint (day) Value: 13
  misc_feature: MA Experiment 20001558 PARAMETER Experiment Name: At_Drought_Soil_Dry_P Parameter: Treatment Value: Drought vs. No Drought
  misc_feature: MA Experiment ID: 20001757 Result: Up-regulated in Transcription
  misc_feature: MA Experiment 20001757 PARAMETER Experiment Name: At_50mM_NH4NO3_L-to-H_P Parameter: Timepoint (hr) Value: 6
  misc_feature: MA Experiment 20001757 PARAMETER Experiment Name: At_50mM_NH4NO3_L-to-H_P Parameter: Tissue Value: Leaf
  misc_feature: MA Experiment 20001757 PARAMETER Experiment Name: At_50mM_NH4NO3_L-to-H_P Parameter: Treatment Value: 50mM NH4NO3 vs 100mM Mannitol
  misc_feature: MA Experiment ID: 20001905 Result: Down-regulated in Transcription
  misc_feature: MA Experiment 20001905 PARAMETER Experiment Name: At_Drought_Reproduction_P Parameter: Age (day) Value: 40
  misc_feature: MA Experiment 20001905 PARAMETER Experiment Name: At_Drought_Reproduction_P Parameter: Organism Value: A. thaliana
  misc_feature: MA Experiment 20001905 PARAMETER Experiment Name: At_Drought_Reproduction_P Parameter: Plant Line Value: WS
  misc_feature: MA Experiment 20001905 PARAMETER Experiment Name: At_Drought_Reproduction_P Parameter: Timepoint (day) Value: 10
  misc_feature: MA Experiment 20001905 PARAMETER Experiment Name: At_Drought_Reproduction_P Parameter: Tissue Value: Rosettes
  misc_feature: MA Experiment 20001905 PARAMETER Experiment Name: At_Drought_Reproduction_P Parameter: Treatment Value: Drought vs. No Drought
  misc_feature: MA Experiment ID: 20001906 Result: Down-regulated in Transcription
  misc_feature: MA Experiment 20001906 PARAMETER Experiment Name: At_Drought_Reproduction_P Parameter: Age (day) Value: 35
  misc_feature: MA Experiment 20001906 PARAMETER Experiment Name: At_Drought_Reproduction_P Parameter: Organism Value: A. thaliana
  misc_feature: MA Experiment 20001906 PARAMETER Experiment Name: At_Drought_Reproduction_P Parameter: Plant Line Value: WS
  misc_feature: MA Experiment 20001906 PARAMETER Experiment Name: At_Drought_Reproduction_P Parameter: Timepoint (day) Value: 5
  misc_feature: MA Experiment 20001906 PARAMETER Experiment Name: At_Drought_Reproduction_P Parameter: Tissue Value: Siliques
  misc_feature: MA Experiment 20001906 PARAMETER Experiment Name: At_Drought_Reproduction_P Parameter: Treatment Value: Drought vs. No Drought

SEQ ID NO: 33535 - protein, 205 aa, Arabidopsis thaliana; identical to SEQ ID NO: 29945
  peptide (1)..(205): Ceres Seq. ID no. 12738410
  misc_feature (29)..(205): Homolog of NCBI NO: 81600 NR Description: chaperonin 60 beta (clone bX) - Arabidopsis
  misc_feature (1)..(205): Homolog of NCBI NO: 2493650 NR Description: RUBISCO SUBUNIT BINDING-PROTEIN BETA SUBUNIT (60
  misc_feature (1)..(205): Homolog of NCBI NO: 34897924 NR Description: ESTs C99033(E4350),C99032(E4350),D46006(S10372), correspond to a region of the predicted gene.~Similar to
  misc_feature (1)..(204): Homolog of NCBI NO: 2506277 NR Description: RuBisCO subunit binding-protein beta subunit,
  misc_feature (1)..(205): Homolog of NCBI NO: 7443855 NR Description: probable chaperonin 60 beta chain precursor,
  misc_feature (1)..(193): Homolog of NCBI NO: 134104 NR Description: RuBisCO subunit binding-protein beta subunit,
  misc_feature (1)..(205): Homolog of NCBI NO: 30696748 NR Description: chaperonin, putative [Arabidopsis thaliana]
  misc_feature (1)..(205): Homolog of NCBI NO: 15231255 NR Description: chaperonin 60 beta, putative; protein id:
  misc_feature (1)..(205): Homolog of NCBI NO: 81601 NR Description: chaperonin 60 beta precursor - Arabidopsis
  misc_feature (1)..(205): Homolog of NCBI NO: 15222729 NR Description: Rubisco subunit binding-protein beta subunit

SEQ ID NO: 33536 - DNA, 1261 bp, Arabidopsis thaliana; identical to SEQ ID NO: 29946
  misc_feature (1)..(1261): Ceres Seq. ID no. 12482789
  misc_feature: MA Experiment ID: 108434 Result: Down-regulated in Transcription
  misc_feature: MA Experiment 108434 PARAMETER Experiment Name: At_Root_Tips_cDNA_P Parameter: Tissue Value: Root Tips
  misc_feature: MA Experiment ID: 108461 Result: Up-regulated in Transcription
  misc_feature: MA Experiment 108461 PARAMETER Experiment Name: At_Germinating_Seeds_cDNA_P Parameter: Age (day) Value: 1 vs. 0
  misc_feature: MA Experiment 108461 PARAMETER Experiment Name: At_Germinating_Seeds_cDNA_P Parameter: Tissue Value: Germinating Seeds
  misc_feature: MA Experiment ID: 108462 Result: Up-regulated in Transcription
  misc_feature: MA Experiment 108462 PARAMETER Experiment Name: At_Germinating_Seeds_cDNA_P Parameter: Age (day) Value: 2 vs. 0
  misc_feature: MA Experiment 108462 PARAMETER Experiment Name: At_Germinating_Seeds_cDNA_P Parameter: Tissue Value: Germinating Seeds
  misc_feature: MA Experiment ID: 108561 Result: Up-regulated in Transcription
  misc_feature: MA Experiment 108561 PARAMETER Experiment Name: At_100uM_ABA_cDNA_P Parameter: Timepoint (hr) Value: 6
  misc_feature: MA Experiment 108561 PARAMETER Experiment Name: At_100uM_ABA_cDNA_P Parameter: Tissue Value: Aerial
  misc_feature: MA Experiment 108561 PARAMETER Experiment Name: At_100uM_ABA_cDNA_P Parameter: Treatment Value: 100uM ABA vs. No Treatment
  misc_feature: MA Experiment ID: 108573 Result: Up-regulated in Transcription
  misc_feature: MA Experiment 108573 PARAMETER Experiment Name: At_Drought_cDNA_P Parameter: Timepoint (hr) Value: 6
  misc_feature: MA Experiment 108573 PARAMETER Experiment Name: At_Drought_cDNA_P Parameter: Tissue Value: Aerial
  misc_feature: MA Experiment 108573 PARAMETER Experiment Name: At_Drought_cDNA_P Parameter: Treatment Value: Drought vs. No Drought
  misc_feature: MA Experiment ID: 108595 Result: Up-regulated in Transcription
  misc_feature: MA Experiment 108595 PARAMETER Experiment Name: At_Ler-pi_Ovule_cDNA_P Parameter: Plant Line Value: null
  misc_feature: MA Experiment ID: 108605 Result: Up-regulated in Transcription
  misc_feature: MA Experiment 108605 PARAMETER Experiment Name: At_100uM_ABA_cDNA_P Parameter: Timepoint (hr) Value: 6
  misc_feature: MA Experiment 108605 PARAMETER Experiment Name: At_100uM_ABA_cDNA_P Parameter: Tissue Value: Aerial
  misc_feature: MA Experiment 108605 PARAMETER Experiment Name: At_100uM_ABA_cDNA_P Parameter: Treatment Value: 100uM ABA vs. No Treatment
  misc_feature: MA Experiment ID: 108607 Result: Up-regulated in Transcription
  misc_feature: MA Experiment 108607 PARAMETER Experiment Name: At_100uM_ABA_cDNA_P Parameter: Timepoint (hr) Value: 4
  misc_feature: MA Experiment 108607 PARAMETER Experiment Name: At_100uM_ABA_cDNA_P Parameter: Tissue Value: Aerial
  misc_feature: MA Experiment 108607 PARAMETER Experiment Name: At_100uM_ABA_cDNA_P Parameter: Treatment Value: 100uM ABA vs. No Treatment
  misc_feature: MA Experiment ID: 20000069 Result: Up-regulated in Transcription
  misc_feature: MA Experiment 20000069 PARAMETER Experiment Name: At_100uM_ABA_Mutants_cDNA_P Parameter: Plant Line Value: CS23
  misc_feature: MA Experiment 20000069 PARAMETER Experiment Name: At_100uM_ABA_Mutants_cDNA_P Parameter: Timepoint (hr) Value: 6
  misc_feature: MA Experiment 20000069 PARAMETER Experiment Name: At_100uM_ABA_Mutants_cDNA_P Parameter: Tissue Value: Aerial
  misc_feature: MA Experiment 20000069 PARAMETER Experiment Name: At_100uM_ABA_Mutants_cDNA_P Parameter: Treatment Value: 100uM ABA vs. No Treatment
  misc_feature: MA Experiment ID: 20000070 Result: Up-regulated in Transcription
  misc_feature: MA Experiment 20000070 PARAMETER Experiment Name: At_100uM_ABA_Mutants_cDNA_P Parameter: Plant Line Value: CS24
  misc_feature: MA Experiment 20000070 PARAMETER Experiment Name: At_100uM_ABA_Mutants_cDNA_P Parameter: Timepoint (hr) Value: 6
  misc_feature: MA Experiment 20000070 PARAMETER Experiment Name: At_100uM_ABA_Mutants_cDNA_P Parameter: Tissue Value: Aerial
  misc_feature: MA Experiment 20000070 PARAMETER Experiment Name: At_100uM_ABA_Mutants_cDNA_P Parameter: Treatment Value: 100uM ABA vs. No Treatment
  misc_feature: MA Experiment ID: 20000071 Result: Up-regulated in Transcription
  misc_feature: MA Experiment 20000071 PARAMETER Experiment Name: At_100uM_ABA_Mutants_cDNA_P Parameter: Plant Line Value: CS8104
  misc_feature: MA Experiment 20000071 PARAMETER Experiment Name: At_100uM_ABA_Mutants_cDNA_P Parameter: Timepoint (hr) Value: 6
  misc_feature: MA Experiment 20000071 PARAMETER Experiment Name: At_100uM_ABA_Mutants_cDNA_P Parameter: Tissue Value: Aerial
  misc_feature: MA Experiment 20000071 PARAMETER Experiment Name: At_100uM_ABA_Mutants_cDNA_P Parameter: Treatment Value: 100uM ABA vs. No Treatment
  misc_feature: MA Experiment ID: 20000072 Result: Up-regulated in Transcription
  misc_feature: MA Experiment 20000072 PARAMETER Experiment Name: At_100uM_ABA_Mutants_cDNA_P Parameter: Plant Line Value: CS8105
  misc_feature: MA Experiment 20000072 PARAMETER Experiment Name: At_100uM_ABA_Mutants_cDNA_P Parameter: Timepoint (hr) Value: 6
  misc_feature: MA Experiment 20000072 PARAMETER Experiment Name: At_100uM_ABA_Mutants_cDNA_P Parameter: Tissue Value: Aerial
  misc_feature: MA Experiment 20000072 PARAMETER Experiment Name: At_100uM_ABA_Mutants_cDNA_P Parameter: Treatment Value: 100uM ABA vs. No Treatment
  misc_feature: MA Experiment ID: 20000087 Result: Up-regulated in Transcription
  misc_feature: MA Experiment 20000087 PARAMETER Experiment Name: At_100uM_ABA_Mutants_cDNA_P Parameter: Plant Line Value: WS
  misc_feature: MA Experiment 20000087 PARAMETER Experiment Name: At_100uM_ABA_Mutants_cDNA_P Parameter: Timepoint (hr) Value: 6
  misc_feature: MA Experiment 20000087 PARAMETER Experiment Name: At_100uM_ABA_Mutants_cDNA_P Parameter: Tissue Value: Aerial
  misc_feature: MA Experiment 20000087 PARAMETER Experiment Name: At_100uM_ABA_Mutants_cDNA_P Parameter: Treatment Value: 100uM ABA vs. No Treatment
  misc_feature: MA Experiment ID: 20000117 Result: Up-regulated in Transcription
  misc_feature: MA Experiment 20000117 PARAMETER Experiment Name: At_100uM_ABA_Mutants_cDNA_P Parameter: Plant Line Value: Columbia
  misc_feature: MA Experiment 20000117 PARAMETER Experiment Name: At_100uM_ABA_Mutants_cDNA_P Parameter: Timepoint (hr) Value: 6
  misc_feature: MA Experiment 20000117 PARAMETER Experiment Name: At_100uM_ABA_Mutants_cDNA_P Parameter: Tissue Value: Aerial
  misc_feature: MA Experiment 20000117 PARAMETER Experiment Name: At_100uM_ABA_Mutants_cDNA_P Parameter: Treatment Value: 100uM ABA vs. No Treatment
  misc_feature: MA Experiment ID: 20000169 Result: Up-regulated in Transcription
  misc_feature: MA Experiment 20000169 PARAMETER Experiment Name: At_100uM_ABA_P Parameter: Age (day) Value: 14
  misc_feature: MA Experiment 20000169 PARAMETER Experiment Name: At_100uM_ABA_P Parameter: Organism Value: A. thaliana
  misc_feature: MA Experiment 20000169 PARAMETER Experiment Name: At_100uM_ABA_P Parameter: Plant Line Value: WS
  misc_feature: MA Experiment 20000169 PARAMETER Experiment Name: At_100uM_ABA_P Parameter: Timepoint (hr) Value: 6
  misc_feature: MA Experiment 20000169 PARAMETER Experiment Name: At_100uM_ABA_P Parameter: Tissue Value: Aerial
  misc_feature: MA Experiment 20000169 PARAMETER Experiment Name: At_100uM_ABA_P Parameter: Treatment Value: 100uM ABA vs. No Treatment
  misc_feature: MA Experiment ID: 20000179 Result: Up-regulated in Transcription
  misc_feature: MA Experiment 20000179 PARAMETER Experiment Name: At_Germinating_Seeds_P Parameter: Age (hr) Value: 6 vs. 0
  misc_feature: MA Experiment 20000179 PARAMETER Experiment Name: At_Germinating_Seeds_P Parameter: Tissue Value: Germinating Seeds
  misc_feature: MA Experiment ID: 20000180 Result: Up-regulated in Transcription
  misc_feature: MA Experiment 20000180 PARAMETER Experiment Name: At_Germinating_Seeds_P Parameter: Age (hr) Value: 24 vs. 0
  misc_feature: MA Experiment 20000180 PARAMETER Experiment Name: At_Germinating_Seeds_P Parameter: Tissue Value: Germinating Seeds
  misc_feature: MA Experiment ID: 20000182 Result: Up-regulated in Transcription
  misc_feature: MA Experiment 20000182 PARAMETER Experiment Name: At_2mM_SA_P Parameter: Age (day) Value: 14
  misc_feature: MA Experiment 20000182 PARAMETER Experiment Name: At_2mM_SA_P Parameter: Organism Value: A. thaliana
  misc_feature: MA Experiment 20000182 PARAMETER Experiment Name: At_2mM_SA_P Parameter: Plant Line Value: WS
  misc_feature: MA Experiment 20000182 PARAMETER Experiment Name: At_2mM_SA_P Parameter: Timepoint (hr) Value: 6
  misc_feature: MA Experiment 20000182 PARAMETER Experiment Name: At_2mM_SA_P Parameter: Tissue Value: Aerial
  misc_feature: MA Experiment 20000182 PARAMETER Experiment Name: At_2mM_SA_P Parameter: Treatment Value: 2mM SA vs. No Treatment
  misc_feature: MA Experiment ID: 20000184 Result: Down-regulated in Transcription
  misc_feature: MA Experiment 20000184 PARAMETER Experiment Name: At_Shoots__P Parameter: Age (day) Value: 7
  misc_feature: MA Experiment 20000184 PARAMETER Experiment Name: At_Shoots__P Parameter: Tissue Value: Shoots vs. Whole Plant
  misc_feature: MA Experiment ID: 20000436 Result: Up-regulated in Transcription
  misc_feature: MA Experiment 20000436 PARAMETER Experiment Name: At_Drought_P Parameter: Age (day) Value: 7
  misc_feature: MA Experiment 20000436 PARAMETER Experiment Name: At_Drought_P Parameter: Organism Value: A. thaliana
  misc_feature: MA Experiment 20000436 PARAMETER Experiment Name: At_Drought_P Parameter: Plant Line Value: WS
  misc_feature: MA Experiment 20000436 PARAMETER Experiment Name: At_Drought_P Parameter: Timepoint (hr) Value: 12
  misc_feature: MA Experiment 20000436 PARAMETER Experiment Name: At_Drought_P Parameter: Tissue Value: Whole Plant
  misc_feature: MA Experiment 20000436 PARAMETER Experiment Name: At_Drought_P Parameter: Treatment Value: Drought vs. No Drought
  misc_feature: MA Experiment ID: 20000437 Result: Up-regulated in Transcription
  misc_feature: MA Experiment 20000437 PARAMETER Experiment Name: At_Drought_P Parameter: Age (day) Value: 8
  misc_feature: MA Experiment 20000437 PARAMETER Experiment Name: At_Drought_P Parameter: Organism Value: A. thaliana
  misc_feature: MA Experiment 20000437 PARAMETER Experiment Name: At_Drought_P Parameter: Plant Line Value: WS
  misc_feature: MA Experiment 20000437 PARAMETER Experiment Name: At_Drought_P Parameter: Timepoint (hr) Value: 24
  misc_feature: MA Experiment 20000437 PARAMETER Experiment Name: At_Drought_P Parameter: Tissue Value: Whole Plant
  misc_feature: MA Experiment 20000437 PARAMETER Experiment Name: At_Drought_P Parameter: Treatment Value: Drought vs. No Drought
  misc_feature: MA Experiment ID: 20000453 Result: Up-regulated in Transcription
  misc_feature: MA Experiment 20000453 PARAMETER Experiment Name: At_100uM_ABA_P Parameter: Age (day) Value: 15
  misc_feature: MA Experiment 20000453 PARAMETER Experiment Name: At_100uM_ABA_P Parameter: Organism Value: A. thaliana
  misc_feature: MA Experiment 20000453 PARAMETER Experiment Name: At_100uM_ABA_P Parameter: Plant Line Value: WS
  misc_feature: MA Experiment 20000453 PARAMETER Experiment Name: At_100uM_ABA_P Parameter: Timepoint (hr) Value: 24
  misc_feature: MA Experiment 20000453 PARAMETER Experiment Name: At_100uM_ABA_P Parameter: Tissue Value: Aerial
  misc_feature: MA Experiment 20000453 PARAMETER Experiment Name: At_100uM_ABA_P Parameter: Treatment Value: 100uM ABA vs. No Treatment
  misc_feature: MA Experiment ID: 20001556 Result: Up-regulated in Transcription
  misc_feature: MA Experiment 20001556 PARAMETER Experiment Name: At_Drought_Soil_Dry_P Parameter: Age (day) Value: 26
  misc_feature: MA Experiment 20001556 PARAMETER Experiment Name: At_Drought_Soil_Dry_P Parameter: Organism Value: A. thaliana
  misc_feature: MA Experiment 20001556 PARAMETER Experiment Name: At_Drought_Soil_Dry_P Parameter: Plant Line Value: WS
  misc_feature: MA Experiment 20001556 PARAMETER Experiment Name: At_Drought_Soil_Dry_P Parameter: Post Timepoint (hr) Value: None
  misc_feature: MA Experiment 20001556 PARAMETER Experiment Name: At_Drought_Soil_Dry_P Parameter: Post-Treatment Value: None
  misc_feature: MA Experiment 20001556 PARAMETER Experiment Name: At_Drought_Soil_Dry_P Parameter: Timepoint (day) Value: 12
  misc_feature: MA Experiment 20001556 PARAMETER Experiment Name: At_Drought_Soil_Dry_P Parameter: Treatment Value: Drought vs. No Drought
  misc_feature: MA Experiment ID: 20001904 Result: Up-regulated in Transcription
  misc_feature: MA Experiment 20001904 PARAMETER Experiment Name: At_Drought_Reproduction_P Parameter: Age (day) Value: 37
  misc_feature: MA Experiment 20001904 PARAMETER Experiment Name: At_Drought_Reproduction_P Parameter: Organism Value: A. thaliana
  misc_feature: MA Experiment 20001904 PARAMETER Experiment Name: At_Drought_Reproduction_P Parameter: Plant Line Value: WS
  misc_feature: MA Experiment 20001904 PARAMETER Experiment Name: At_Drought_Reproduction_P Parameter: Timepoint (day) Value: 7
  misc_feature: MA Experiment 20001904 PARAMETER Experiment Name: At_Drought_Reproduction_P Parameter: Tissue Value: Rosettes
  misc_feature: MA Experiment 20001904 PARAMETER Experiment Name: At_Drought_Reproduction_P Parameter: Treatment Value: Drought vs. No Drought
  misc_feature: MA Experiment ID: 20001906 Result: Up-regulated in Transcription
  misc_feature: MA Experiment 20001906 PARAMETER Experiment Name: At_Drought_Reproduction_P Parameter: Age (day) Value: 35
  misc_feature: MA Experiment 20001906 PARAMETER Experiment Name: At_Drought_Reproduction_P Parameter: Organism Value: A. thaliana
  misc_feature: MA Experiment 20001906 PARAMETER Experiment Name: At_Drought_Reproduction_P Parameter: Plant Line Value: WS
  misc_feature: MA Experiment 20001906 PARAMETER Experiment Name: At_Drought_Reproduction_P Parameter: Timepoint (day) Value: 5
  misc_feature: MA Experiment 20001906 PARAMETER Experiment Name: At_Drought_Reproduction_P Parameter: Tissue Value: Siliques
  misc_feature: MA Experiment 20001906 PARAMETER Experiment Name: At_Drought_Reproduction_P Parameter: Treatment Value: Drought vs. No Drought

SEQ ID NO: 33537 - protein, 272 aa, Arabidopsis thaliana; identical to SEQ ID NO: 29947
  peptide (1)..(272): Ceres Seq. ID no. 12482790
  misc_feature (108)..(216): Pfam Name: Arabidopsis protein of unknown function, DUF266 Pfam Description: Arabidopsis protein of unknown function, DUF266
  misc_feature (68)..(239): Homolog of NCBI NO: 26452247 NR Description: unknown protein [Arabidopsis thaliana]
  misc_feature (59)..(239): Homolog of NCBI NO: 38346557 NR Description: OSJNBa0035M09.18 [Oryza sativa (japonica
  misc_feature (54)..(239): Homolog of NCBI NO: 37531372 NR Description: hypothetical protein [Oryza sativa (japonica
  misc_feature (14)..(227): Homolog of NCBI NO: 30684956 NR Description: expressed protein [Arabidopsis thaliana]
  misc_feature (64)..(227): Homolog of NCBI NO: 34911442 NR Description: P0431H09.21 [Oryza sativa (japonica
  misc_feature (14)..(227): Homolog of NCBI NO: 15241437 NR Description: putative protein; protein id: At5g14550.1
  misc_feature (1)..(91): Homolog of NCBI NO: 22330381 NR Description: hypothetical protein; protein id: At1g62305.1
  misc_feature (130)..(227): Homolog of NCBI NO: 22330381 NR Description: hypothetical protein; protein id: At1g62305.1
  misc_feature (5)..(272): Homolog of NCBI NO: 25402693 NR Description: hypothetical protein [imported] - Arabidopsis
  misc_feature (5)..(227): Homolog of NCBI NO: 30682534 NR Description: expressed protein [Arabidopsis thaliana]

SEQ ID NO: 33538 - protein, 170 aa, Arabidopsis thaliana; identical to SEQ ID NO: 29948
  peptide (1)..(170): Ceres Seq. ID no. 12482791
  misc_feature (51)..(147): Homolog of NCBI NO: 37531372 NR Description: hypothetical protein [Oryza sativa (japonica
  misc_feature (9)..(115): Homolog of NCBI NO: 30684956 NR Description: expressed protein [Arabidopsis thaliana]
  misc_feature (49)..(115): Homolog of NCBI NO: 34911442 NR Description: P0431H09.21 [Oryza sativa (japonica
  misc_feature (9)..(161): Homolog of NCBI NO: 15241437 NR Description: putative protein; protein id: At5g14550.1
  misc_feature (20)..(36): Homolog of NCBI NO: 22330381 NR Description: hypothetical protein; protein id: At1g62305.1
  misc_feature (64)..(168): Homolog of NCBI NO: 25402693 NR Description: hypothetical protein [imported] - Arabidopsis
  misc_feature (20)..(168): Homolog of NCBI NO: 30682534 NR Description: expressed protein [Arabidopsis thaliana]

SEQ ID NO: 33539 - DNA, 997 bp, Arabidopsis thaliana; identical to SEQ ID NO: 29949
  misc_feature (1)..(997): Ceres Seq. ID no. 12396633
  misc_feature: MA Experiment ID: 20000180 Result: Up-regulated in Transcription
  misc_feature: MA Experiment 20000180 PARAMETER Experiment Name: At_Germinating_Seeds_P Parameter: Age (hr) Value: 24 vs. 0
  misc_feature: MA Experiment 20000180 PARAMETER Experiment Name: At_Germinating_Seeds_P Parameter: Tissue Value: Germinating Seeds
  misc_feature: MA Experiment ID: 20000234 Result: Down-regulated in Transcription
  misc_feature: MA Experiment 20000234 PARAMETER Experiment Name: At_Siliques_P Parameter: Age (day) Value: 21
  misc_feature: MA Experiment 20000234 PARAMETER Experiment Name: At_Siliques_P Parameter: Organism Value: A. thaliana
  misc_feature: MA Experiment 20000234 PARAMETER Experiment Name: At_Siliques_P Parameter: Plant Line Value: WS
  misc_feature: MA Experiment 20000234 PARAMETER Experiment Name: At_Siliques_P Parameter: Tissue Value: Less Than 5mm Siliques vs. Whole Plant
  misc_feature: MA Experiment ID: 20000265 Result: Down-regulated in Transcription
  misc_feature: MA Experiment 20000265 PARAMETER Experiment Name: At_Open_Flower_P Parameter: Age (day) Value: 21
  misc_feature: MA Experiment 20000265 PARAMETER Experiment Name: At_Open_Flower_P Parameter: Plant Line Value: WS
  misc_feature: MA Experiment 20000265 PARAMETER Experiment Name: At_Open_Flower_P Parameter: Tissue Value: Closed Flower vs. Whole Plant
  misc_feature: MA Experiment ID: 20001557 Result: Down-regulated in Transcription
  misc_feature: MA Experiment 20001557 PARAMETER Experiment Name: At_Drought_Soil_Dry_P Parameter: Age (day) Value: 27
  misc_feature: MA Experiment 20001557 PARAMETER Experiment Name: At_Drought_Soil_Dry_P Parameter: Organism Value: A. thaliana
  misc_feature: MA Experiment 20001557 PARAMETER Experiment Name: At_Drought_Soil_Dry_P Parameter: Plant Line Value: WS
  misc_feature: MA Experiment 20001557 PARAMETER Experiment Name: At_Drought_Soil_Dry_P Parameter: Post Timepoint (hr) Value: 3
  misc_feature: MA Experiment 20001557 PARAMETER Experiment Name: At_Drought_Soil_Dry_P Parameter: Post-Treatment Value: Re-Water vs. No Drought
  misc_feature: MA Experiment 20001557 PARAMETER Experiment Name: At_Drought_Soil_Dry_P Parameter: Timepoint (day) Value: 13
  misc_feature: MA Experiment 20001557 PARAMETER Experiment Name: At_Drought_Soil_Dry_P Parameter: Treatment Value: Drought vs. No Drought
  misc_feature: MA Experiment ID: 20001558 Result: Down-regulated in Transcription
  misc_feature: MA Experiment 20001558 PARAMETER Experiment Name: At_Drought_Soil_Dry_P Parameter: Age (day) Value: 27
  misc_feature: MA Experiment 20001558 PARAMETER Experiment Name: At_Drought_Soil_Dry_P Parameter: Organism Value: A. thaliana
  misc_feature: MA Experiment 20001558 PARAMETER Experiment Name: At_Drought_Soil_Dry_P Parameter: Plant Line Value: WS
  misc_feature: MA Experiment 20001558 PARAMETER Experiment Name: At_Drought_Soil_Dry_P Parameter: Post Timepoint (hr) Value: 6
  misc_feature: MA Experiment 20001558 PARAMETER Experiment Name: At_Drought_Soil_Dry_P Parameter: Post-Treatment Value: Re-Water vs. No Drought
  misc_feature: MA Experiment 20001558 PARAMETER Experiment Name: At_Drought_Soil_Dry_P Parameter: Timepoint (day) Value: 13
  misc_feature: MA Experiment 20001558 PARAMETER Experiment Name: At_Drought_Soil_Dry_P Parameter: Treatment Value: Drought vs. No Drought
  misc_feature: MA Experiment ID: 20001560 Result: Down-regulated in Transcription
  misc_feature: MA Experiment 20001560 PARAMETER Experiment Name: At_Drought_Soil_Dry_P Parameter: Age (day) Value: 28
  misc_feature: MA Experiment 20001560 PARAMETER Experiment Name: At_Drought_Soil_Dry_P Parameter: Organism Value: A. thaliana
  misc_feature: MA Experiment 20001560 PARAMETER Experiment Name: At_Drought_Soil_Dry_P Parameter: Plant Line Value: WS
  misc_feature: MA Experiment 20001560 PARAMETER Experiment Name: At_Drought_Soil_Dry_P Parameter: Post Timepoint (hr) Value: None
  misc_feature: MA Experiment 20001560 PARAMETER Experiment Name: At_Drought_Soil_Dry_P Parameter: Post-Treatment Value: None
  misc_feature: MA Experiment 20001560 PARAMETER Experiment Name: At_Drought_Soil_Dry_P Parameter: Timepoint (day) Value: 14
  misc_feature: MA Experiment 20001560 PARAMETER Experiment Name: At_Drought_Soil_Dry_P Parameter: Treatment Value: Drought vs. No Drought

SEQ ID NO: 33540 - protein, 273 aa, Arabidopsis thaliana; identical to SEQ ID NO: 29950
  peptide (1)..(273): Ceres Seq. ID no. 12396634
  misc_feature (35)..(247): Homolog of NCBI NO: 15240965 NR Description: cytochrome b-561 (gb|AAD45585.1)
  misc_feature (47)..(253): Homolog of NCBI NO: 38637027 NR Description: putative cytochrome b561 [Oryza sativa (japonica
  misc_feature (35)..(251): Homolog of NCBI NO: 37535830 NR Description: putative cytochrome b-561
  misc_feature (39)..(221): Homolog of NCBI NO: 6822123 NR Description: putative cytochrome B 561 [Craterostigma
  misc_feature (39)..(258): Homolog of NCBI NO: 38346996 NR Description: OSJNBb0039L24.15 [Oryza sativa (japonica
  misc_feature (35)..(273): Homolog of NCBI NO: 21553731 NR Description: cytochrome b561 [Arabidopsis thaliana]
  misc_feature (35)..(273): Homolog of NCBI NO: 12597245 NR Description: cytochrome b561 [Arabidopsis thaliana]
  misc_feature (35)..(273): Homolog of NCBI NO: 18416576 NR Description: putative protein
  misc_feature (1)..(273): Homolog of NCBI NO: 25407597 NR Description: hypothetical protein AT4g25570 [imported] -
  misc_feature (1)..(273): Homolog of NCBI NO: 7486819 NR Description: hypothetical protein M7J2.60 - Arabidopsis

SEQ ID NO: 33541 - protein, 239 aa, Arabidopsis thaliana; identical to SEQ ID NO: 29951
  peptide (1)..(239): Ceres Seq. ID no. 12396635
  misc_feature (1)..(213): Homolog of NCBI NO: 15240965 NR Description: cytochrome b-561 (gb|AAD45585.1)
  misc_feature (13)..(219): Homolog of NCBI NO: 38637027 NR Description: putative cytochrome b561 [Oryza sativa (japonica
  misc_feature (1)..(217): Homolog of NCBI NO: 37535830 NR Description: putative cytochrome b-561
  misc_feature (5)..(187): Homolog of NCBI NO: 6822123 NR Description: putative cytochrome B 561 [Craterostigma
  misc_feature (5)..(224): Homolog of NCBI NO: 38346996 NR Description: OSJNBb0039L24.15 [Oryza sativa (japonica
  misc_feature (1)..(239): Homolog of NCBI NO: 21553731 NR Description: cytochrome b561 [Arabidopsis thaliana]
  misc_feature (1)..(239): Homolog of NCBI NO: 12597245 NR Description: cytochrome b561 [Arabidopsis thaliana]
  misc_feature (1)..(239): Homolog of NCBI NO: 18416576 NR Description: putative protein
  misc_feature (1)..(239): Homolog of NCBI NO: 25407597 NR Description: hypothetical protein AT4g25570 [imported] -
  misc_feature (1)..(239): Homolog of NCBI NO: 7486819 NR Description: hypothetical protein M7J2.60 - Arabidopsis

SEQ ID NO: 33542 - protein, 232 aa, Arabidopsis thaliana; identical to SEQ ID NO: 29952
  peptide (1)..(232): Ceres Seq. ID no. 12396636
  misc_feature (1)..(206): Homolog of NCBI NO: 15240965 NR Description: cytochrome b-561 (gb|AAD45585.1)
  misc_feature (6)..(212): Homolog of NCBI NO: 38637027 NR Description: putative cytochrome b561 [Oryza sativa (japonica
  misc_feature (1)..(210): Homolog of NCBI NO: 37535830 NR Description: putative cytochrome b-561
  misc_feature (1)..(180): Homolog of NCBI NO: 6822123 NR Description: putative cytochrome B 561 [Craterostigma
  misc_feature (1)..(217): Homolog of NCBI NO: 38346996 NR Description: OSJNBb0039L24.15 [Oryza sativa (japonica
  misc_feature (1)..(232): Homolog of NCBI NO: 21553731 NR Description: cytochrome b561 [Arabidopsis thaliana]
  misc_feature (1)..(232): Homolog of NCBI NO: 12597245 NR Description: cytochrome b561 [Arabidopsis thaliana]
  misc_feature (1)..(232): Homolog of NCBI NO: 18416576 NR Description: putative protein
  misc_feature (1)..(232): Homolog of NCBI NO: 25407597 NR Description: hypothetical protein AT4g25570 [imported] -
  misc_feature (1)..(232): Homolog of NCBI NO: 7486819 NR Description: hypothetical protein M7J2.60 - Arabidopsis

SEQ ID NO: 33543 - DNA, 1449 bp, Arabidopsis thaliana; identical to SEQ ID NO: 29953
  misc_feature (1)..(1449): Ceres Seq. ID no. 12396528
  misc_feature: MA Experiment ID: 20000171 Result: Up-regulated in Transcription
  misc_feature: MA Experiment 20000171 PARAMETER Experiment Name: At_42deg_Heat_P Parameter: Age (day) Value: 14
  misc_feature: MA Experiment 20000171 PARAMETER Experiment Name: At_42deg_Heat_P Parameter: Organism Value: A. thaliana
  misc_feature: MA Experiment 20000171 PARAMETER Experiment Name: At_42deg_Heat_P Parameter: Plant Line Value: WS
  misc_feature: MA Experiment 20000171 PARAMETER Experiment Name: At_42deg_Heat_P Parameter: Temperature (deg C) Value: 42 vs. 22
  misc_feature: MA Experiment 20000171 PARAMETER Experiment Name: At_42deg_Heat_P Parameter: Timepoint (hr) Value: 1
  misc_feature: MA Experiment 20000171 PARAMETER Experiment Name: At_42deg_Heat_P Parameter: Tissue Value: Aerial
  misc_feature: MA Experiment ID: 20000173 Result: Up-regulated in Transcription
  misc_feature: MA Experiment 20000173 PARAMETER Experiment Name: At_42deg_Heat_P Parameter: Age (day) Value: 14
  misc_feature: MA Experiment 20000173 PARAMETER Experiment Name: At_42deg_Heat_P Parameter: Organism Value: A. thaliana
  misc_feature: MA Experiment 20000173 PARAMETER Experiment Name: At_42deg_Heat_P Parameter: Plant Line Value: WS
  misc_feature: MA Experiment 20000173 PARAMETER Experiment Name: At_42deg_Heat_P Parameter: Temperature (deg C) Value: 42 vs. 22
  misc_feature: MA Experiment 20000173 PARAMETER Experiment Name: At_42deg_Heat_P Parameter: Timepoint (hr) Value: 6
  misc_feature: MA Experiment 20000173 PARAMETER Experiment Name: At_42deg_Heat_P Parameter: Tissue Value: Aerial
  misc_feature: MA Experiment ID: 20000179 Result: Up-regulated in Transcription
  misc_feature: MA Experiment 20000179 PARAMETER Experiment Name: At_Germinating_Seeds_P Parameter: Age (hr) Value: 6 vs. 0
  misc_feature: MA Experiment 20000179 PARAMETER Experiment Name: At_Germinating_Seeds_P Parameter: Tissue Value: Germinating Seeds
  misc_feature: MA Experiment ID: 20000180 Result: Up-regulated in Transcription
  misc_feature: MA Experiment 20000180 PARAMETER Experiment Name: At_Germinating_Seeds_P Parameter: Age (hr) Value: 24 vs. 0
  misc_feature: MA Experiment 20000180 PARAMETER Experiment Name: At_Germinating_Seeds_P Parameter: Tissue Value: Germinating Seeds
  misc_feature: MA Experiment ID: 20000182 Result: Down-regulated in Transcription
  misc_feature: MA Experiment 20000182 PARAMETER Experiment Name: At_2mM_SA_P Parameter: Age (day) Value: 14
  misc_feature: MA Experiment 20000182 PARAMETER Experiment Name: At_2mM_SA_P Parameter: Organism Value: A. thaliana
  misc_feature: MA Experiment 20000182 PARAMETER Experiment Name: At_2mM_SA_P Parameter: Plant Line Value: WS
  misc_feature: MA Experiment 20000182 PARAMETER Experiment Name: At_2mM_SA_P Parameter: Timepoint (hr) Value: 6
  misc_feature: MA Experiment 20000182 PARAMETER Experiment Name: At_2mM_SA_P Parameter: Tissue Value: Aerial
  misc_feature: MA Experiment 20000182 PARAMETER Experiment Name: At_2mM_SA_P Parameter: Treatment Value: 2mM SA vs. No Treatment
  misc_feature: MA Experiment ID: 20000184 Result: Up-regulated in Transcription
  misc_feature: MA Experiment 20000184 PARAMETER Experiment Name: At_Shoots__P Parameter: Age (day) Value: 7
  misc_feature: MA Experiment 20000184 PARAMETER Experiment Name: At_Shoots__P Parameter: Tissue Value: Shoots vs. Whole Plant
  misc_feature: MA Experiment ID: 20000185 Result: Up-regulated in Transcription
  misc_feature: MA Experiment 20000185 PARAMETER Experiment Name: At_Roots__P Parameter: Age (day) Value: 7 vs. 21
  misc_feature: MA Experiment 20000185 PARAMETER Experiment Name: At_Roots__P Parameter: Organism Value: A. thaliana
  misc_feature: MA Experiment 20000185 PARAMETER Experiment Name: At_Roots__P Parameter: Tissue Value: Roots vs. Whole Plant
  misc_feature: MA Experiment ID: 20000264 Result: Down-regulated in Transcription
  misc_feature: MA Experiment 20000264 PARAMETER Experiment Name: At_Open_Flower_P Parameter: Age (day) Value: 21
  misc_feature: MA Experiment 20000264 PARAMETER Experiment Name: At_Open_Flower_P Parameter: Plant Line Value: WS
  misc_feature: MA Experiment 20000264 PARAMETER Experiment Name: At_Open_Flower_P Parameter: Tissue Value: Open Flower vs. Whole Plant
  misc_feature: MA Experiment ID: 20000439 Result: Up-regulated in Transcription
  misc_feature: MA Experiment 20000439 PARAMETER Experiment Name: At_Roots__P Parameter: Age (day) Value: 14 vs. 21
  misc_feature: MA Experiment 20000439 PARAMETER Experiment Name: At_Roots__P Parameter: Organism Value: A. thaliana
  misc_feature: MA Experiment 20000439 PARAMETER Experiment Name: At_Roots__P Parameter: Tissue Value: Roots vs. Whole Plant
  misc_feature: MA Experiment ID: 20000495 Result: Up-regulated in Transcription
  misc_feature: MA Experiment 20000495 PARAMETER Experiment Name: At_Guard_Cells_P Parameter: Harvest Date Value: 8/2/2002
  misc_feature: MA Experiment 20000495 PARAMETER Experiment Name: At_Guard_Cells_P Parameter: Organism Value: A. thaliana
  misc_feature: MA Experiment 20000495 PARAMETER Experiment Name: At_Guard_Cells_P Parameter: Tissue Value: Guard Cells vs. Leaves
  misc_feature: MA Experiment ID: 20000527 Result: Down-regulated in Transcription
  misc_feature: MA Experiment 20000527 PARAMETER Experiment Name: At_10percent_PEG_P Parameter: Age (day) Value: 20
  misc_feature: MA Experiment 20000527 PARAMETER Experiment Name: At_10percent_PEG_P Parameter: Organism Value: A. thaliana
  misc_feature: MA Experiment 20000527 PARAMETER Experiment Name: At_10percent_PEG_P Parameter: Plant Line Value: WS
  misc_feature: MA Experiment 20000527 PARAMETER Experiment Name: At_10percent_PEG_P Parameter: Timepoint (day) Value: 20
  misc_feature: MA Experiment 20000527 PARAMETER Experiment Name: At_10percent_PEG_P Parameter: Tissue Value: Whole Plant
  misc_feature: MA Experiment 20000527 PARAMETER Experiment Name: At_10percent_PEG_P Parameter: Treatment Value: 10percent PEG vs. No Treatment
  misc_feature: MA Experiment ID: 20001560 Result: Up-regulated in Transcription
  misc_feature: MA Experiment 20001560 PARAMETER Experiment Name: At_Drought_Soil_Dry_P Parameter: Age (day) Value: 28
  misc_feature: MA Experiment 20001560 PARAMETER Experiment Name: At_Drought_Soil_Dry_P Parameter: Organism Value: A. thaliana
  misc_feature: MA Experiment 20001560 PARAMETER Experiment Name: At_Drought_Soil_Dry_P Parameter: Plant Line Value: WS
  misc_feature: MA Experiment 20001560 PARAMETER Experiment Name: At_Drought_Soil_Dry_P Parameter: Post Timepoint (hr) Value: None
  misc_feature: MA Experiment 20001560 PARAMETER Experiment Name: At_Drought_Soil_Dry_P Parameter: Post-Treatment Value: None
  misc_feature: MA Experiment 20001560 PARAMETER Experiment Name: At_Drought_Soil_Dry_P Parameter: Timepoint (day) Value: 14
  misc_feature: MA Experiment 20001560 PARAMETER Experiment Name: At_Drought_Soil_Dry_P Parameter: Treatment Value: Drought vs. No Drought
  misc_feature: MA Experiment ID: 20001911 Result: Down-regulated in Transcription
  misc_feature: MA Experiment 20001911 PARAMETER Experiment Name: At_Drought_Reproduction_P Parameter: Age (day) Value: 40
  misc_feature: MA Experiment 20001911 PARAMETER Experiment Name: At_Drought_Reproduction_P Parameter: Organism Value: A. thaliana
  misc_feature: MA Experiment 20001911 PARAMETER Experiment Name: At_Drought_Reproduction_P Parameter: Plant Line Value: WS
  misc_feature: MA Experiment 20001911 PARAMETER Experiment Name: At_Drought_Reproduction_P Parameter: Timepoint (day) Value: 10
  misc_feature: MA Experiment 20001911 PARAMETER Experiment Name: At_Drought_Reproduction_P Parameter: Tissue Value: Flowers
  misc_feature: MA Experiment 20001911 PARAMETER Experiment Name: At_Drought_Reproduction_P Parameter: Treatment Value: Drought vs. No Drought

SEQ ID NO: 33544 - protein, 453 aa, Arabidopsis thaliana; identical to SEQ ID NO: 29954
  peptide (1)..(453): Ceres Seq. ID no. 12396529
  misc_feature (235)..(337): Pfam Name: Cation efflux family Pfam Description: Cation efflux family
  misc_feature (60)..(258): Homolog of NCBI NO: 30526082 NR Description: putative ZIP-like zinc transporter
  misc_feature (65)..(419): Homolog of NCBI NO: 16304806 NR Description: putative Zn and Cd transporter [Thlaspi
  misc_feature (66)..(418): Homolog of NCBI NO: 28070974 NR Description: putative Zn transporter [Thlaspi caerulescens]
  misc_feature (65)..(453): Homolog of NCBI NO: 7381054 NR Description: Zn and Cd transporter ZNT1 [Thlaspi caerulescens]
  misc_feature (35)..(453): Homolog of NCBI NO: 14582255 NR Description: ZIP-like zinc transporter [Thlaspi caerulescens]
  misc_feature (52)..(453): Homolog of NCBI NO: 30682009 NR Description: metal transporter, putative (ZIP4) [Arabidopsis
  misc_feature (65)..(452): Homolog of NCBI NO: 12006859 NR Description: putative Zn transporter ZNT4 [Thlaspi
  misc_feature (35)..(452): Homolog of NCBI NO: 14582257 NR Description: ZIP-like zinc transporter [Thlaspi caerulescens]
  misc_feature (65)..(453): Homolog of NCBI NO: 21553732 NR Description: putative iron-regulated transporter [Arabidopsis
  misc_feature (35)..(453): Homolog of NCBI NO: 18406954 NR Description: putative iron-regulated transporter

SEQ ID NO: 33545 - protein, 421 aa, Arabidopsis thaliana; identical to SEQ ID NO: 29955
  peptide (1)..(421): Ceres Seq. ID no. 12396530
  misc_feature (203)..(305): Pfam Name: Cation efflux family Pfam Description: Cation efflux family
  misc_feature (28)..(226): Homolog of NCBI NO: 30526082 NR Description: putative ZIP-like zinc transporter
  misc_feature (33)..(387): Homolog of NCBI NO: 16304806 NR Description: putative Zn and Cd transporter [Thlaspi
  misc_feature (34)..(386): Homolog of NCBI NO: 28070974 NR Description: putative Zn transporter [Thlaspi caerulescens]
  misc_feature (33)..(421): Homolog of NCBI NO: 7381054 NR Description: Zn and Cd transporter ZNT1 [Thlaspi caerulescens]
  misc_feature (3)..(421): Homolog of NCBI NO: 14582255 NR Description: ZIP-like zinc transporter [Thlaspi caerulescens]
  misc_feature (20)..(421): Homolog of NCBI NO: 30682009 NR Description: metal transporter, putative (ZIP4) [Arabidopsis
  misc_feature (33)..(420): Homolog of NCBI NO: 12006859 NR Description: putative Zn transporter ZNT4 [Thlaspi
  misc_feature (3)..(420): Homolog of NCBI NO: 14582257 NR Description: ZIP-like zinc transporter [Thlaspi caerulescens]
  misc_feature (33)..(421): Homolog of NCBI NO: 21553732 NR Description: putative iron-regulated transporter [Arabidopsis
  misc_feature (3)..(421): Homolog of NCBI NO: 18406954 NR Description: putative iron-regulated transporter

SEQ ID NO: 33546 - protein, 389 aa, Arabidopsis thaliana; identical to SEQ ID NO: 29956
  peptide (1)..(389): Ceres Seq. ID no. 12396531
  misc_feature (171)..(273): Pfam Name: Cation efflux family Pfam Description: Cation efflux family
  misc_feature (1)..(194): Homolog of NCBI NO: 30526082 NR Description: putative ZIP-like zinc transporter
  misc_feature (1)..(355): Homolog of NCBI NO: 16304806 NR Description: putative Zn and Cd transporter [Thlaspi
  misc_feature (2)..(354): Homolog of NCBI NO: 28070974 NR Description: putative Zn transporter [Thlaspi caerulescens]
  misc_feature (1)..(389): Homolog of NCBI NO: 7381054 NR Description: Zn and Cd transporter ZNT1 [Thlaspi caerulescens]
  misc_feature (1)..(389): Homolog of NCBI NO: 14582255 NR Description: ZIP-like zinc transporter [Thlaspi caerulescens]
  misc_feature (1)..(389): Homolog of NCBI NO: 30682009 NR Description: metal transporter, putative (ZIP4) [Arabidopsis
  misc_feature (1)..(388): Homolog of NCBI NO: 12006859 NR Description: putative Zn transporter ZNT4 [Thlaspi
  misc_feature (1)..(388): Homolog of NCBI NO: 14582257 NR Description: ZIP-like zinc transporter [Thlaspi caerulescens]
  misc_feature (1)..(389): Homolog of NCBI NO: 21553732 NR Description: putative iron-regulated transporter [Arabidopsis
  misc_feature (1)..(389): Homolog of NCBI NO: 18406954 NR Description: putative iron-regulated transporter

SEQ ID NO: 33547 - DNA, 940 bp, Arabidopsis thaliana; identical to SEQ ID NO: 29957
  misc_feature (1)..(940): Ceres Seq. ID no. 12323107
  misc_feature: MA Experiment ID: 108434 Result: Up-regulated in Transcription
  misc_feature: MA Experiment 108434 PARAMETER Experiment Name: At_Root_Tips_cDNA_P Parameter: Tissue Value: Root Tips
  misc_feature: MA Experiment ID: 108435 Result: Up-regulated in Transcription
  misc_feature: MA Experiment 108435 PARAMETER Experiment Name: At_stm_Mutants_cDNA_P Parameter: Plant Line Value: wt Landsburg vs stm
  misc_feature: MA Experiment 108435 PARAMETER Experiment Name: At_stm_Mutants_cDNA_P Parameter: Tissue Value: Shoot Apical Meristem Region
  misc_feature: MA Experiment ID: 108461 Result: Down-regulated in Transcription
  misc_feature: MA Experiment 108461 PARAMETER Experiment Name: At_Germinating_Seeds_cDNA_P Parameter: Age (day) Value: 1 vs. 0
  misc_feature: MA Experiment 108461 PARAMETER Experiment Name: At_Germinating_Seeds_cDNA_P Parameter: Tissue Value: Germinating Seeds
  misc_feature: MA Experiment ID: 108462 Result: Down-regulated in Transcription
  misc_feature: MA Experiment 108462 PARAMETER Experiment Name: At_Germinating_Seeds_cDNA_P Parameter: Age (day) Value: 2 vs. 0
  misc_feature: MA Experiment 108462 PARAMETER Experiment Name: At_Germinating_Seeds_cDNA_P Parameter: Tissue Value: Germinating Seeds
  misc_feature: MA Experiment ID: 108463 Result: Down-regulated in Transcription
  misc_feature: MA Experiment 108463 PARAMETER Experiment Name: At_Germinating_Seeds_cDNA_P Parameter: Age (day) Value: 3 vs. 0
  misc_feature: MA Experiment 108463 PARAMETER Experiment Name: At_Germinating_Seeds_cDNA_P Parameter: Tissue Value: Germinating Seeds
  misc_feature: MA Experiment ID: 108464 Result: Down-regulated in Transcription
  misc_feature: MA Experiment 108464 PARAMETER Experiment Name: At_Germinating_Seeds_cDNA_P Parameter: Age (day) Value: 4 vs. 0
  misc_feature: MA Experiment 108464 PARAMETER Experiment Name: At_Germinating_Seeds_cDNA_P Parameter: Tissue Value: Germinating Seeds
  misc_feature: MA Experiment ID: 108488 Result: Up-regulated in Transcription
  misc_feature: MA Experiment ID: 108489 Result: Up-regulated in Transcription
  misc_feature: MA Experiment ID: 108572 Result: Down-regulated in Transcription
  misc_feature: MA Experiment 108572 PARAMETER Experiment Name: At_Drought_cDNA_P Parameter: Timepoint (hr) Value: 1
  misc_feature: MA Experiment 108572 PARAMETER Experiment Name: At_Drought_cDNA_P Parameter: Tissue Value: Aerial
  misc_feature: MA Experiment 108572 PARAMETER Experiment Name: At_Drought_cDNA_P Parameter: Treatment Value: Drought vs. No Drought
  misc_feature: MA Experiment ID: 108573 Result: Down-regulated in Transcription
  misc_feature: MA Experiment 108573 PARAMETER Experiment Name: At_Drought_cDNA_P Parameter: Timepoint (hr) Value: 6
  misc_feature: MA Experiment 108573 PARAMETER Experiment Name: At_Drought_cDNA_P Parameter: Tissue Value: Aerial
  misc_feature: MA Experiment 108573 PARAMETER Experiment Name: At_Drought_cDNA_P Parameter: Treatment Value: Drought vs. No Drought
  misc_feature: MA Experiment ID: 108579 Result: Up-regulated in Transcription
  misc_feature: MA Experiment 108579 PARAMETER Experiment Name: At_4deg_Cold_cDNA_P Parameter: Temperature (deg C) Value: 4 vs. 22
  misc_feature: MA Experiment 108579 PARAMETER Experiment Name: At_4deg_Cold_cDNA_P Parameter: Timepoint (hr) Value: 6
  misc_feature: MA Experiment 108579 PARAMETER Experiment Name: At_4deg_Cold_cDNA_P Parameter: Tissue Value: Aerial
  misc_feature: MA Experiment ID: 108609 Result: Down-regulated in Transcription
  misc_feature: MA Experiment 108609 PARAMETER Experiment Name: At_100uM_ABA_cDNA_P Parameter: Timepoint (hr) Value: 24
  misc_feature: MA Experiment 108609 PARAMETER Experiment Name: At_100uM_ABA_cDNA_P Parameter: Tissue Value: Aerial
  misc_feature: MA Experiment 108609 PARAMETER Experiment Name: At_100uM_ABA_cDNA_P Parameter: Treatment Value: 100uM ABA vs. No Treatment
  misc_feature: MA Experiment ID: 20000089 Result: Up-regulated in Transcription
  misc_feature: MA Experiment ID: 20000090 Result: Up-regulated in Transcription

SEQ ID NO: 33548 - protein, 126 aa, Arabidopsis thaliana; identical to SEQ ID NO: 29958
  peptide (1)..(126): Ceres Seq. ID no. 12323108
  misc_feature (1)..(97): Homolog of NCBI NO: 30688577 NR Description: histone deacetylase-related protein [Arabidopsis
  misc_feature (1)..(97): Homolog of NCBI NO: 25352191 NR Description: probable histone deacetylase (EC 3.5.1.-)
  misc_feature (1)..(76): Homolog of NCBI NO: 33667906 NR Description: histone deacetylase [Solanum chacoense]

SEQ ID NO: 33549 - protein, 98 aa, Arabidopsis thaliana; identical to SEQ ID NO: 29959
  peptide (1)..(98): Ceres Seq. ID no. 12323109
  misc_feature (71)..(94): Pfam Name: Zinc finger, C2H2 type Pfam Description: Zinc finger, C2H2 type
  misc_feature (1)..(70): Homolog of NCBI NO: 30688577 NR Description: histone deacetylase-related protein [Arabidopsis
  misc_feature (1)..(70): Homolog of NCBI NO: 25352191 NR Description: probable histone deacetylase (EC 3.5.1.-)
  misc_feature (1)..(98): Homolog of NCBI NO: 33667906 NR Description: histone deacetylase [Solanum chacoense]
  misc_feature (1)..(97): Homolog of NCBI NO: 2392769 NR Description: putative histone deacetylase [Arabidopsis
  misc_feature (1)..(98): Homolog of NCBI NO: 18407844 NR Description: putative histone deacetylase

SEQ ID NO: 33550 - DNA, 607 bp, Arabidopsis thaliana; identical to SEQ ID NO: 29960
  misc_feature (1)..(607): Ceres Seq. ID no. 12377317
  misc_feature: MA Experiment ID: 108434 Result: Up-regulated in Transcription
  misc_feature: MA Experiment 108434 PARAMETER Experiment Name: At_Root_Tips_cDNA_P Parameter: Tissue Value: Root Tips
  misc_feature: MA Experiment ID: 108435 Result: Up-regulated in Transcription
  misc_feature: MA Experiment 108435 PARAMETER Experiment Name: At_stm_Mutants_cDNA_P Parameter: Plant Line Value: wt Landsburg vs stm
  misc_feature: MA Experiment 108435 PARAMETER Experiment Name: At_stm_Mutants_cDNA_P Parameter: Tissue Value: Shoot Apical Meristem Region
  misc_feature: MA Experiment ID: 108462 Result: Down-regulated in Transcription
  misc_feature: MA Experiment 108462 PARAMETER Experiment Name: At_Germinating_Seeds_cDNA_P Parameter: Age (day) Value: 2 vs. 0
  misc_feature: MA Experiment 108462 PARAMETER Experiment Name: At_Germinating_Seeds_cDNA_P Parameter: Tissue Value: Germinating Seeds
  misc_feature: MA Experiment ID: 108463 Result: Down-regulated in Transcription
  misc_feature: MA Experiment 108463 PARAMETER Experiment Name: At_Germinating_Seeds_cDNA_P Parameter: Age (day) Value: 3 vs. 0
  misc_feature: MA Experiment 108463 PARAMETER Experiment Name: At_Germinating_Seeds_cDNA_P Parameter: Tissue Value: Germinating Seeds
  misc_feature: MA Experiment ID: 108464 Result: Down-regulated in Transcription
  misc_feature: MA Experiment 108464 PARAMETER Experiment Name: At_Germinating_Seeds_cDNA_P Parameter: Age (day) Value: 4 vs. 0
  misc_feature: MA Experiment 108464 PARAMETER Experiment Name: At_Germinating_Seeds_cDNA_P Parameter: Tissue Value: Germinating Seeds
  misc_feature: MA Experiment ID: 20000224 Result: Down-regulated in Transcription

SEQ ID NO: 33551 - protein, 112 aa, Arabidopsis thaliana; identical to SEQ ID NO: 29961
  peptide (1)..(112): Ceres Seq. ID no. 12377318
  misc_feature (22)..(111): Pfam Name: 60s Acidic ribosomal protein Pfam Description: 60s Acidic ribosomal protein
  misc_feature (1)..(112): Homolog of NCBI NO: 18253043 NR Description: 60S acidic ribosomal protein P1 [Spodoptera
  misc_feature (1)..(112): Homolog of NCBI NO: 25150244 NR Description: 60S Ribosomal Protein, Acidic 1
  misc_feature (5)..(112): Homolog of NCBI NO: 1710590 NR Description: 60S ACIDIC RIBOSOMAL PROTEIN P1 (L12)
  misc_feature (5)..(112): Homolog of NCBI NO: 7440759 NR Description: acidic ribosomal protein P1a - maize
  misc_feature (1)..(112): Homolog of NCBI NO: 6094103 NR Description: 60S acidic ribosomal protein P1
  misc_feature (1)..(112): Homolog of NCBI NO: 18411448 NR Description: acidic ribosomal protein p1
  misc_feature (1)..(112): Homolog of NCBI NO: 21553441 NR Description: 60S acidic ribosomal protein P1-like protein
  misc_feature (1)..(112): Homolog of NCBI NO: 15238170 NR Description: 60S acidic ribosomal protein P1-like protein
  misc_feature (1)..(112): Homolog of NCBI NO: 21592477 NR Description: acidic ribosomal protein, putative [Arabidopsis
  misc_feature (1)..(112): Homolog of NCBI NO: 15223303 NR Description: acidic ribosomal protein, putative

SEQ ID NO: 33552 - protein, 99 aa, Arabidopsis thaliana; identical to SEQ ID NO: 29962
  peptide (1)..(99): Ceres Seq. ID no. 12377319
  misc_feature (9)..(98): Pfam Name: 60s Acidic ribosomal protein Pfam Description: 60s Acidic ribosomal protein
  misc_feature (1)..(99): Homolog of NCBI NO: 18253043 NR Description: 60S acidic ribosomal protein P1 [Spodoptera
  misc_feature (1)..(99): Homolog of NCBI NO: 25150244 NR Description: 60S Ribosomal Protein, Acidic 1
  misc_feature (1)..(99): Homolog of NCBI NO: 1710590 NR Description: 60S ACIDIC RIBOSOMAL PROTEIN P1 (L12)
  misc_feature (1)..(99): Homolog of NCBI NO: 7440759 NR Description: acidic ribosomal protein P1a - maize
  misc_feature (1)..(99): Homolog of NCBI NO: 6094103 NR Description: 60S acidic ribosomal protein P1
  misc_feature (1)..(99): Homolog of NCBI NO: 18411448 NR Description: acidic ribosomal protein p1
  misc_feature (1)..(99): Homolog of NCBI NO: 21553441 NR Description: 60S acidic ribosomal protein P1-like protein
  misc_feature (1)..(99): Homolog of NCBI NO: 15238170 NR Description: 60S acidic ribosomal protein P1-like protein
  misc_feature (1)..(99): Homolog of NCBI NO: 21592477 NR Description: acidic ribosomal protein, putative [Arabidopsis
  misc_feature (1)..(99): Homolog of NCBI NO: 15223303 NR Description: acidic ribosomal protein, putative

SEQ ID NO: 33553 - protein, 68 aa, Arabidopsis thaliana; identical to SEQ ID NO: 29963
  peptide (1)..(68): Ceres Seq. ID no. 12377320
  misc_feature (1)..(67): Pfam Name: 60s Acidic ribosomal protein Pfam Description: 60s Acidic ribosomal protein
  misc_feature (1)..(68): Homolog of NCBI NO: 18253043 NR Description: 60S acidic ribosomal protein P1 [Spodoptera
  misc_feature (1)..(68): Homolog of NCBI NO: 25150244 NR Description: 60S Ribosomal Protein, Acidic 1
  misc_feature (1)..(68): Homolog of NCBI NO: 1710590 NR Description: 60S ACIDIC RIBOSOMAL PROTEIN P1 (L12)
  misc_feature (1)..(68): Homolog of NCBI NO: 7440759 NR Description: acidic ribosomal protein P1a - maize
  misc_feature (1)..(68): Homolog of NCBI NO: 6094103 NR Description: 60S acidic ribosomal protein P1
  misc_feature (1)..(68): Homolog of NCBI NO: 18411448 NR Description: acidic ribosomal protein p1
  misc_feature (1)..(68): Homolog of NCBI NO: 21553441 NR Description: 60S acidic ribosomal protein P1-like protein
  misc_feature (1)..(68): Homolog of NCBI NO: 15238170 NR Description: 60S acidic ribosomal protein P1-like protein
  misc_feature (1)..(68): Homolog of NCBI NO: 21592477 NR Description: acidic ribosomal protein, putative [Arabidopsis
  misc_feature (1)..(68): Homolog of NCBI NO: 15223303 NR Description: acidic ribosomal protein, putative

SEQ ID NO: 33554 - DNA, 1562 bp, Arabidopsis thaliana; identical to SEQ ID NO: 29964
  misc_feature (1)..(1562): Ceres Seq. ID no. 12439764
  misc_feature: MA Experiment ID: 20000224 Result: Down-regulated in Transcription

SEQ ID NO: 33555 - protein, 423 aa, Arabidopsis thaliana; identical to SEQ ID NO: 29965
  peptide (1)..(423): Ceres Seq. ID no. 12439765
  misc_feature (204)..(349): Pfam Name: HhH-GPD superfamily base excision DNA repair protein Pfam Description: HhH-GPD superfamily base excision DNA repair
  misc_feature (204)..(349): Pfam Name: HhH-GPD superfamily base excision DNA repair protein Pfam Description: HhH-GPD superfamily base excision DNA repair
  misc_feature (167)..(360): Homolog of NCBI NO: 22971879 NR Description: hypothetical protein [Chloroflexus aurantiacus]
  misc_feature (167)..(363): Homolog of NCBI NO: 37521587 NR Description: probable DNA-3-methyladenine glycosylase
  misc_feature (160)..(361): Homolog of NCBI NO: 23116389 NR Description: hypothetical protein [Desulfitobacterium
  misc_feature (138)..(367): Homolog of NCBI NO: 15230333 NR Description: putative DNA-3-methyladenine glycosidase; protein
  misc_feature (87)..(418): Homolog of NCBI NO: 5091600 NR Description: This gene is a member of PF|01332 Alkylbase DNA
  misc_feature (167)..(360): Homolog of NCBI NO: 22971879 NR Description: hypothetical protein [Chloroflexus aurantiacus]
  misc_feature (160)..(361): Homolog of NCBI NO: 23116389 NR Description: hypothetical protein [Desulfitobacterium
  misc_feature (87)..(418): Homolog of NCBI NO: 5091600 NR Description: This gene is a member of PF|01332 Alkylbase DNA
  misc_feature (33)..(423): Homolog of NCBI NO: 18410802 NR Description: 3-methyladenine DNA glycosylase, putative
  misc_feature (33)..(418): Homolog of NCBI NO: 25406423 NR Description: hypothetical protein F22H5.5 [imported] -
  misc_feature (33)..(423): Homolog of NCBI NO: 18394744 NR Description: Expressed protein
  misc_feature (33)..(423): Homolog of NCBI NO: 21593178 NR Description: unknown [Arabidopsis thaliana]
  misc_feature (33)..(423): Homolog of NCBI NO: 25402893 NR Description: protein F18O14.25 [imported] - Arabidopsis
  misc_feature (138)..(367): Homolog of NCBI NO: 15230333 NR Description: putative DNA-3-methyladenine glycosidase; protein
  misc_feature (167)..(363): Homolog of NCBI NO: 37521587 NR Description: probable DNA-3-methyladenine glycosylase
  misc_feature (33)..(423): Homolog of NCBI NO: 25402893 NR Description: protein F18O14.25 [imported] - Arabidopsis
  misc_feature (33)..(423): Homolog of NCBI NO: 21593178 NR Description: unknown [Arabidopsis thaliana]
  misc_feature (33)..(423): Homolog of NCBI NO: 18394744 NR Description: Expressed protein
  misc_feature (33)..(418): Homolog of NCBI NO: 25406423 NR Description: hypothetical protein F22H5.5 [imported] -
  misc_feature (33)..(423): Homolog of NCBI NO: 18410802 NR Description: 3-methyladenine DNA glycosylase, putative

SEQ ID NO: 33556 - protein, 391 aa, Arabidopsis thaliana; identical to SEQ ID NO: 29966
  peptide (1)..(391): Ceres Seq. ID no. 12439766
  misc_feature (172)..(317): Pfam Name: HhH-GPD superfamily base excision DNA repair protein Pfam Description: HhH-GPD superfamily base excision DNA repair
  misc_feature (172)..(317): Pfam Name: HhH-GPD superfamily base excision DNA repair protein Pfam Description: HhH-GPD superfamily base excision DNA repair
  misc_feature (135)..(328): Homolog of NCBI NO: 22971879 NR Description: hypothetical protein [Chloroflexus aurantiacus]
  misc_feature (135)..(331): Homolog of NCBI NO: 37521587 NR Description: probable DNA-3-methyladenine glycosylase
  misc_feature (128)..(329): Homolog of NCBI NO: 23116389 NR Description: hypothetical protein [Desulfitobacterium
  misc_feature (106)..(335): Homolog of NCBI NO: 15230333 NR Description: putative DNA-3-methyladenine glycosidase; protein
  misc_feature (55)..(386): Homolog of NCBI NO: 5091600 NR Description: This gene is a member of PF|01332 Alkylbase DNA
  misc_feature (135)..(328): Homolog of NCBI NO: 22971879 NR Description: hypothetical protein [Chloroflexus aurantiacus]
  misc_feature (128)..(329): Homolog of NCBI NO: 23116389 NR Description: hypothetical protein [Desulfitobacterium
  misc_feature (55)..(386): Homolog of NCBI NO: 5091600 NR Description: This gene is a member of PF|01332 Alkylbase DNA
  misc_feature (1)..(391): Homolog of NCBI NO: 18410802 NR Description: 3-methyladenine DNA glycosylase, putative
  misc_feature (1)..(386): Homolog of NCBI NO: 25406423 NR Description: hypothetical protein F22H5.5 [imported] -
  misc_feature (1)..(391): Homolog of NCBI NO: 18394744 NR Description: Expressed protein
  misc_feature (1)..(391): Homolog of NCBI NO: 21593178 NR Description: unknown [Arabidopsis thaliana]
  misc_feature (1)..(391): Homolog of NCBI NO: 25402893 NR Description: protein F18O14.25 [imported] - Arabidopsis
  misc_feature (106)..(335): Homolog of NCBI NO: 15230333 NR Description: putative DNA-3-methyladenine glycosidase; protein
  misc_feature (135)..(331): Homolog of NCBI NO: 37521587 NR Description: probable DNA-3-methyladenine glycosylase
  misc_feature (1)..(391): Homolog of NCBI NO: 25402893 NR Description: protein F18O14.25 [imported] - Arabidopsis
  misc_feature (1)..(391): Homolog of NCBI NO: 21593178 NR Description: unknown [Arabidopsis thaliana]
  misc_feature (1)..(391): Homolog of NCBI NO: 18394744 NR Description: Expressed protein
  misc_feature (1)..(386): Homolog of NCBI NO: 25406423 NR Description: hypothetical protein F22H5.5 [imported] -
  misc_feature (1)..(391): Homolog of NCBI NO: 18410802 NR Description: 3-methyladenine DNA glycosylase, putative

SEQ ID NO: 33557 - protein, 290 aa, Arabidopsis thaliana; identical to SEQ ID NO: 29967
  peptide (1)..(290): Ceres Seq. ID no. 12439767
  misc_feature (71)..(216): Pfam Name: HhH-GPD superfamily base excision DNA repair protein Pfam Description: HhH-GPD superfamily base excision DNA repair
  misc_feature (71)..(216): Pfam Name: HhH-GPD superfamily base excision DNA repair protein Pfam Description: HhH-GPD superfamily base excision DNA repair
  misc_feature (34)..(227): Homolog of NCBI NO: 22971879 NR Description: hypothetical protein [Chloroflexus aurantiacus]
  misc_feature (34)..(230): Homolog of NCBI NO: 37521587 NR Description: probable DNA-3-methyladenine glycosylase
  misc_feature (27)..(228): Homolog of NCBI NO: 23116389 NR Description: hypothetical protein [Desulfitobacterium
  misc_feature (5)..(234): Homolog of NCBI NO: 15230333 NR Description: putative DNA-3-methyladenine glycosidase; protein
  misc_feature (1)..(285): Homolog of NCBI NO: 5091600 NR Description: This gene is a member of PF|01332 Alkylbase DNA
  misc_feature (34)..(227): Homolog of NCBI NO: 22971879 NR Description: hypothetical protein [Chloroflexus aurantiacus]
  misc_feature (27)..(228): Homolog of NCBI NO: 23116389 NR Description: hypothetical protein [Desulfitobacterium
  misc_feature (1)..(285): Homolog of NCBI NO: 5091600 NR Description: This gene is a member of PF|01332 Alkylbase DNA
  misc_feature (1)..(290): Homolog of NCBI NO: 18410802 NR Description: 3-methyladenine DNA glycosylase, putative
  misc_feature (1)..(285): Homolog of NCBI NO: 25406423 NR Description: hypothetical protein F22H5.5 [imported] -
  misc_feature (1)..(290): Homolog of NCBI NO: 18394744 NR Description: Expressed protein
  misc_feature (1)..(290): Homolog of NCBI NO: 21593178 NR Description: unknown [Arabidopsis thaliana]
  misc_feature (1)..(290): Homolog of NCBI NO: 25402893 NR Description: protein F18O14.25 [imported] - Arabidopsis
  misc_feature (5)..(234): Homolog of NCBI NO: 15230333 NR Description: putative DNA-3-methyladenine glycosidase; protein
  misc_feature (34)..(230): Homolog of NCBI NO: 37521587 NR Description: probable DNA-3-methyladenine glycosylase
  misc_feature (1)..(290): Homolog of NCBI NO: 25402893 NR Description: protein F18O14.25 [imported] - Arabidopsis
  misc_feature (1)..(290): Homolog of NCBI NO: 21593178 NR Description: unknown [Arabidopsis thaliana]
  misc_feature (1)..(290): Homolog of NCBI NO: 18394744 NR Description: Expressed protein
  misc_feature (1)..(285): Homolog of NCBI NO: 25406423 NR Description: hypothetical protein F22H5.5 [imported] -
  misc_feature (1)..(290): Homolog of NCBI NO: 18410802 NR Description: 3-methyladenine DNA glycosylase, putative

SEQ ID NO: 33558 - DNA, 868 bp, Arabidopsis thaliana; identical to SEQ ID NO: 29968
  misc_feature (1)..(868): Ceres Seq. ID no. 13487046
  misc_feature: MA Experiment ID: 20000794 Result: Up-regulated in Transcription
  misc_feature: MA Experiment 20000794 PARAMETER Experiment Name: At_Petals_P Parameter: Age (day) Value: 23-25 days
  misc_feature: MA Experiment 20000794 PARAMETER Experiment Name: At_Petals_P Parameter: Plant Line Value: WS
  misc_feature: MA Experiment 20000794 PARAMETER Experiment Name: At_Petals_P Parameter: Tissue Value: Petals vs. Whole plant

SEQ ID NO: 33559 - protein, 203 aa, Arabidopsis thaliana; identical to SEQ ID NO: 29969
  peptide (1)..(203): Ceres Seq. ID no. 13487047
  misc_feature (9)..(179): Pfam Name: SNF7 Pfam Description: SNF7
  misc_feature (1)..(200): Homolog of NCBI NO: 39644911 NR Description: CHMP1.5 protein [Homo sapiens]
  misc_feature (1)..(200): Homolog of NCBI NO: 17933108 NR Description: C18orf2 [Homo sapiens]
  misc_feature (9)..(202): Homolog of NCBI NO: 3789911 NR Description: developmental protein DG1118 [Dictyostelium
  misc_feature (1)..(203): Homolog of NCBI NO: 29367557 NR Description: development protein-like protein
  misc_feature (1)..(203): Homolog of NCBI NO: 30270581 NR Description: superal1 [Zea mays]
  misc_feature (1)..(203): Homolog of NCBI NO: 28916459 NR Description: putative developmental protein [Nicotiana
  misc_feature (1)..(203): Homolog of NCBI NO: 21537090 NR Description: developmental protein, putative [Arabidopsis
  misc_feature (1)..(203): Homolog of NCBI NO: 18410249 NR Description: developmental protein DG1118 -related
  misc_feature (1)..(202): Homolog of NCBI NO: 25518422 NR Description: hypothetical protein F11A6.7 - Arabidopsis
  misc_feature (1)..(203): Homolog of NCBI NO: 15220819 NR Description: developmental protein -related [Arabidopsis

SEQ ID NO: 33560 - protein, 196 aa, Arabidopsis thaliana; identical to SEQ ID NO: 29970
  peptide (1)..(196): Ceres Seq. ID no. 13487048
  misc_feature (2)..(172): Pfam Name: SNF7 Pfam Description: SNF7
  misc_feature (1)..(193): Homolog of NCBI NO: 39644911 NR Description: CHMP1.5 protein [Homo sapiens]
  misc_feature (1)..(193): Homolog of NCBI NO: 17933108 NR Description: C18orf2 [Homo sapiens]
  misc_feature (2)..(195): Homolog of NCBI NO: 3789911 NR Description: developmental protein DG1118 [Dictyostelium
  misc_feature (1)..(196): Homolog of NCBI NO: 29367557 NR Description: development protein-like protein
  misc_feature (1)..(196): Homolog of NCBI NO: 30270581 NR Description: superal1 [Zea mays]
  misc_feature (1)..(196): Homolog of NCBI NO: 28916459 NR Description: putative developmental protein [Nicotiana
  misc_feature (1)..(196): Homolog of NCBI NO: 21537090 NR Description: developmental protein, putative [Arabidopsis
  misc_feature (1)..(196): Homolog of NCBI NO: 18410249 NR Description: developmental protein DG1118 -related
  misc_feature (1)..(195): Homolog of NCBI NO: 25518422 NR Description: hypothetical protein F11A6.7 - Arabidopsis
  misc_feature (1)..(196): Homolog of NCBI NO: 15220819 NR Description: developmental protein -related [Arabidopsis

SEQ ID NO: 33561 - protein, 156 aa, Arabidopsis thaliana; identical to SEQ ID NO: 29971
  peptide (1)..(156): Ceres Seq. ID no. 13487049
  misc_feature (1)..(132): Pfam Name: SNF7 Pfam Description: SNF7
  misc_feature (1)..(153): Homolog of NCBI NO: 39644911 NR Description: CHMP1.5 protein [Homo sapiens]
  misc_feature (1)..(153): Homolog of NCBI NO: 17933108 NR Description: C18orf2 [Homo sapiens]
  misc_feature (1)..(155): Homolog of NCBI NO: 3789911 NR Description: developmental protein DG1118 [Dictyostelium
  misc_feature (1)..(156): Homolog of NCBI NO: 29367557 NR Description: development protein-like protein
  misc_feature (1)..(156): Homolog of NCBI NO: 30270581 NR Description: superal1 [Zea mays]
  misc_feature (1)..(156): Homolog of NCBI NO: 28916459 NR Description: putative developmental protein [Nicotiana
  misc_feature (1)..(156): Homolog of NCBI NO: 21537090 NR Description: developmental protein, putative [Arabidopsis
  misc_feature (1)..(156): Homolog of NCBI NO: 18410249 NR Description: developmental protein DG1118 -related
  misc_feature (1)..(155): Homolog of NCBI NO: 25518422 NR Description: hypothetical protein F11A6.7 - Arabidopsis
  misc_feature (1)..(156): Homolog of NCBI NO: 15220819 NR Description: developmental protein -related [Arabidopsis

SEQ ID NO: 33562 - DNA, 1566 bp, Arabidopsis thaliana; identical to SEQ ID NO: 29972
  misc_feature (1)..(1566): Ceres Seq. ID no. 13492623
  misc_feature: MA Experiment ID: 108462 Result: Up-regulated in Transcription
  misc_feature: MA Experiment 108462 PARAMETER Experiment Name: At_Germinating_Seeds_cDNA_P Parameter: Age (day) Value: 2 vs. 0
  misc_feature: MA Experiment 108462 PARAMETER Experiment Name: At_Germinating_Seeds_cDNA_P Parameter: Tissue Value: Germinating Seeds
  misc_feature: MA Experiment ID: 108464 Result: Up-regulated in Transcription
  misc_feature: MA Experiment 108464 PARAMETER Experiment Name: At_Germinating_Seeds_cDNA_P Parameter: Age (day) Value: 4 vs. 0
  misc_feature: MA Experiment 108464 PARAMETER Experiment Name: At_Germinating_Seeds_cDNA_P Parameter: Tissue Value: Germinating Seeds
  misc_feature: MA Experiment ID: 108573 Result: Up-regulated in Transcription
  misc_feature: MA Experiment 108573 PARAMETER Experiment Name: At_Drought_cDNA_P Parameter: Timepoint (hr) Value: 6
  misc_feature: MA Experiment 108573 PARAMETER Experiment Name: At_Drought_cDNA_P Parameter: Tissue Value: Aerial
  misc_feature: MA Experiment 108573 PARAMETER Experiment Name: At_Drought_cDNA_P Parameter: Treatment Value: Drought vs. No Drought
  misc_feature: MA Experiment ID: 108595 Result: Down-regulated in Transcription
  misc_feature: MA Experiment 108595 PARAMETER Experiment Name: At_Ler-pi_Ovule_cDNA_P Parameter: Plant Line Value: null
  misc_feature: MA Experiment ID: 20000111 Result: Down-regulated in Transcription
  misc_feature: MA Experiment 20000111 PARAMETER Experiment Name: At_42deg_Heat_cDNA_P Parameter: Temperature (deg C) Value: 42 vs. 22
  misc_feature: MA Experiment 20000111 PARAMETER Experiment Name: At_42deg_Heat_cDNA_P Parameter: Timepoint (hr) Value: 6
  misc_feature: MA Experiment 20000111 PARAMETER Experiment Name: At_42deg_Heat_cDNA_P Parameter: Tissue Value: Aerial
  misc_feature: MA Experiment ID: 20000113 Result: Down-regulated in Transcription
  misc_feature: MA Experiment 20000113 PARAMETER Experiment Name: At_42deg_Heat_cDNA_P Parameter: Temperature (deg C) Value: 42 vs. 22
  misc_feature: MA Experiment 20000113 PARAMETER Experiment Name: At_42deg_Heat_cDNA_P Parameter: Timepoint (hr) Value: 8
  misc_feature: MA Experiment 20000113 PARAMETER Experiment Name: At_42deg_Heat_cDNA_P Parameter: Tissue Value: Aerial
  misc_feature: MA Experiment ID: 20000173 Result: Down-regulated in Transcription
  misc_feature: MA Experiment 20000173 PARAMETER Experiment Name: At_42deg_Heat_P Parameter: Age (day) Value: 14
  misc_feature: MA Experiment 20000173 PARAMETER Experiment Name: At_42deg_Heat_P Parameter: Organism Value: A. thaliana
  misc_feature: MA Experiment 20000173 PARAMETER Experiment Name: At_42deg_Heat_P Parameter: Plant Line Value: WS
  misc_feature: MA Experiment 20000173 PARAMETER Experiment Name: At_42deg_Heat_P Parameter: Temperature (deg C) Value: 42 vs. 22
  misc_feature: MA Experiment 20000173 PARAMETER Experiment Name: At_42deg_Heat_P Parameter: Timepoint (hr) Value: 6
  misc_feature: MA Experiment 20000173 PARAMETER Experiment Name: At_42deg_Heat_P Parameter: Tissue Value: Aerial
  misc_feature: MA Experiment ID: 20000184 Result: Down-regulated in Transcription
  misc_feature: MA Experiment 20000184 PARAMETER Experiment Name: At_Shoots__P Parameter: Age (day) Value: 7
  misc_feature: MA Experiment 20000184 PARAMETER Experiment Name: At_Shoots__P Parameter: Tissue Value: Shoots vs. Whole Plant
  misc_feature: MA Experiment ID: 20000437 Result: Up-regulated in Transcription
  misc_feature: MA Experiment 20000437 PARAMETER Experiment Name: At_Drought_P Parameter: Age (day) Value: 8
  misc_feature: MA Experiment 20000437 PARAMETER Experiment Name: At_Drought_P Parameter: Organism Value: A. thaliana
  misc_feature: MA Experiment 20000437 PARAMETER Experiment Name: At_Drought_P Parameter: Plant Line Value: WS
  misc_feature: MA Experiment 20000437 PARAMETER Experiment Name: At_Drought_P Parameter: Timepoint (hr) Value: 24
  misc_feature: MA Experiment 20000437 PARAMETER Experiment Name: At_Drought_P Parameter: Tissue Value: Whole Plant
  misc_feature: MA Experiment 20000437 PARAMETER Experiment Name: At_Drought_P Parameter: Treatment Value: Drought vs. No Drought
  misc_feature: MA Experiment ID: 20000794 Result: Up-regulated in Transcription
  misc_feature: MA Experiment 20000794 PARAMETER Experiment Name: At_Petals_P Parameter: Age (day) Value: 23-25 days
  misc_feature: MA Experiment 20000794 PARAMETER Experiment Name: At_Petals_P Parameter: Plant Line Value: WS
  misc_feature: MA Experiment 20000794 PARAMETER Experiment Name: At_Petals_P Parameter: Tissue Value: Petals vs. Whole plant

SEQ ID NO: 33563 - protein, 432 aa, Arabidopsis thaliana; identical to SEQ ID NO: 29973
  peptide (1)..(432): Ceres Seq. ID no. 13492624
  misc_feature (177)..(223): Pfam Name: BSD domain Pfam Description: BSD domain
  misc_feature (177)..(402): Homolog of NCBI NO: 6573740 NR Description: F20B24.15 [Arabidopsis thaliana]
  misc_feature (32)..(402): Homolog of NCBI NO: 18391195 NR Description: expressed protein [Arabidopsis thaliana]
  misc_feature (32)..(402): Homolog of NCBI NO: 21555533 NR Description: unknown [Arabidopsis thaliana]
  misc_feature (1)..(407): Homolog of NCBI NO: 34909848 NR Description: OSJNBb0053G03.5 [Oryza sativa (japonica
  misc_feature (26)..(148): Homolog of NCBI NO: 28273391 NR Description: putative BSD domain containing protein
  misc_feature (133)..(383): Homolog of NCBI NO: 28273391 NR Description: putative BSD domain containing protein
  misc_feature (26)..(394): Homolog of NCBI NO: 15229611 NR Description: expressed protein [Arabidopsis thaliana]
  misc_feature (1)..(176): Homolog of NCBI NO: 7486518 NR Description: hypothetical protein F6H11.10 - Arabidopsis
  misc_feature (173)..(432): Homolog of NCBI NO: 7486518 NR Description: hypothetical protein F6H11.10 - Arabidopsis
  misc_feature (1)..(432): Homolog of NCBI NO: 18425006 NR Description: expressed protein [Arabidopsis thaliana]

SEQ ID NO: 33564 - protein, 275 aa, Arabidopsis thaliana; identical to SEQ ID NO: 29974
  peptide (1)..(275): Ceres Seq. ID no. 13492625
  misc_feature (20)..(66): Pfam Name: BSD domain Pfam Description: BSD domain
  misc_feature (1)..(15): Homolog of NCBI NO: 6573740 NR Description: F20B24.15 [Arabidopsis thaliana]
  misc_feature (20)..(245): Homolog of NCBI NO: 6573740 NR Description: F20B24.15 [Arabidopsis thaliana]
  misc_feature (1)..(245): Homolog of NCBI NO: 18391195 NR Description: expressed protein [Arabidopsis thaliana]
  misc_feature (1)..(245): Homolog of NCBI NO: 21555533 NR Description: unknown [Arabidopsis thaliana]
  misc_feature (1)..(250): Homolog of NCBI NO: 34909848 NR Description: OSJNBb0053G03.5 [Oryza sativa (japonica
  misc_feature (1)..(226): Homolog of NCBI NO: 28273391 NR Description: putative BSD domain containing protein
  misc_feature (1)..(237): Homolog of NCBI NO: 15229611 NR Description: expressed protein [Arabidopsis thaliana]
  misc_feature (1)..(19): Homolog of NCBI NO: 7486518 NR Description: hypothetical protein F6H11.10 - Arabidopsis
  misc_feature (16)..(275): Homolog of NCBI NO: 7486518 NR Description: hypothetical protein F6H11.10 - Arabidopsis
  misc_feature (1)..(275): Homolog of NCBI NO: 18425006 NR Description: expressed protein [Arabidopsis thaliana]

SEQ ID NO: 33565 - protein, 223 aa, Arabidopsis thaliana; identical to SEQ ID NO: 29975
  peptide (1)..(223): Ceres Seq. ID no. 13492626
  misc_feature (1)..(127): Homolog of NCBI NO: 18396945 NR Description: expressed protein [Arabidopsis thaliana]
  misc_feature (1)..(127): Homolog of NCBI NO: 21592796 NR Description: unknown [Arabidopsis thaliana]
  misc_feature (1)..(193): Homolog of NCBI NO: 6573740 NR Description: F20B24.15 [Arabidopsis thaliana]
  misc_feature (1)..(193): Homolog of NCBI NO: 18391195 NR Description: expressed protein [Arabidopsis thaliana]
  misc_feature (1)..(193): Homolog of NCBI NO: 21555533 NR Description: unknown [Arabidopsis thaliana]
  misc_feature (1)..(198): Homolog of NCBI NO: 34909848 NR Description: OSJNBb0053G03.5 [Oryza sativa (japonica
  misc_feature (1)..(174): Homolog of NCBI NO: 28273391 NR Description: putative BSD domain containing protein
  misc_feature (1)..(185): Homolog of NCBI NO: 15229611 NR Description: expressed protein [Arabidopsis thaliana]
  misc_feature (1)..(223): Homolog of NCBI NO: 7486518 NR Description: hypothetical protein F6H11.10 - Arabidopsis
  misc_feature (1)..(223): Homolog of NCBI NO: 18425006 NR Description: expressed protein [Arabidopsis thaliana]

SEQ ID NO: 33566 - DNA, 862 bp, Arabidopsis thaliana; identical to SEQ ID NO: 29976
  misc_feature (1)..(862): Ceres Seq. ID no. 12332832
  misc_feature: MA Experiment ID: 108488 Result: Down-regulated in Transcription

SEQ ID NO: 33567 - protein, 188 aa, Arabidopsis thaliana; identical to SEQ ID NO: 29977
  peptide (1)..(188): Ceres Seq. ID no. 12332833
  misc_feature (45)..(185): Homolog of NCBI NO: 25326240 NR Description: protein F26F24.10 [imported] - Arabidopsis
  misc_feature (54)..(185): Homolog of NCBI NO: 13324790 NR Description: putative DNA-binding protein [Oryza sativa]
  misc_feature (45)..(185): Homolog of NCBI NO: 18409647 NR Description: E2, ubiquitin-conjugating enzyme, putative
  misc_feature (45)..(185): Homolog of NCBI NO: 21593918 NR Description: E2, ubiquitin-conjugating enzyme, putative
  misc_feature (45)..(185): Homolog of NCBI NO: 18395221 NR Description: E2, ubiquitin-conjugating enzyme, putative
  misc_feature (49)..(188): Homolog of NCBI NO: 2982253 NR Description: CROC-1-like protein [Picea mariana]
  misc_feature (43)..(188): Homolog of NCBI NO: 30686662 NR Description: ubiquitin-conjugating enzyme family [Arabidopsis
  misc_feature (43)..(188): Homolog of NCBI NO: 18404032 NR Description: E2, ubiquitin-conjugating enzyme, putative
  misc_feature (43)..(188): Homolog of NCBI NO: 30693656 NR Description: ubiquitin-conjugating enzyme family [Arabidopsis
  misc_feature (43)..(188): Homolog of NCBI NO: 18409633 NR Description: E2, ubiquitin-conjugating enzyme, putative

SEQ ID NO: 33568 - protein, 146 aa, Arabidopsis thaliana; identical to SEQ ID NO: 29978
  peptide (1)..(146): Ceres Seq. ID no. 12332834
  misc_feature (3)..(143): Homolog of NCBI NO: 25326240 NR Description: protein F26F24.10 [imported] - Arabidopsis
  misc_feature (12)..(143): Homolog of NCBI NO: 13324790 NR Description: putative DNA-binding protein [Oryza sativa]
  misc_feature (3)..(143): Homolog of NCBI NO: 18409647 NR Description: E2, ubiquitin-conjugating enzyme, putative
  misc_feature (3)..(143): Homolog of NCBI NO: 21593918 NR Description: E2, ubiquitin-conjugating enzyme, putative
  misc_feature (3)..(143): Homolog of NCBI NO: 18395221 NR Description: E2, ubiquitin-conjugating enzyme, putative
  misc_feature (7)..(146): Homolog of NCBI NO: 2982253 NR Description: CROC-1-like protein [Picea mariana]
  misc_feature (1)..(146): Homolog of NCBI NO: 30686662 NR Description: ubiquitin-conjugating enzyme family [Arabidopsis
  misc_feature (1)..(146): Homolog of NCBI NO: 18404032 NR Description: E2, ubiquitin-conjugating enzyme, putative
  misc_feature (1)..(146): Homolog of NCBI NO: 30693656 NR Description: ubiquitin-conjugating enzyme family [Arabidopsis
  misc_feature (1)..(146): Homolog of NCBI NO: 18409633 NR Description: E2, ubiquitin-conjugating enzyme, putative

SEQ ID NO: 33569 - protein, 109 aa, Arabidopsis thaliana; identical to SEQ ID NO: 29979
  peptide (1)..(109): Ceres Seq. ID no. 12332835
  misc_feature (1)..(106): Homolog of NCBI NO: 25326240 NR Description: protein F26F24.10 [imported] - Arabidopsis
  misc_feature (1)..(106): Homolog of NCBI NO: 13324790 NR Description: putative DNA-binding protein [Oryza sativa]
  misc_feature (1)..(106): Homolog of NCBI NO: 18409647 NR Description: E2, ubiquitin-conjugating enzyme, putative
  misc_feature (1)..(106): Homolog of NCBI NO: 21593918 NR Description: E2, ubiquitin-conjugating enzyme, putative
  misc_feature (1)..(106): Homolog of NCBI NO: 18395221 NR Description: E2, ubiquitin-conjugating enzyme, putative
  misc_feature (1)..(109): Homolog of NCBI NO: 2982253 NR Description: CROC-1-like protein [Picea mariana]
  misc_feature (1)..(109): Homolog of NCBI NO: 30686662 NR Description: ubiquitin-conjugating enzyme family [Arabidopsis
  misc_feature (1)..(109): Homolog of NCBI NO: 18404032 NR Description: E2, ubiquitin-conjugating enzyme, putative
  misc_feature (1)..(109): Homolog of NCBI NO: 30693656 NR Description: ubiquitin-conjugating enzyme family [Arabidopsis
  misc_feature (1)..(109): Homolog of NCBI NO: 18409633 NR Description: E2, ubiquitin-conjugating enzyme, putative

SEQ ID NO: 33570 - DNA, 1592 bp, Arabidopsis thaliana; identical to SEQ ID NO: 29980
  misc_feature (1)..(1592): Ceres Seq. ID no. 13488446
  misc_feature: MA Experiment ID: 108461 Result: Down-regulated in Transcription
  misc_feature: MA Experiment 108461 PARAMETER Experiment Name: At_Germinating_Seeds_cDNA_P Parameter: Age (day) Value: 1 vs. 0
  misc_feature: MA Experiment 108461 PARAMETER Experiment Name: At_Germinating_Seeds_cDNA_P Parameter: Tissue Value: Germinating Seeds
  misc_feature: MA Experiment ID: 108462 Result: Down-regulated in Transcription
  misc_feature: MA Experiment 108462 PARAMETER Experiment Name: At_Germinating_Seeds_cDNA_P Parameter: Age (day) Value: 2 vs. 0
  misc_feature: MA Experiment 108462 PARAMETER Experiment Name: At_Germinating_Seeds_cDNA_P Parameter: Tissue Value: Germinating Seeds
  misc_feature: MA Experiment ID: 108463 Result: Down-regulated in Transcription
  misc_feature: MA Experiment 108463 PARAMETER Experiment Name: At_Germinating_Seeds_cDNA_P Parameter: Age (day) Value: 3 vs. 0
  misc_feature: MA Experiment 108463 PARAMETER Experiment Name: At_Germinating_Seeds_cDNA_P Parameter: Tissue Value: Germinating Seeds
  misc_feature: MA Experiment ID: 108585 Result: Up-regulated in Transcription
  misc_feature: MA Experiment 108585 PARAMETER Experiment Name: At_5mM_NaNP_cDNA_P Parameter: Timepoint (hr) Value: 6
  misc_feature: MA Experiment 108585 PARAMETER Experiment Name: At_5mM_NaNP_cDNA_P Parameter: Tissue Value: Aerial
  misc_feature: MA Experiment 108585 PARAMETER Experiment Name: At_5mM_NaNP_cDNA_P Parameter: Treatment Value: null
  misc_feature: MA Experiment ID: 20000180 Result: Down-regulated in Transcription
  misc_feature: MA Experiment 20000180 PARAMETER Experiment Name: At_Germinating_Seeds_P Parameter: Age (hr) Value: 24 vs. 0
  misc_feature: MA Experiment 20000180 PARAMETER Experiment Name: At_Germinating_Seeds_P Parameter: Tissue Value: Germinating Seeds
  misc_feature: MA Experiment ID: 20000235 Result: Up-regulated in Transcription
  misc_feature: MA Experiment 20000235 PARAMETER Experiment Name: At_Siliques_P Parameter: Age (day) Value: 21
  misc_feature: MA Experiment 20000235 PARAMETER Experiment Name: At_Siliques_P Parameter: Organism Value: A. thaliana
  misc_feature: MA Experiment 20000235 PARAMETER Experiment Name: At_Siliques_P Parameter: Plant Line Value: WS
  misc_feature: MA Experiment 20000235 PARAMETER Experiment Name: At_Siliques_P Parameter: Tissue Value: 5-10mm Siliques vs. Whole Plant
  misc_feature: MA Experiment ID: 20000265 Result: Up-regulated in Transcription
  misc_feature: MA Experiment 20000265 PARAMETER Experiment Name: At_Open_Flower_P Parameter: Age (day) Value: 21
  misc_feature: MA Experiment 20000265 PARAMETER Experiment Name: At_Open_Flower_P Parameter: Plant Line Value: WS
  misc_feature: MA Experiment 20000265 PARAMETER Experiment Name: At_Open_Flower_P Parameter: Tissue Value: Closed Flower vs. Whole Plant
  misc_feature: MA Experiment ID: 20000495 Result: Up-regulated in Transcription
  misc_feature: MA Experiment 20000495 PARAMETER Experiment Name: At_Guard_Cells_P Parameter: Harvest Date Value: 8/2/2002
  misc_feature: MA Experiment 20000495 PARAMETER Experiment Name: At_Guard_Cells_P Parameter: Organism Value: A. thaliana
  misc_feature: MA Experiment 20000495 PARAMETER Experiment Name: At_Guard_Cells_P Parameter: Tissue Value: Guard Cells vs. Leaves
  misc_feature: MA Experiment ID: 20000794 Result: Up-regulated in Transcription
  misc_feature: MA Experiment 20000794 PARAMETER Experiment Name: At_Petals_P Parameter: Age (day) Value: 23-25 days
  misc_feature: MA Experiment 20000794 PARAMETER Experiment Name: At_Petals_P Parameter: Plant Line Value: WS
  misc_feature: MA Experiment 20000794 PARAMETER Experiment Name: At_Petals_P Parameter: Tissue Value: Petals vs. Whole plant
  misc_feature: MA Experiment ID: 20001451 Result: Up-regulated in Transcription
  misc_feature: MA Experiment 20001451 PARAMETER Experiment Name: At_Far-red-induction_P Parameter: Age (day) Value: 7
  misc_feature: MA Experiment 20001451 PARAMETER Experiment Name: At_Far-red-induction_P Parameter: Light Value: Far-red vs. White
  misc_feature: MA Experiment 20001451 PARAMETER Experiment Name: At_Far-red-induction_P Parameter: Organism Value: A. thaliana
  misc_feature: MA Experiment 20001451 PARAMETER Experiment Name: At_Far-red-induction_P Parameter: Plant Line Value: Columbia
  misc_feature: MA Experiment 20001451 PARAMETER Experiment Name: At_Far-red-induction_P Parameter: Timepoint (hr) Value: 24
  misc_feature: MA Experiment 20001451 PARAMETER Experiment Name: At_Far-red-induction_P Parameter: Tissue Value: Whole Plant

SEQ ID NO: 33571 - protein, 367 aa, Arabidopsis thaliana; identical to SEQ ID NO: 29981
  peptide (1)..(367): Ceres Seq. ID no. 13488447
  misc_feature (36)..(59): Pfam Name: Zinc finger, C2H2 type Pfam Description: Zinc finger, C2H2 type
  misc_feature (1)..(308): Homolog of NCBI NO: 4508017 NR Description: zinc finger protein 207 [Homo sapiens]
  misc_feature (1)..(223): Homolog of NCBI NO: 17538208 NR Description: Putative nuclear protein of eukaryotic origin
  misc_feature (1)..(337): Homolog of NCBI NO: 29179476 NR Description: Similar to zinc finger protein 207 [Danio rerio]
  misc_feature (1)..(341): Homolog of NCBI NO: 19921442 NR Description: CG17912-PA [Drosophila melanogaster]
  misc_feature (1)..(333): Homolog of NCBI NO: 17538210 NR Description: Putative nuclear protein of eukaryotic origin
  misc_feature (1)..(333): Homolog of NCBI NO: 39593757 NR Description: Hypothetical protein CBG06068 [Caenorhabditis
  misc_feature (1)..(367): Homolog of NCBI NO: 9755379 NR Description: F17F8.14 [Arabidopsis thaliana]
  misc_feature (1)..(367): Homolog of NCBI NO: 14517410 NR Description: At1g30970/F17F8_14 [Arabidopsis thaliana]
  misc_feature (1)..(367): Homolog of NCBI NO: 21553740 NR Description: putative zinc finger protein [Arabidopsis
  misc_feature (1)..(367): Homolog of NCBI NO: 18397747 NR Description: zinc finger protein -related [Arabidopsis

SEQ ID NO: 33572 - protein, 317 aa, Arabidopsis thaliana; identical to SEQ ID NO: 29982
  peptide (1)..(317): Ceres Seq. ID no. 13488448
  misc_feature (62)..(248): Pfam Name: Single-stranded DNA binding protein, SSDP Pfam Description: Single-stranded DNA binding protein, SSDP
  misc_feature (1)..(258): Homolog of NCBI NO: 4508017 NR Description: zinc finger protein 207 [Homo sapiens]
  misc_feature (1)..(173): Homolog of NCBI NO: 17538208 NR Description: Putative nuclear protein of eukaryotic origin
  misc_feature (1)..(287): Homolog of NCBI NO: 29179476 NR Description: Similar to zinc finger protein 207 [Danio rerio]
  misc_feature (1)..(291): Homolog of NCBI NO: 19921442 NR Description: CG17912-PA [Drosophila melanogaster]
  misc_feature (1)..(283): Homolog of NCBI NO: 17538210 NR Description: Putative nuclear protein of eukaryotic origin
  misc_feature (1)..(283): Homolog of NCBI NO: 39593757 NR Description: Hypothetical protein CBG06068 [Caenorhabditis
  misc_feature (1)..(317): Homolog of NCBI NO: 9755379 NR Description: F17F8.14 [Arabidopsis thaliana]
  misc_feature (1)..(317): Homolog of NCBI NO: 14517410 NR Description: At1g30970/F17F8_14 [Arabidopsis thaliana]
  misc_feature (1)..(317): Homolog of NCBI NO: 21553740 NR Description: putative zinc finger protein [Arabidopsis
  misc_feature (1)..(317): Homolog of NCBI NO: 18397747 NR Description: zinc finger protein -related [Arabidopsis

SEQ ID NO: 33573 - protein, 285 aa, Arabidopsis thaliana; identical to SEQ ID NO: 29983
  peptide (1)..(285): Ceres Seq. ID no. 13488449
  misc_feature (30)..(216): Pfam Name: Single-stranded DNA binding protein, SSDP Pfam Description: Single-stranded DNA binding protein, SSDP
  misc_feature (1)..(226): Homolog of NCBI NO: 4508017 NR Description: zinc finger protein 207 [Homo sapiens]
  misc_feature (1)..(141): Homolog of NCBI NO: 17538208 NR Description: Putative nuclear protein of eukaryotic origin
  misc_feature (1)..(255): Homolog of NCBI NO: 29179476 NR Description: Similar to zinc finger protein 207 [Danio rerio]
  misc_feature (1)..(259): Homolog of NCBI NO: 19921442 NR Description: CG17912-PA [Drosophila melanogaster]
  misc_feature (1)..(251): Homolog of NCBI NO: 17538210 NR Description: Putative nuclear protein of eukaryotic origin
  misc_feature (1)..(251): Homolog of NCBI NO: 39593757 NR Description: Hypothetical protein CBG06068 [Caenorhabditis
  misc_feature (1)..(285): Homolog of NCBI NO: 9755379 NR Description: F17F8.14 [Arabidopsis thaliana]
  misc_feature (1)..(285): Homolog of NCBI NO: 14517410 NR Description: At1g30970/F17F8_14 [Arabidopsis thaliana]
  misc_feature (1)..(285): Homolog of NCBI NO: 21553740 NR Description: putative zinc finger protein [Arabidopsis
  misc_feature (1)..(285): Homolog of NCBI NO: 18397747 NR Description: zinc finger protein -related [Arabidopsis

SEQ ID NO: 33574 - DNA, 1708 bp, Arabidopsis thaliana; identical to SEQ ID NO: 29984
  misc_feature (1)..(1708): Ceres Seq. ID no. 12603224
  misc_feature: MA Experiment ID: 108488 Result: Down-regulated in Transcription
  misc_feature: MA Experiment ID: 108501 Result: Down-regulated in Transcription
  misc_feature: MA Experiment 108501 PARAMETER Experiment Name: At_ap2_floral_buds_cDNA_P Parameter: Plant Line Value: ap2 (Ler.)
  misc_feature: MA Experiment 108501 PARAMETER Experiment Name: At_ap2_floral_buds_cDNA_P Parameter: Tissue Value: Closed Flower
  misc_feature: MA Experiment ID: 108594 Result: Down-regulated in Transcription
  misc_feature: MA Experiment 108594 PARAMETER Experiment Name: At_Ler-rhl_Root_cDNA_P Parameter: Plant Line Value: null
  misc_feature: MA Experiment ID: 20000111 Result: Down-regulated in Transcription
  misc_feature: MA Experiment 20000111 PARAMETER Experiment Name: At_42deg_Heat_cDNA_P Parameter: Temperature (deg C) Value: 42 vs. 22
  misc_feature: MA Experiment 20000111 PARAMETER Experiment Name: At_42deg_Heat_cDNA_P Parameter: Timepoint (hr) Value: 6
  misc_feature: MA Experiment 20000111 PARAMETER Experiment Name: At_42deg_Heat_cDNA_P Parameter: Tissue Value: Aerial
  misc_feature: MA Experiment ID: 20000113 Result: Down-regulated in Transcription
  misc_feature: MA Experiment 20000113 PARAMETER Experiment Name: At_42deg_Heat_cDNA_P Parameter: Temperature (deg C) Value: 42 vs. 22
  misc_feature: MA Experiment 20000113 PARAMETER Experiment Name: At_42deg_Heat_cDNA_P Parameter: Timepoint (hr) Value: 8
  misc_feature: MA Experiment 20000113 PARAMETER Experiment Name: At_42deg_Heat_cDNA_P Parameter: Tissue Value: Aerial
  misc_feature: MA Experiment ID: 20000173 Result: Down-regulated in Transcription
  misc_feature: MA Experiment 20000173 PARAMETER Experiment Name: At_42deg_Heat_P Parameter: Age (day) Value: 14
  misc_feature: MA Experiment 20000173 PARAMETER Experiment Name: At_42deg_Heat_P Parameter: Organism Value: A. thaliana
  misc_feature: MA Experiment 20000173 PARAMETER Experiment Name: At_42deg_Heat_P Parameter: Plant Line Value: WS
  misc_feature: MA Experiment 20000173 PARAMETER Experiment Name: At_42deg_Heat_P Parameter: Temperature (deg C) Value: 42 vs. 22
  misc_feature: MA Experiment 20000173 PARAMETER Experiment Name: At_42deg_Heat_P Parameter: Timepoint (hr) Value: 6
  misc_feature: MA Experiment 20000173 PARAMETER Experiment Name: At_42deg_Heat_P Parameter: Tissue Value: Aerial
  misc_feature: MA Experiment ID: 20000224 Result: Up-regulated in Transcription
  misc_feature: MA Experiment ID: 20000227 Result: Down-regulated in Transcription
  misc_feature: MA Experiment 20000227 PARAMETER Experiment Name: At_Root-Tips-vs-Tops_P Parameter: Tissue Value: Root Tips vs. Root Tops
  misc_feature: MA Experiment ID: 20000234 Result: Down-regulated in Transcription
  misc_feature: MA Experiment 20000234 PARAMETER Experiment Name: At_Siliques_P Parameter: Age (day) Value: 21
  misc_feature: MA Experiment 20000234 PARAMETER Experiment Name: At_Siliques_P Parameter: Organism Value: A. thaliana
  misc_feature: MA Experiment 20000234 PARAMETER Experiment Name: At_Siliques_P Parameter: Plant Line Value: WS
  misc_feature: MA Experiment 20000234 PARAMETER Experiment Name: At_Siliques_P Parameter: Tissue Value: Less Than 5mm Siliques vs. Whole Plant
  misc_feature: MA Experiment ID: 20000264 Result: Down-regulated in Transcription
  misc_feature: MA Experiment 20000264 PARAMETER Experiment Name: At_Open_Flower_P Parameter: Age (day) Value: 21
  misc_feature: MA Experiment 20000264 PARAMETER Experiment Name: At_Open_Flower_P Parameter: Plant Line Value: WS
  misc_feature: MA Experiment 20000264 PARAMETER Experiment Name: At_Open_Flower_P Parameter: Tissue Value: Open Flower vs. Whole Plant
  misc_feature: MA Experiment ID: 20000265 Result: Down-regulated in Transcription
  misc_feature: MA Experiment 20000265 PARAMETER Experiment Name: At_Open_Flower_P Parameter: Age (day) Value: 21
  misc_feature: MA Experiment 20000265 PARAMETER Experiment Name: At_Open_Flower_P Parameter: Plant Line Value: WS
  misc_feature: MA Experiment 20000265 PARAMETER Experiment Name: At_Open_Flower_P Parameter: Tissue Value: Closed Flower vs. Whole Plant
  misc_feature: MA Experiment ID: 20000286 Result: Down-regulated in Transcription
  misc_feature: MA Experiment 20000286 PARAMETER Experiment Name: At_Open_Flower_P Parameter: Age (day) Value: 21
  misc_feature: MA Experiment 20000286 PARAMETER Experiment Name: At_Open_Flower_P Parameter: Plant Line Value: WS
  misc_feature: MA Experiment 20000286 PARAMETER Experiment Name: At_Open_Flower_P Parameter: Tissue Value: Half Open vs. Whole Plant
  misc_feature: MA Experiment ID: 20000495 Result: Down-regulated in Transcription
  misc_feature: MA Experiment 20000495 PARAMETER Experiment Name: At_Guard_Cells_P Parameter: Harvest Date Value: 8/2/2002
  misc_feature: MA Experiment 20000495 PARAMETER Experiment Name: At_Guard_Cells_P Parameter: Organism Value: A. thaliana
  misc_feature: MA Experiment 20000495 PARAMETER Experiment Name: At_Guard_Cells_P Parameter: Tissue Value: Guard Cells vs. Leaves
  misc_feature: MA Experiment ID: 20001451 Result: Down-regulated in Transcription
  misc_feature: MA Experiment 20001451 PARAMETER Experiment Name: At_Far-red-induction_P Parameter: Age (day) Value: 7
  misc_feature: MA Experiment 20001451 PARAMETER Experiment Name: At_Far-red-induction_P Parameter: Light Value: Far-red vs. White
  misc_feature: MA Experiment 20001451 PARAMETER Experiment Name: At_Far-red-induction_P Parameter: Organism Value: A. thaliana
  misc_feature: MA Experiment 20001451 PARAMETER Experiment Name: At_Far-red-induction_P Parameter: Plant Line Value: Columbia
  misc_feature: MA Experiment 20001451 PARAMETER Experiment Name: At_Far-red-induction_P Parameter: Timepoint (hr) Value: 24
  misc_feature: MA Experiment 20001451 PARAMETER Experiment Name: At_Far-red-induction_P Parameter: Tissue Value: Whole Plant

SEQ ID NO: 33575 - protein, 501 aa, Arabidopsis thaliana; identical to SEQ ID NO: 29985
  peptide (1)..(501): Ceres Seq. ID no. 12603225
  misc_feature (17)..(501): Homolog of NCBI NO: 14276718 NR Description: T-cytoplasm male sterility restorer factor 2 [Zea
  misc_feature (17)..(501): Homolog of NCBI NO: 7431451 NR Description: rf2 nuclear restorer protein - maize
  misc_feature (16)..(501): Homolog of NCBI NO: 20530131 NR Description: mitochondrial aldehyde dehydrogenase [Sorghum
  misc_feature (16)..(501): Homolog of NCBI NO: 15228319 NR Description: aldehyde dehydrogenase (NAD+)-like protein
  misc_feature (35)..(500): Homolog of NCBI NO: 19850245 NR Description: cytosolic aldehyde dehydrogenase RF2D [Zea mays]
  misc_feature (3)..(500): Homolog of NCBI NO: 19850247 NR Description: cytosolic aldehyde dehydrogenase RF2D [Zea mays]
  misc_feature (3)..(501): Homolog of NCBI NO: 19850243 NR Description: cytosolic aldehyde dehydrogenase RF2C [Zea mays]
  misc_feature (3)..(501): Homolog of NCBI NO: 19850241 NR Description: cytosolic aldehyde dehydrogenase RF2C [Zea mays]
  misc_feature (4)..(501): Homolog of NCBI NO: 34912248 NR Description: cytosolic aldehyde dehydrogenase
  misc_feature (1)..(501): Homolog of NCBI NO: 18404212 NR Description: Expressed protein
  misc_feature (17)..(501): Homolog of NCBI NO: 14276718 NR Description: T-cytoplasm male sterility restorer factor 2 [Zea
  misc_feature (17)..(501): Homolog of NCBI NO: 7431451 NR Description: rf2 nuclear restorer protein - maize
  misc_feature (16)..(501): Homolog of NCBI NO: 20530131 NR Description: mitochondrial aldehyde dehydrogenase [Sorghum
  misc_feature (16)..(501): Homolog of NCBI NO: 15228319 NR Description: aldehyde dehydrogenase (NAD+)-like protein
  misc_feature (35)..(500): Homolog of NCBI NO: 19850245 NR Description: cytosolic aldehyde dehydrogenase RF2D [Zea mays]
  misc_feature (3)..(500): Homolog of NCBI NO: 19850247 NR Description: cytosolic aldehyde dehydrogenase RF2D [Zea mays]
  misc_feature (3)..(501): Homolog of NCBI NO: 19850243 NR Description: cytosolic aldehyde dehydrogenase RF2C [Zea mays]
  misc_feature (3)..(501): Homolog of NCBI NO: 19850241 NR Description: cytosolic aldehyde dehydrogenase RF2C [Zea mays]
  misc_feature (4)..(501): Homolog of NCBI NO: 34912248 NR Description: cytosolic aldehyde dehydrogenase
  misc_feature (1)..(501): Homolog of NCBI NO: 18404212 NR Description: Expressed protein

SEQ ID NO: 33576 - protein, 424 aa, Arabidopsis thaliana; identical to SEQ ID NO: 29986
  peptide (1)..(424): Ceres Seq. ID no. 12603226
  misc_feature (1)..(424): Homolog of NCBI NO: 14276718 NR Description: T-cytoplasm male sterility restorer factor 2 [Zea
  misc_feature (1)..(424): Homolog of NCBI NO: 7431451 NR Description: rf2 nuclear restorer protein - maize
  misc_feature (1)..(424): Homolog of NCBI NO: 20530131 NR Description: mitochondrial aldehyde dehydrogenase [Sorghum
  misc_feature (1)..(424): Homolog of NCBI NO: 15228319 NR Description: aldehyde dehydrogenase (NAD+)-like protein
  misc_feature (1)..(423): Homolog of NCBI NO: 19850245 NR Description: cytosolic aldehyde dehydrogenase RF2D [Zea mays]
  misc_feature (1)..(423): Homolog of NCBI NO: 19850247 NR Description: cytosolic aldehyde dehydrogenase RF2D [Zea mays]
  misc_feature (1)..(424): Homolog of NCBI NO: 19850243 NR Description: cytosolic aldehyde dehydrogenase RF2C [Zea mays]
  misc_feature (1)..(424): Homolog of NCBI NO: 19850241 NR Description: cytosolic aldehyde dehydrogenase RF2C [Zea mays]
  misc_feature (1)..(424): Homolog of NCBI NO: 34912248 NR Description: cytosolic aldehyde dehydrogenase
  misc_feature (1)..(424): Homolog of NCBI NO: 18404212 NR Description: Expressed protein
  misc_feature (1)..(424): Homolog of NCBI NO: 14276718 NR Description: T-cytoplasm male sterility restorer factor 2 [Zea
  misc_feature (1)..(424): Homolog of NCBI NO: 7431451 NR Description: rf2 nuclear restorer protein - maize
  misc_feature (1)..(424): Homolog of NCBI NO: 20530131 NR Description: mitochondrial aldehyde dehydrogenase [Sorghum
  misc_feature (1)..(424): Homolog of NCBI NO: 15228319 NR Description: aldehyde dehydrogenase (NAD+)-like protein
  misc_feature (1)..(423): Homolog of NCBI NO: 19850245 NR Description: cytosolic aldehyde dehydrogenase RF2D [Zea mays]
  misc_feature (1)..(423): Homolog of NCBI NO: 19850247 NR Description: cytosolic aldehyde dehydrogenase RF2D [Zea mays]
  misc_feature (1)..(424): Homolog of NCBI NO: 19850243 NR Description: cytosolic aldehyde dehydrogenase RF2C [Zea mays]
  misc_feature (1)..(424): Homolog of NCBI NO: 19850241 NR Description: cytosolic aldehyde dehydrogenase RF2C [Zea mays]
  misc_feature (1)..(424): Homolog of NCBI NO: 34912248 NR Description: cytosolic aldehyde dehydrogenase
  misc_feature (1)..(424): Homolog of NCBI NO: 18404212 NR Description: Expressed protein

SEQ ID NO: 33577 - protein, 357 aa, Arabidopsis thaliana; identical to SEQ ID NO: 29987
  peptide (1)..(357): Ceres Seq. ID no. 12603227
  misc_feature (1)..(357): Homolog of NCBI NO: 14276718 NR Description: T-cytoplasm male sterility restorer factor 2 [Zea
  misc_feature (1)..(357): Homolog of NCBI NO: 7431451 NR Description: rf2 nuclear restorer protein - maize
  misc_feature (1)..(357): Homolog of NCBI NO: 20530131 NR Description: mitochondrial aldehyde dehydrogenase [Sorghum
  misc_feature (1)..(357): Homolog of NCBI NO: 15228319 NR Description: aldehyde dehydrogenase (NAD+)-like protein
  misc_feature (1)..(356): Homolog of NCBI NO: 19850245 NR Description: cytosolic aldehyde dehydrogenase RF2D [Zea mays]
  misc_feature (1)..(356): Homolog of NCBI NO: 19850247 NR Description: cytosolic aldehyde dehydrogenase RF2D [Zea mays]
  misc_feature (1)..(357): Homolog of NCBI NO: 19850243 NR Description: cytosolic aldehyde dehydrogenase RF2C [Zea mays]
  misc_feature (1)..(357): Homolog of NCBI NO: 19850241 NR Description: cytosolic aldehyde dehydrogenase RF2C [Zea mays]
  misc_feature (1)..(357): Homolog of NCBI NO: 34912248 NR Description: cytosolic aldehyde dehydrogenase
  misc_feature (1)..(357): Homolog of NCBI NO: 18404212 NR Description: Expressed protein
  misc_feature (1)..(357): Homolog of NCBI NO: 14276718 NR Description: T-cytoplasm male sterility restorer factor 2 [Zea
  misc_feature (1)..(357): Homolog of NCBI NO: 7431451 NR Description: rf2 nuclear restorer protein - maize
  misc_feature (1)..(357): Homolog of NCBI NO: 20530131 NR Description: mitochondrial aldehyde dehydrogenase [Sorghum
  misc_feature (1)..(357): Homolog of NCBI NO: 15228319 NR Description: aldehyde dehydrogenase (NAD+)-like protein
  misc_feature (1)..(356): Homolog of NCBI NO: 19850245 NR Description: cytosolic aldehyde dehydrogenase RF2D [Zea mays]
  misc_feature (1)..(356): Homolog of NCBI NO: 19850247 NR Description: cytosolic aldehyde dehydrogenase RF2D [Zea mays]
  misc_feature (1)..(357): Homolog of NCBI NO: 19850243 NR Description: cytosolic aldehyde dehydrogenase RF2C [Zea mays]
  misc_feature (1)..(357): Homolog of NCBI NO: 19850241 NR Description: cytosolic aldehyde dehydrogenase RF2C [Zea mays]
  misc_feature (1)..(357): Homolog of NCBI NO: 34912248 NR Description: cytosolic aldehyde dehydrogenase
  misc_feature (1)..(357): Homolog of NCBI NO: 18404212 NR Description: Expressed protein

SEQ ID NO: 33578 - DNA, 640 bp, Arabidopsis thaliana; identical to SEQ ID NO: 21715
  misc_feature (1)..(640): Ceres Seq. ID no. 12323094
  misc_feature: MA Experiment ID: 108434 Result: Up-regulated in Transcription
  misc_feature: MA Experiment 108434 PARAMETER Experiment Name: At_Root_Tips_cDNA_P Parameter: Tissue Value: Root Tips
  misc_feature: MA Experiment ID: 108462 Result: Down-regulated in Transcription
  misc_feature: MA Experiment 108462 PARAMETER Experiment Name: At_Germinating_Seeds_cDNA_P Parameter: Age (day) Value: 2 vs. 0
  misc_feature: MA Experiment 108462 PARAMETER Experiment Name: At_Germinating_Seeds_cDNA_P Parameter: Tissue Value: Germinating Seeds
  misc_feature: MA Experiment ID: 108463 Result: Down-regulated in Transcription
  misc_feature: MA Experiment 108463 PARAMETER Experiment Name: At_Germinating_Seeds_cDNA_P Parameter: Age (day) Value: 3 vs. 0
  misc_feature: MA Experiment 108463 PARAMETER Experiment Name: At_Germinating_Seeds_cDNA_P Parameter: Tissue Value: Germinating Seeds
  misc_feature: MA Experiment ID: 108464 Result: Down-regulated in Transcription
  misc_feature: MA Experiment 108464 PARAMETER Experiment Name: At_Germinating_Seeds_cDNA_P Parameter: Age (day) Value: 4 vs. 0
  misc_feature: MA Experiment 108464 PARAMETER Experiment Name: At_Germinating_Seeds_cDNA_P Parameter: Tissue Value: Germinating Seeds
  misc_feature: MA Experiment ID: 20000184 Result: Down-regulated in Transcription
  misc_feature: MA Experiment 20000184 PARAMETER Experiment Name: At_Shoots__P Parameter: Age (day) Value: 7
  misc_feature: MA Experiment 20000184 PARAMETER Experiment Name: At_Shoots__P Parameter: Tissue Value: Shoots vs. Whole Plant
  misc_feature: MA Experiment ID: 20000224 Result: Up-regulated in Transcription
  misc_feature: Phenotype: FLOWERS Other
  misc_feature: Phenotype: FERTILITY Fertility-Reduced
  misc_feature: Phenotype: ROSETTE LEAVES Disorganized Rosette-Disorganized Rosette
  misc_feature: Phenotype: ROSETTE LEAVES Other
  misc_feature: Phenotype: SILIQUES Other
  misc_feature: Phenotype: FERTILITY Fertility-Reduced
  misc_feature: Phenotype: ROSETTE LEAVES Other
  misc_feature: Phenotype: CAULINE LEAVES Other

SEQ ID NO: 33579 - protein, 125 aa, Arabidopsis thaliana; identical to SEQ ID NO: 21716
  peptide (1)..(125): Ceres Seq. ID no. 12323095
  misc_feature (34)..(103): Pfam Name: HMG (high mobility group) box Pfam Description: HMG (high mobility group) box
  misc_feature (34)..(103): Pfam Name: HMG (high mobility group) box Pfam Description: HMG (high mobility group) box
  misc_feature (1)..(125): Homolog of NCBI NO: 11346367 NR Description: high mobility group protein HMG-gamma
  misc_feature (1)..(125): Homolog of NCBI NO: 13877775 NR Description: putative HMG protein [Arabidopsis thaliana]
  misc_feature (1)..(125): Homolog of NCBI NO: 21592453 NR Description: putative HMG protein [Arabidopsis thaliana]
  misc_feature (1)..(125): Homolog of NCBI NO: 13877775 NR Description: putative HMG protein [Arabidopsis thaliana]
  misc_feature (1)..(125): Homolog of NCBI NO: 15227862 NR Description: putative HMG protein
  misc_feature (1)..(125): Homolog of NCBI NO: 15237040 NR Description: HMG delta protein
  misc_feature (1)..(125): Homolog of NCBI NO: 21592453 NR Description: putative HMG protein [Arabidopsis thaliana]
  misc_feature (1)..(125): Homolog of NCBI NO: 11346367 NR Description: high mobility group protein HMG-gamma
  misc_feature (1)..(125): Homolog of NCBI NO: 15227862 NR Description: putative HMG protein
  misc_feature (1)..(125): Homolog of NCBI NO: 15237040 NR Description: HMG delta protein

SEQ ID NO: 33580 - DNA, 939 bp, Arabidopsis thaliana; identical to SEQ ID NO: 29990
  misc_feature (1)..(939): Ceres Seq. ID no. 12322718
  misc_feature: MA Experiment ID: 108434 Result: Up-regulated in Transcription
  misc_feature: MA Experiment 108434 PARAMETER Experiment Name: At_Root_Tips_cDNA_P Parameter: Tissue Value: Root Tips
  misc_feature: MA Experiment ID: 108435 Result: Down-regulated in Transcription
  misc_feature: MA Experiment 108435 PARAMETER Experiment Name: At_stm_Mutants_cDNA_P Parameter: Plant Line Value: wt Landsburg vs stm
  misc_feature: MA Experiment 108435 PARAMETER Experiment Name: At_stm_Mutants_cDNA_P Parameter: Tissue Value: Shoot Apical Meristem Region
  misc_feature: MA Experiment ID: 108461 Result: Up-regulated in Transcription
  misc_feature: MA Experiment 108461 PARAMETER Experiment Name: At_Germinating_Seeds_cDNA_P Parameter: Age (day) Value: 1 vs. 0
  misc_feature: MA Experiment 108461 PARAMETER Experiment Name: At_Germinating_Seeds_cDNA_P Parameter: Tissue Value: Germinating Seeds
  misc_feature: MA Experiment ID: 108462 Result: Up-regulated in Transcription
  misc_feature: MA Experiment 108462 PARAMETER Experiment Name: At_Germinating_Seeds_cDNA_P Parameter: Age (day) Value: 2 vs. 0
  misc_feature: MA Experiment 108462 PARAMETER Experiment Name: At_Germinating_Seeds_cDNA_P Parameter: Tissue Value: Germinating Seeds
  misc_feature: MA Experiment ID: 108488 Result: Up-regulated in Transcription
  misc_feature: MA Experiment ID: 108489 Result: Down-regulated in Transcription
  misc_feature: MA Experiment ID: 108585 Result: Down-regulated in Transcription
  misc_feature: MA Experiment 108585 PARAMETER Experiment Name: At_5mM_NaNP_cDNA_P Parameter: Timepoint (hr) Value: 6
  misc_feature: MA Experiment 108585 PARAMETER Experiment Name: At_5mM_NaNP_cDNA_P Parameter: Tissue Value: Aerial
  misc_feature: MA Experiment 108585 PARAMETER Experiment Name: At_5mM_NaNP_cDNA_P Parameter: Treatment Value: null
  misc_feature: MA Experiment ID: 108595 Result: Down-regulated in Transcription
  misc_feature: MA Experiment 108595 PARAMETER Experiment Name: At_Ler-pi_Ovule_cDNA_P Parameter: Plant Line Value: null
  misc_feature: MA Experiment ID: 20000087 Result: Down-regulated in Transcription
  misc_feature: MA Experiment 20000087 PARAMETER Experiment Name: At_100uM_ABA_Mutants_cDNA_P Parameter: Plant Line Value: WS
  misc_feature: MA Experiment 20000087 PARAMETER Experiment Name: At_100uM_ABA_Mutants_cDNA_P Parameter: Timepoint (hr) Value: 6
  misc_feature: MA Experiment 20000087 PARAMETER Experiment Name: At_100uM_ABA_Mutants_cDNA_P Parameter: Tissue Value: Aerial
  misc_feature: MA Experiment 20000087 PARAMETER Experiment Name: At_100uM_ABA_Mutants_cDNA_P Parameter: Treatment Value: 100uM ABA vs. No Treatment
  misc_feature: MA Experiment ID: 20000117 Result: Down-regulated in Transcription
  misc_feature: MA Experiment 20000117 PARAMETER Experiment Name: At_100uM_ABA_Mutants_cDNA_P Parameter: Plant Line Value: Columbia
  misc_feature: MA Experiment 20000117 PARAMETER Experiment Name: At_100uM_ABA_Mutants_cDNA_P Parameter: Timepoint (hr) Value: 6
  misc_feature: MA Experiment 20000117 PARAMETER Experiment Name: At_100uM_ABA_Mutants_cDNA_P Parameter: Tissue Value: Aerial
  misc_feature: MA Experiment 20000117 PARAMETER Experiment Name: At_100uM_ABA_Mutants_cDNA_P Parameter: Treatment Value: 100uM ABA vs. No Treatment
  misc_feature: MA Experiment ID: 20000185 Result: Down-regulated in Transcription
  misc_feature: MA Experiment 20000185 PARAMETER Experiment Name: At_Roots__P Parameter: Age (day) Value: 7 vs. 21
  misc_feature: MA Experiment 20000185 PARAMETER Experiment Name: At_Roots__P Parameter: Organism Value: A. thaliana
  misc_feature: MA Experiment 20000185 PARAMETER Experiment Name: At_Roots__P Parameter: Tissue Value: Roots vs. Whole Plant
  misc_feature: MA Experiment ID: 20000437 Result: Down-regulated in Transcription
  misc_feature: MA Experiment 20000437 PARAMETER Experiment Name: At_Drought_P Parameter: Age (day) Value: 8
  misc_feature: MA Experiment 20000437 PARAMETER Experiment Name: At_Drought_P Parameter: Organism Value: A. thaliana
  misc_feature: MA Experiment 20000437 PARAMETER Experiment Name: At_Drought_P Parameter: Plant Line Value: WS
  misc_feature: MA Experiment 20000437 PARAMETER Experiment Name: At_Drought_P Parameter: Timepoint (hr) Value: 24
  misc_feature: MA Experiment 20000437 PARAMETER Experiment Name: At_Drought_P Parameter: Tissue Value: Whole Plant
  misc_feature: MA Experiment 20000437 PARAMETER Experiment Name: At_Drought_P Parameter: Treatment Value: Drought vs. No Drought
  misc_feature: MA Experiment ID: 20000439 Result: Down-regulated in Transcription
  misc_feature: MA Experiment 20000439 PARAMETER Experiment Name: At_Roots__P Parameter: Age (day) Value: 14 vs. 21
  misc_feature: MA Experiment 20000439 PARAMETER Experiment Name: At_Roots__P Parameter: Organism Value: A. thaliana
  misc_feature: MA Experiment 20000439 PARAMETER Experiment Name: At_Roots__P Parameter: Tissue Value: Roots vs. Whole Plant
  misc_feature: MA Experiment ID: 20000496 Result: Down-regulated in Transcription
  misc_feature: MA Experiment 20000496 PARAMETER Experiment Name: At_Guard_Cells_P Parameter: Harvest Date Value: 7/19/2002
  misc_feature: MA Experiment 20000496 PARAMETER Experiment Name: At_Guard_Cells_P Parameter: Organism Value: Canola
  misc_feature: MA Experiment 20000496 PARAMETER Experiment Name: At_Guard_Cells_P Parameter: Tissue Value: Guard Cells vs. Leaves
  misc_feature: MA Experiment ID: 20001450 Result: Down-regulated in Transcription
  misc_feature: MA Experiment 20001450 PARAMETER Experiment Name: At_Far-red-induction_P Parameter: Age (day) Value: 7
  misc_feature: MA Experiment 20001450 PARAMETER Experiment Name: At_Far-red-induction_P Parameter: Light Value: Far-red vs. White
  misc_feature: MA Experiment 20001450 PARAMETER Experiment Name: At_Far-red-induction_P Parameter: Organism Value: A. thaliana
  misc_feature: MA Experiment 20001450 PARAMETER Experiment Name: At_Far-red-induction_P Parameter: Plant Line Value: Columbia
  misc_feature: MA Experiment 20001450 PARAMETER Experiment Name: At_Far-red-induction_P Parameter: Timepoint (hr) Value: 8
  misc_feature: MA Experiment 20001450 PARAMETER Experiment Name: At_Far-red-induction_P Parameter: Tissue Value: Whole Plant
  misc_feature: MA Experiment ID: 20001557 Result: Down-regulated in Transcription
  misc_feature: MA Experiment 20001557 PARAMETER Experiment Name: At_Drought_Soil_Dry_P Parameter: Age (day) Value: 27
  misc_feature: MA Experiment 20001557 PARAMETER Experiment Name: At_Drought_Soil_Dry_P Parameter: Organism Value: A. thaliana
  misc_feature: MA Experiment 20001557 PARAMETER Experiment Name: At_Drought_Soil_Dry_P Parameter: Plant Line Value: WS
  misc_feature: MA Experiment 20001557 PARAMETER Experiment Name: At_Drought_Soil_Dry_P Parameter: Post Timepoint (hr) Value: 3
  misc_feature: MA Experiment 20001557 PARAMETER Experiment Name: At_Drought_Soil_Dry_P Parameter: Post-Treatment Value: Re-Water vs. No Drought
  misc_feature: MA Experiment 20001557 PARAMETER Experiment Name: At_Drought_Soil_Dry_P Parameter: Timepoint (day) Value: 13
  misc_feature: MA Experiment 20001557 PARAMETER Experiment Name: At_Drought_Soil_Dry_P Parameter: Treatment Value: Drought vs. No Drought
  misc_feature: MA Experiment ID: 20001905 Result: Down-regulated in Transcription
  misc_feature: MA Experiment 20001905 PARAMETER Experiment Name: At_Drought_Reproduction_P Parameter: Age (day) Value: 40
  misc_feature: MA Experiment 20001905 PARAMETER Experiment Name: At_Drought_Reproduction_P Parameter: Organism Value: A. thaliana
  misc_feature: MA Experiment 20001905 PARAMETER Experiment Name: At_Drought_Reproduction_P Parameter: Plant Line Value: WS
  misc_feature: MA Experiment 20001905 PARAMETER Experiment Name: At_Drought_Reproduction_P Parameter: Timepoint (day) Value: 10
  misc_feature: MA Experiment 20001905 PARAMETER Experiment Name: At_Drought_Reproduction_P Parameter: Tissue Value: Rosettes
  misc_feature: MA Experiment 20001905 PARAMETER Experiment Name: At_Drought_Reproduction_P Parameter: Treatment Value: Drought vs. No Drought

SEQ ID NO: 33581 - protein, 258 aa, Arabidopsis thaliana; identical to SEQ ID NO: 29991
  peptide (1)..(258): Ceres Seq. ID no. 12322719
  misc_feature (66)..(128): Pfam Name: Glutathione S-transferase, N-terminal domain Pfam Description: Glutathione S-transferase, N-terminal domain
  misc_feature (49)..(256): Homolog of NCBI NO: 6939839 NR Description: GSH-dependent dehydroascorbate reductase 1
  misc_feature (49)..(256): Homolog of NCBI NO: 28192425 NR Description: dehydroascorbate reductase [Oryza sativa]
  misc_feature (49)..(256): Homolog of NCBI NO: 28192427 NR Description: dehydroascorbate reductase [Nicotiana tabacum]
  misc_feature (38)..(252): Homolog of NCBI NO: 10952512 NR Description: dehydroascorbate reductase [Spinacia oleracea]
  misc_feature (42)..(258): Homolog of NCBI NO: 22653415 NR Description: dehydroascorbate reductase [Brassica juncea]
  misc_feature (1)..(258): Homolog of NCBI NO: 22653413 NR Description: dehydroascorbate reductase [Brassica juncea]
  misc_feature (7)..(258): Homolog of NCBI NO: 10952514 NR Description: dehydroascorbate reductase [Arabidopsis thaliana]
  misc_feature (1)..(258): Homolog of NCBI NO: 17473687 NR Description: unknown protein [Arabidopsis thaliana]
  misc_feature (1)..(258): Homolog of NCBI NO: 18418055 NR Description: dehydroascorbate reductase, putative
  misc_feature (1)..(240): Homolog of NCBI NO: 11271417 NR Description: valine-tRNA ligase-like protein - Arabidopsis

SEQ ID NO: 33582 - protein, 217 aa, Arabidopsis thaliana; identical to SEQ ID NO: 29992
  peptide (1)..(217): Ceres Seq. ID no. 12322720
  misc_feature (25)..(87): Pfam Name: Glutathione S-transferase, N-terminal domain Pfam Description: Glutathione S-transferase, N-terminal domain
  misc_feature (8)..(215): Homolog of NCBI NO: 6939839 NR Description: GSH-dependent dehydroascorbate reductase 1
  misc_feature (8)..(215): Homolog of NCBI NO: 28192425 NR Description: dehydroascorbate reductase [Oryza sativa]
  misc_feature (8)..(215): Homolog of NCBI NO: 28192427 NR Description: dehydroascorbate reductase [Nicotiana tabacum]
  misc_feature (1)..(211): Homolog of NCBI NO: 10952512 NR Description: dehydroascorbate reductase [Spinacia oleracea]
  misc_feature (1)..(217): Homolog of NCBI NO: 22653415 NR Description: dehydroascorbate reductase [Brassica juncea]
  misc_feature (1)..(217): Homolog of NCBI NO: 22653413 NR Description: dehydroascorbate reductase [Brassica juncea]
  misc_feature (1)..(217): Homolog of NCBI NO: 10952514 NR Description: dehydroascorbate reductase [Arabidopsis thaliana]
  misc_feature (1)..(217): Homolog of NCBI NO: 17473687 NR Description: unknown protein [Arabidopsis thaliana]
  misc_feature (1)..(217): Homolog of NCBI NO: 18418055 NR Description: dehydroascorbate reductase, putative
  misc_feature (1)..(199): Homolog of NCBI NO: 11271417 NR Description: valine-tRNA ligase-like protein - Arabidopsis

SEQ ID NO: 33583 - protein, 183 aa, Arabidopsis thaliana; identical to SEQ ID NO: 29993
  peptide (1)..(183): Ceres Seq. ID no. 12322721
  misc_feature (1)..(53): Pfam Name: Glutathione S-transferase, N-terminal domain Pfam Description: Glutathione S-transferase, N-terminal domain
  misc_feature (1)..(181): Homolog of NCBI NO: 6939839 NR Description: GSH-dependent dehydroascorbate reductase 1
  misc_feature (1)..(181): Homolog of NCBI NO: 28192425 NR Description: dehydroascorbate reductase [Oryza sativa]
  misc_feature (1)..(181): Homolog of NCBI NO: 28192427 NR Description: dehydroascorbate reductase [Nicotiana tabacum]
  misc_feature (1)..(177): Homolog of NCBI NO: 10952512 NR Description: dehydroascorbate reductase [Spinacia oleracea]
  misc_feature (1)..(183): Homolog of NCBI NO: 22653415 NR Description: dehydroascorbate reductase [Brassica juncea]
  misc_feature (1)..(183): Homolog of NCBI NO: 22653413 NR Description: dehydroascorbate reductase [Brassica juncea]
  misc_feature (1)..(183): Homolog of NCBI NO: 10952514 NR Description: dehydroascorbate reductase [Arabidopsis thaliana]
  misc_feature (1)..(183): Homolog of NCBI NO: 17473687 NR Description: unknown protein [Arabidopsis thaliana]
  misc_feature (1)..(183): Homolog of NCBI NO: 18418055 NR Description: dehydroascorbate reductase, putative
  misc_feature (1)..(165): Homolog of NCBI NO: 11271417 NR Description: valine-tRNA ligase-like protein - Arabidopsis

SEQ ID NO: 33584 - DNA, 781 bp, Arabidopsis thaliana; identical to SEQ ID NO: 29994
  misc_feature (1)..(781): Ceres Seq. ID no. 13487058
  misc_feature: MA Experiment ID: 108434 Result: Down-regulated in Transcription
  misc_feature: MA Experiment 108434 PARAMETER Experiment Name: At_Root_Tips_cDNA_P Parameter: Tissue Value: Root Tips
  misc_feature: MA Experiment ID: 108461 Result: Up-regulated in Transcription
  misc_feature: MA Experiment 108461 PARAMETER Experiment Name: At_Germinating_Seeds_cDNA_P Parameter: Age (day) Value: 1 vs. 0
  misc_feature: MA Experiment 108461 PARAMETER Experiment Name: At_Germinating_Seeds_cDNA_P Parameter: Tissue Value: Germinating Seeds
  misc_feature: MA Experiment ID: 108462 Result: Up-regulated in Transcription
  misc_feature: MA Experiment 108462 PARAMETER Experiment Name: At_Germinating_Seeds_cDNA_P Parameter: Age (day) Value: 2 vs. 0
  misc_feature: MA Experiment 108462 PARAMETER Experiment Name: At_Germinating_Seeds_cDNA_P Parameter: Tissue Value: Germinating Seeds
  misc_feature: MA Experiment ID: 108463 Result: Up-regulated in Transcription
  misc_feature: MA Experiment 108463 PARAMETER Experiment Name: At_Germinating_Seeds_cDNA_P Parameter: Age (day) Value: 3 vs. 0
  misc_feature: MA Experiment 108463 PARAMETER Experiment Name: At_Germinating_Seeds_cDNA_P Parameter: Tissue Value: Germinating Seeds
  misc_feature: MA Experiment ID: 108464 Result: Up-regulated in Transcription
  misc_feature: MA Experiment 108464 PARAMETER Experiment Name: At_Germinating_Seeds_cDNA_P Parameter: Age (day) Value: 4 vs. 0
  misc_feature: MA Experiment 108464 PARAMETER Experiment Name: At_Germinating_Seeds_cDNA_P Parameter: Tissue Value: Germinating Seeds
  misc_feature: MA Experiment ID: 108488 Result: Down-regulated in Transcription
  misc_feature: MA Experiment ID: 108561 Result: Up-regulated in Transcription
  misc_feature: MA Experiment 108561 PARAMETER Experiment Name: At_100uM_ABA_cDNA_P Parameter: Timepoint (hr) Value: 6
  misc_feature: MA Experiment 108561 PARAMETER Experiment Name: At_100uM_ABA_cDNA_P Parameter: Tissue Value: Aerial
  misc_feature: MA Experiment 108561 PARAMETER Experiment Name: At_100uM_ABA_cDNA_P Parameter: Treatment Value: 100uM ABA vs. No Treatment
  misc_feature: MA Experiment ID: 108594 Result: Down-regulated in Transcription
  misc_feature: MA Experiment 108594 PARAMETER Experiment Name: At_Ler-rhl_Root_cDNA_P Parameter: Plant Line Value: null
  misc_feature: MA Experiment ID: 20000069 Result: Up-regulated in Transcription
  misc_feature: MA Experiment 20000069 PARAMETER Experiment Name: At_100uM_ABA_Mutants_cDNA_P Parameter: Plant Line Value: CS23
  misc_feature: MA Experiment 20000069 PARAMETER Experiment Name: At_100uM_ABA_Mutants_cDNA_P Parameter: Timepoint (hr) Value: 6
  misc_feature: MA Experiment 20000069 PARAMETER Experiment Name: At_100uM_ABA_Mutants_cDNA_P Parameter: Tissue Value: Aerial
  misc_feature: MA Experiment 20000069 PARAMETER Experiment Name: At_100uM_ABA_Mutants_cDNA_P Parameter: Treatment Value: 100uM ABA vs. No Treatment
  misc_feature: MA Experiment ID: 20000070 Result: Up-regulated in Transcription
  misc_feature: MA Experiment 20000070 PARAMETER Experiment Name: At_100uM_ABA_Mutants_cDNA_P Parameter: Plant Line Value: CS24
  misc_feature: MA Experiment 20000070 PARAMETER Experiment Name: At_100uM_ABA_Mutants_cDNA_P Parameter: Timepoint (hr) Value: 6
  misc_feature: MA Experiment 20000070 PARAMETER Experiment Name: At_100uM_ABA_Mutants_cDNA_P Parameter: Tissue Value: Aerial
  misc_feature: MA Experiment 20000070 PARAMETER Experiment Name: At_100uM_ABA_Mutants_cDNA_P Parameter: Treatment Value: 100uM ABA vs. No Treatment
  misc_feature: MA Experiment ID: 20000071 Result: Up-regulated in Transcription
  misc_feature: MA Experiment 20000071 PARAMETER Experiment Name: At_100uM_ABA_Mutants_cDNA_P Parameter: Plant Line Value: CS8104
  misc_feature: MA Experiment 20000071 PARAMETER Experiment Name: At_100uM_ABA_Mutants_cDNA_P Parameter: Timepoint (hr) Value: 6
  misc_feature: MA Experiment 20000071 PARAMETER Experiment Name: At_100uM_ABA_Mutants_cDNA_P Parameter: Tissue Value: Aerial
  misc_feature: MA Experiment 20000071 PARAMETER Experiment Name: At_100uM_ABA_Mutants_cDNA_P Parameter: Treatment Value: 100uM ABA vs. No Treatment
  misc_feature: MA Experiment ID: 20000072 Result: Up-regulated in Transcription
  misc_feature: MA Experiment 20000072 PARAMETER Experiment Name: At_100uM_ABA_Mutants_cDNA_P Parameter: Plant Line Value: CS8105
  misc_feature: MA Experiment 20000072 PARAMETER Experiment Name: At_100uM_ABA_Mutants_cDNA_P Parameter: Timepoint (hr) Value: 6
  misc_feature: MA Experiment 20000072 PARAMETER Experiment Name: At_100uM_ABA_Mutants_cDNA_P Parameter: Tissue Value: Aerial
  misc_feature: MA Experiment 20000072 PARAMETER Experiment Name: At_100uM_ABA_Mutants_cDNA_P Parameter: Treatment Value: 100uM ABA vs. No Treatment
  misc_feature: MA Experiment ID: 20000086 Result: Up-regulated in Transcription
  misc_feature: MA Experiment 20000086 PARAMETER Experiment Name: At_100uM_ABA_Mutants_cDNA_P Parameter: Plant Line Value: CS22
  misc_feature: MA Experiment 20000086 PARAMETER Experiment Name: At_100uM_ABA_Mutants_cDNA_P Parameter: Timepoint (hr) Value: 6
  misc_feature: MA Experiment 20000086 PARAMETER Experiment Name: At_100uM_ABA_Mutants_cDNA_P Parameter: Tissue Value: Aerial
  misc_feature: MA Experiment 20000086 PARAMETER Experiment Name: At_100uM_ABA_Mutants_cDNA_P Parameter: Treatment Value: 100uM ABA vs. No Treatment
  misc_feature: MA Experiment ID: 20000087 Result: Up-regulated in Transcription
  misc_feature: MA Experiment 20000087 PARAMETER Experiment Name: At_100uM_ABA_Mutants_cDNA_P Parameter: Plant Line Value: WS
  misc_feature: MA Experiment 20000087 PARAMETER Experiment Name: At_100uM_ABA_Mutants_cDNA_P Parameter: Timepoint (hr) Value: 6
  misc_feature: MA Experiment 20000087 PARAMETER Experiment Name: At_100uM_ABA_Mutants_cDNA_P Parameter: Tissue Value: Aerial
  misc_feature: MA Experiment 20000087 PARAMETER Experiment Name: At_100uM_ABA_Mutants_cDNA_P Parameter: Treatment Value: 100uM ABA vs. No Treatment
  misc_feature: MA Experiment ID: 20000111 Result: Down-regulated in Transcription
  misc_feature: MA Experiment 20000111 PARAMETER Experiment Name: At_42deg_Heat_cDNA_P Parameter: Temperature (deg C) Value: 42 vs. 22
  misc_feature: MA Experiment 20000111 PARAMETER Experiment Name: At_42deg_Heat_cDNA_P Parameter: Timepoint (hr) Value: 6
  misc_feature: MA Experiment 20000111 PARAMETER Experiment Name: At_42deg_Heat_cDNA_P Parameter: Tissue Value: Aerial
  misc_feature: MA Experiment ID: 20000113 Result: Down-regulated in Transcription
  misc_feature: MA Experiment 20000113 PARAMETER Experiment Name: At_42deg_Heat_cDNA_P Parameter: Temperature (deg C) Value: 42 vs. 22
  misc_feature: MA Experiment 20000113 PARAMETER Experiment Name: At_42deg_Heat_cDNA_P Parameter: Timepoint (hr) Value: 8
  misc_feature: MA Experiment 20000113 PARAMETER Experiment Name: At_42deg_Heat_cDNA_P Parameter: Tissue Value: Aerial
  misc_feature: MA Experiment ID: 20000117 Result: Up-regulated in Transcription
  misc_feature: MA Experiment 20000117 PARAMETER Experiment Name: At_100uM_ABA_Mutants_cDNA_P Parameter: Plant Line Value: Columbia
  misc_feature: MA Experiment 20000117 PARAMETER Experiment Name: At_100uM_ABA_Mutants_cDNA_P Parameter: Timepoint (hr) Value: 6
  misc_feature: MA Experiment 20000117 PARAMETER Experiment Name: At_100uM_ABA_Mutants_cDNA_P Parameter: Tissue Value: Aerial
  misc_feature: MA Experiment 20000117 PARAMETER Experiment Name: At_100uM_ABA_Mutants_cDNA_P Parameter: Treatment Value: 100uM ABA vs. No Treatment
  misc_feature: MA Experiment ID: 20000180 Result: Up-regulated in Transcription
  misc_feature: MA Experiment 20000180 PARAMETER Experiment Name: At_Germinating_Seeds_P Parameter: Age (hr) Value: 24 vs. 0
  misc_feature: MA Experiment 20000180 PARAMETER Experiment Name: At_Germinating_Seeds_P Parameter: Tissue Value: Germinating Seeds
  misc_feature: MA Experiment ID: 20000224 Result: Down-regulated in Transcription
  misc_feature: MA Experiment ID: 20000794 Result: Up-regulated in Transcription
  misc_feature: MA Experiment 20000794 PARAMETER Experiment Name: At_Petals_P Parameter: Age (day) Value: 23-25 days
  misc_feature: MA Experiment 20000794 PARAMETER Experiment Name: At_Petals_P Parameter: Plant Line Value: WS
  misc_feature: MA Experiment 20000794 PARAMETER Experiment Name: At_Petals_P Parameter: Tissue Value: Petals vs. Whole plant

SEQ ID NO: 33585 - protein, 130 aa, Arabidopsis thaliana; identical to SEQ ID NO: 29995
  peptide (1)..(130): Ceres Seq. ID no. 13487059
  misc_feature (1)..(108): Pfam Name: Yippee putative zinc-binding protein Pfam Description: Yippee putative zinc-binding protein
  misc_feature (1)..(108): Pfam Name: Yippee putative zinc-binding protein Pfam Description: Yippee putative zinc-binding protein
  misc_feature (14)..(101): Homolog of NCBI NO: 40255199 NR Description: hypothetical protein MGC10500 [Homo sapiens]
  misc_feature (12)..(101): Homolog of NCBI NO: 20840809 NR Description: similar to hypothetical protein FLJ30213
  misc_feature (1)..(130): Homolog of NCBI NO: 15238881 NR Description: zinc-binding protein-related [Arabidopsis
  misc_feature (1)..(103): Homolog of NCBI NO: 15232001 NR Description: Yippee-related protein [Arabidopsis thaliana]
  misc_feature (1)..(116): Homolog of NCBI NO: 15228759 NR Description: Yippee-related protein [Arabidopsis thaliana]
  misc_feature (14)..(101): Homolog of NCBI NO: 40255199 NR Description: hypothetical protein MGC10500 [Homo sapiens]
  misc_feature (1)..(130): Homolog of NCBI NO: 15238881 NR Description: zinc-binding protein-related [Arabidopsis
  misc_feature (1)..(116): Homolog of NCBI NO: 15228759 NR Description: Yippee-related protein [Arabidopsis thaliana]
  misc_feature (1)..(130): Homolog of NCBI NO: 15225631 NR Description: expressed protein [Arabidopsis thaliana]
  misc_feature (1)..(129): Homolog of NCBI NO: 27923880 NR Description: Yippee-like protein
  misc_feature (1)..(129): Homolog of NCBI NO: 28273361 NR Description: putative zinc binding protein
  misc_feature (1)..(130): Homolog of NCBI NO: 18399156 NR Description: expressed protein [Arabidopsis thaliana]
  misc_feature (1)..(130): Homolog of NCBI NO: 21617953 NR Description: yippee-like protein [Arabidopsis thaliana]
  misc_feature (1)..(103): Homolog of NCBI NO: 15232001 NR Description: Yippee-related protein [Arabidopsis thaliana]
  misc_feature (12)..(101): Homolog of NCBI NO: 20840809 NR Description: similar to hypothetical protein FLJ30213
  misc_feature (1)..(130): Homolog of NCBI NO: 21617953 NR Description: yippee-like protein [Arabidopsis thaliana]
  misc_feature (1)..(130): Homolog of NCBI NO: 18399156 NR Description: expressed protein [Arabidopsis thaliana]
  misc_feature (1)..(129): Homolog of NCBI NO: 28273361 NR Description: putative zinc binding protein
  misc_feature (1)..(129): Homolog of NCBI NO: 27923880 NR Description: Yippee-like protein
  misc_feature (1)..(130): Homolog of NCBI NO: 15225631 NR Description: expressed protein [Arabidopsis thaliana]

SEQ ID NO: 33586 - protein, 71 aa, Arabidopsis thaliana; identical to SEQ ID NO: 29996
  peptide (1)..(71): Ceres Seq. ID no. 13487060
  misc_feature (1)..(42): Homolog of NCBI NO: 40255199 NR Description: hypothetical protein MGC10500 [Homo sapiens]
  misc_feature (1)..(42): Homolog of NCBI NO: 20840809 NR Description: similar to hypothetical protein FLJ30213
  misc_feature (1)..(71): Homolog of NCBI NO: 15238881 NR Description: zinc-binding protein-related [Arabidopsis
  misc_feature (1)..(44): Homolog of NCBI NO: 15232001 NR Description: Yippee-related protein [Arabidopsis thaliana]
  misc_feature (1)..(57): Homolog of NCBI NO: 15228759 NR Description: Yippee-related protein [Arabidopsis thaliana]
  misc_feature (1)..(71): Homolog of NCBI NO: 21617953 NR Description: yippee-like protein [Arabidopsis thaliana]
  misc_feature (1)..(71): Homolog of NCBI NO: 18399156 NR Description: expressed protein [Arabidopsis thaliana]
  misc_feature (1)..(70): Homolog of NCBI NO: 28273361 NR Description: putative zinc binding protein
  misc_feature (1)..(70): Homolog of NCBI NO: 27923880 NR Description: Yippee-like protein
  misc_feature (1)..(71): Homolog of NCBI NO: 15225631 NR Description: expressed protein [Arabidopsis thaliana]
  misc_feature (1)..(42): Homolog of NCBI NO: 40255199 NR Description: hypothetical protein MGC10500 [Homo sapiens]
  misc_feature (1)..(42): Homolog of NCBI NO: 20840809 NR Description: similar to hypothetical protein FLJ30213
  misc_feature (1)..(71): Homolog of NCBI NO: 15238881 NR Description: zinc-binding protein-related [Arabidopsis
  misc_feature (1)..(44): Homolog of NCBI NO: 15232001 NR Description: Yippee-related protein [Arabidopsis thaliana]
  misc_feature (1)..(57): Homolog of NCBI NO: 15228759 NR Description: Yippee-related protein [Arabidopsis thaliana]
  misc_feature (1)..(71): Homolog of NCBI NO: 21617953 NR Description: yippee-like protein [Arabidopsis thaliana]
  misc_feature (1)..(71): Homolog of NCBI NO: 18399156 NR Description: expressed protein [Arabidopsis thaliana]
  misc_feature (1)..(70): Homolog of NCBI NO: 28273361 NR Description: putative zinc binding protein
  misc_feature (1)..(70): Homolog of NCBI NO: 27923880 NR Description: Yippee-like protein
  misc_feature (1)..(71): Homolog of NCBI NO: 15225631 NR Description: expressed protein [Arabidopsis thaliana]

SEQ ID NO: 33587 - protein, 70 aa, Arabidopsis thaliana; identical to SEQ ID NO: 29997
  peptide (1)..(70): Ceres Seq. ID no. 13487061
  misc_feature (1)..(41): Homolog of NCBI NO: 40255199 NR Description: hypothetical protein MGC10500 [Homo sapiens]
  misc_feature (1)..(41): Homolog of NCBI NO: 20840809 NR Description: similar to hypothetical protein FLJ30213
  misc_feature (1)..(70): Homolog of NCBI NO: 15238881 NR Description: zinc-binding protein-related [Arabidopsis
  misc_feature (1)..(43): Homolog of NCBI NO: 15232001 NR Description: Yippee-related protein [Arabidopsis thaliana]
  misc_feature (1)..(56): Homolog of NCBI NO: 15228759 NR Description: Yippee-related protein [Arabidopsis thaliana]
  misc_feature (1)..(70): Homolog of NCBI NO: 21617953 NR Description: yippee-like protein [Arabidopsis thaliana]
  misc_feature (1)..(70): Homolog of NCBI NO: 18399156 NR Description: expressed protein [Arabidopsis thaliana]
  misc_feature (1)..(69): Homolog of NCBI NO: 28273361 NR Description: putative zinc binding protein
  misc_feature (1)..(69): Homolog of NCBI NO: 27923880 NR Description: Yippee-like protein
  misc_feature (1)..(70): Homolog of NCBI NO: 15225631 NR Description: expressed protein [Arabidopsis thaliana]
  misc_feature (1)..(41): Homolog of NCBI NO: 40255199 NR Description: hypothetical protein MGC10500 [Homo sapiens]
  misc_feature (1)..(41): Homolog of NCBI NO: 20840809 NR Description: similar to hypothetical protein FLJ30213
  misc_feature (1)..(70): Homolog of NCBI NO: 15238881 NR Description: zinc-binding protein-related [Arabidopsis
  misc_feature (1)..(43): Homolog of NCBI NO: 15232001 NR Description: Yippee-related protein [Arabidopsis thaliana]
  misc_feature (1)..(56): Homolog of NCBI NO: 15228759 NR Description: Yippee-related protein [Arabidopsis thaliana]
  misc_feature (1)..(70): Homolog of NCBI NO: 21617953 NR Description: yippee-like protein [Arabidopsis thaliana]
  misc_feature (1)..(70): Homolog of NCBI NO: 18399156 NR Description: expressed protein [Arabidopsis thaliana]
  misc_feature (1)..(69): Homolog of NCBI NO: 28273361 NR Description: putative zinc binding protein
  misc_feature (1)..(69): Homolog of NCBI NO: 27923880 NR Description: Yippee-like protein
  misc_feature (1)..(70): Homolog of NCBI NO: 15225631 NR Description: expressed protein [Arabidopsis thaliana]

SEQ ID NO: 33588 - DNA, 1635 bp, Arabidopsis thaliana; identical to SEQ ID NO: 29998
  misc_feature (1)..(1635): Ceres Seq. ID no. 12327239
  misc_feature: MA Experiment ID: 108573 Result: Up-regulated in Transcription
  misc_feature: MA Experiment 108573 PARAMETER Experiment Name: At_Drought_cDNA_P Parameter: Timepoint (hr) Value: 6
  misc_feature: MA Experiment 108573 PARAMETER Experiment Name: At_Drought_cDNA_P Parameter: Tissue Value: Aerial
  misc_feature: MA Experiment 108573 PARAMETER Experiment Name: At_Drought_cDNA_P Parameter: Treatment Value: Drought vs. No Drought
  misc_feature: MA Experiment ID: 20000093 Result: Up-regulated in Transcription
  misc_feature: MA Experiment 20000093 PARAMETER Experiment Name: At_42deg_Heat_cDNA_P Parameter: Temperature (deg C) Value: 42 vs. 22
  misc_feature: MA Experiment 20000093 PARAMETER Experiment Name: At_42deg_Heat_cDNA_P Parameter: Timepoint (hr) Value: 0.5
  misc_feature: MA Experiment 20000093 PARAMETER Experiment Name: At_42deg_Heat_cDNA_P Parameter: Tissue Value: Aerial
  misc_feature: MA Experiment ID: 20000184 Result: Up-regulated in Transcription
  misc_feature: MA Experiment 20000184 PARAMETER Experiment Name: At_Shoots__P Parameter: Age (day) Value: 7
  misc_feature: MA Experiment 20000184 PARAMETER Experiment Name: At_Shoots__P Parameter: Tissue Value: Shoots vs. Whole Plant
  misc_feature: MA Experiment ID: 20000224 Result: Down-regulated in Transcription

SEQ ID NO: 33589 - protein, 293 aa, Arabidopsis thaliana; identical to SEQ ID NO: 29999
  peptide (1)..(293): Ceres Seq. ID no. 12327240
  misc_feature (22)..(76): Homolog of NCBI NO: 15219845 NR Description: hypothetical protein; protein id: At1g22220.1
  misc_feature (151)..(292): Homolog of NCBI NO: 15219845 NR Description: hypothetical protein; protein id: At1g22220.1
  misc_feature (22)..(135): Homolog of NCBI NO: 18411823 NR Description: expressed protein
  misc_feature (150)..(291): Homolog of NCBI NO: 18411823 NR Description: expressed protein
  misc_feature (11)..(137): Homolog of NCBI NO: 34909194 NR Description: P0425G02.20 [Oryza sativa (japonica
  misc_feature (146)..(293): Homolog of NCBI NO: 34909194 NR Description: P0425G02.20 [Oryza sativa (japonica
  misc_feature (23)..(292): Homolog of NCBI NO: 34909910 NR Description: P0665A11.15 [Oryza sativa (japonica
  misc_feature (1)..(292): Homolog of NCBI NO: 18397400 NR Description: expressed protein
  misc_feature (1)..(292): Homolog of NCBI NO: 15237391 NR Description: putative protein
  misc_feature (1)..(292): Homolog of NCBI NO: 15236865 NR Description: hypothetical protein; protein id: At4g18380.1

SEQ ID NO: 33590 - DNA, 832 bp, Arabidopsis thaliana; identical to SEQ ID NO: 26742
  misc_feature (1)..(832): Ceres Seq. ID no. 12482239
  misc_feature: MA Experiment ID: 108595 Result: Down-regulated in Transcription
  misc_feature: MA Experiment 108595 PARAMETER Experiment Name: At_Ler-pi_Ovule_cDNA_P Parameter: Plant Line Value: null
  misc_feature: MA Experiment ID: 20000180 Result: Up-regulated in Transcription
  misc_feature: MA Experiment 20000180 PARAMETER Experiment Name: At_Germinating_Seeds_P Parameter: Age (hr) Value: 24 vs. 0
  misc_feature: MA Experiment 20000180 PARAMETER Experiment Name: At_Germinating_Seeds_P Parameter: Tissue Value: Germinating Seeds
  misc_feature: MA Experiment ID: 20000184 Result: Up-regulated in Transcription
  misc_feature: MA Experiment 20000184 PARAMETER Experiment Name: At_Shoots__P Parameter: Age (day) Value: 7
  misc_feature: MA Experiment 20000184 PARAMETER Experiment Name: At_Shoots__P Parameter: Tissue Value: Shoots vs. Whole Plant
  misc_feature: MA Experiment ID: 20000185 Result: Down-regulated in Transcription
  misc_feature: MA Experiment 20000185 PARAMETER Experiment Name: At_Roots__P Parameter: Age (day) Value: 7 vs. 21
  misc_feature: MA Experiment 20000185 PARAMETER Experiment Name: At_Roots__P Parameter: Organism Value: A. thaliana
  misc_feature: MA Experiment 20000185 PARAMETER Experiment Name: At_Roots__P Parameter: Tissue Value: Roots vs. Whole Plant
  misc_feature: MA Experiment ID: 20000269 Result: Down-regulated in Transcription
  misc_feature: MA Experiment 20000269 PARAMETER Experiment Name: At_1mM_KNO3_L-vs-H_Roots_P Parameter: Age (day) Value: 7,10,12
  misc_feature: MA Experiment 20000269 PARAMETER Experiment Name: At_1mM_KNO3_L-vs-H_Roots_P Parameter: Organism Value: A. thaliana
  misc_feature: MA Experiment 20000269 PARAMETER Experiment Name: At_1mM_KNO3_L-vs-H_Roots_P Parameter: Plant Line Value: WS
  misc_feature: MA Experiment 20000269 PARAMETER Experiment Name: At_1mM_KNO3_L-vs-H_Roots_P Parameter: Timepoint (day) Value: 7,10,12
  misc_feature: MA Experiment 20000269 PARAMETER Experiment Name: At_1mM_KNO3_L-vs-H_Roots_P Parameter: Tissue Value: Roots
  misc_feature: MA Experiment 20000269 PARAMETER Experiment Name: At_1mM_KNO3_L-vs-H_Roots_P Parameter: Treatment Value: 1mM KNO3 vs. 50mM KNO3
  misc_feature: MA Experiment ID: 20000437 Result: Down-regulated in Transcription
  misc_feature: MA Experiment 20000437 PARAMETER Experiment Name: At_Drought_P Parameter: Age (day) Value: 8
  misc_feature: MA Experiment 20000437 PARAMETER Experiment Name: At_Drought_P Parameter: Organism Value: A. thaliana
  misc_feature: MA Experiment 20000437 PARAMETER Experiment Name: At_Drought_P Parameter: Plant Line Value: WS
  misc_feature: MA Experiment 20000437 PARAMETER Experiment Name: At_Drought_P Parameter: Timepoint (hr) Value: 24
  misc_feature: MA Experiment 20000437 PARAMETER Experiment Name: At_Drought_P Parameter: Tissue Value: Whole Plant
  misc_feature: MA Experiment 20000437 PARAMETER Experiment Name: At_Drought_P Parameter: Treatment Value: Drought vs. No Drought
  misc_feature: MA Experiment ID: 20000438 Result: Up-regulated in Transcription
  misc_feature: MA Experiment 20000438 PARAMETER Experiment Name: At_Shoots__P Parameter: Age (day) Value: 14
  misc_feature: MA Experiment 20000438 PARAMETER Experiment Name: At_Shoots__P Parameter: Tissue Value: Shoots vs. Whole Plant
  misc_feature: MA Experiment ID: 20000439 Result: Down-regulated in Transcription
  misc_feature: MA Experiment 20000439 PARAMETER Experiment Name: At_Roots__P Parameter: Age (day) Value: 14 vs. 21
  misc_feature: MA Experiment 20000439 PARAMETER Experiment Name: At_Roots__P Parameter: Organism Value: A. thaliana
  misc_feature: MA Experiment 20000439 PARAMETER Experiment Name: At_Roots__P Parameter: Tissue Value: Roots vs. Whole Plant
  misc_feature: MA Experiment ID: 20000794 Result: Down-regulated in Transcription
  misc_feature: MA Experiment 20000794 PARAMETER Experiment Name: At_Petals_P Parameter: Age (day) Value: 23-25 days
  misc_feature: MA Experiment 20000794 PARAMETER Experiment Name: At_Petals_P Parameter: Plant Line Value: WS
  misc_feature: MA Experiment 20000794 PARAMETER Experiment Name: At_Petals_P Parameter: Tissue Value: Petals vs. Whole plant
  misc_feature: MA Experiment ID: 20001248 Result: Down-regulated in Transcription
  misc_feature: MA Experiment 20001248 PARAMETER Experiment Name: At_Far-red-induction_P Parameter: Age (day) Value: 7
  misc_feature: MA Experiment 20001248 PARAMETER Experiment Name: At_Far-red-induction_P Parameter: Light Value: Far-red vs. White
  misc_feature: MA Experiment 20001248 PARAMETER Experiment Name: At_Far-red-induction_P Parameter: Organism Value: A. thaliana
  misc_feature: MA Experiment 20001248 PARAMETER Experiment Name: At_Far-red-induction_P Parameter: Plant Line Value: Columbia
  misc_feature: MA Experiment 20001248 PARAMETER Experiment Name: At_Far-red-induction_P Parameter: Timepoint (hr) Value: 4
  misc_feature: MA Experiment 20001248 PARAMETER Experiment Name: At_Far-red-induction_P Parameter: Tissue Value: Whole Plant
  misc_feature: MA Experiment ID: 20001555 Result: Down-regulated in Transcription
  misc_feature: MA Experiment 20001555 PARAMETER Experiment Name: At_Drought_Soil_Dry_P Parameter: Age (day) Value: 24
  misc_feature: MA Experiment 20001555 PARAMETER Experiment Name: At_Drought_Soil_Dry_P Parameter: Organism Value: A. thaliana
  misc_feature: MA Experiment 20001555 PARAMETER Experiment Name: At_Drought_Soil_Dry_P Parameter: Plant Line Value: WS
  misc_feature: MA Experiment 20001555 PARAMETER Experiment Name: At_Drought_Soil_Dry_P Parameter: Post Timepoint (hr) Value: None
  misc_feature: MA Experiment 20001555 PARAMETER Experiment Name: At_Drought_Soil_Dry_P Parameter: Post-Treatment Value: None
  misc_feature: MA Experiment 20001555 PARAMETER Experiment Name: At_Drought_Soil_Dry_P Parameter: Timepoint (day) Value: 10
  misc_feature: MA Experiment 20001555 PARAMETER Experiment Name: At_Drought_Soil_Dry_P Parameter: Treatment Value: Drought vs. No Drought
  misc_feature: MA Experiment ID: 20001556 Result: Down-regulated in Transcription
  misc_feature: MA Experiment 20001556 PARAMETER Experiment Name: At_Drought_Soil_Dry_P Parameter: Age (day) Value: 26
  misc_feature: MA Experiment 20001556 PARAMETER Experiment Name: At_Drought_Soil_Dry_P Parameter: Organism Value: A. thaliana
  misc_feature: MA Experiment 20001556 PARAMETER Experiment Name: At_Drought_Soil_Dry_P Parameter: Plant Line Value: WS
  misc_feature: MA Experiment 20001556 PARAMETER Experiment Name: At_Drought_Soil_Dry_P Parameter: Post Timepoint (hr) Value: None
  misc_feature: MA Experiment 20001556 PARAMETER Experiment Name: At_Drought_Soil_Dry_P Parameter: Post-Treatment Value: None
  misc_feature: MA Experiment 20001556 PARAMETER Experiment Name: At_Drought_Soil_Dry_P Parameter: Timepoint (day) Value: 12
  misc_feature: MA Experiment 20001556 PARAMETER Experiment Name: At_Drought_Soil_Dry_P Parameter: Treatment Value: Drought vs. No Drought
  misc_feature: MA Experiment ID: 20001557 Result: Down-regulated in Transcription
  misc_feature: MA Experiment 20001557 PARAMETER Experiment Name: At_Drought_Soil_Dry_P Parameter: Age (day) Value: 27
  misc_feature: MA Experiment 20001557 PARAMETER Experiment Name: At_Drought_Soil_Dry_P Parameter: Organism Value: A. thaliana
  misc_feature: MA Experiment 20001557 PARAMETER Experiment Name: At_Drought_Soil_Dry_P Parameter: Plant Line Value: WS
  misc_feature: MA Experiment 20001557 PARAMETER Experiment Name: At_Drought_Soil_Dry_P Parameter: Post Timepoint (hr) Value: 3
  misc_feature: MA Experiment 20001557 PARAMETER Experiment Name: At_Drought_Soil_Dry_P Parameter: Post-Treatment Value: Re-Water vs. No Drought
  misc_feature: MA Experiment 20001557 PARAMETER Experiment Name: At_Drought_Soil_Dry_P Parameter: Timepoint (day) Value: 13
  misc_feature: MA Experiment 20001557 PARAMETER Experiment Name: At_Drought_Soil_Dry_P Parameter: Treatment Value: Drought vs. No Drought
  misc_feature: MA Experiment ID: 20001559 Result: Down-regulated in Transcription
  misc_feature: MA Experiment 20001559 PARAMETER Experiment Name: At_Drought_Soil_Dry_P Parameter: Age (day) Value: 28
  misc_feature: MA Experiment 20001559 PARAMETER Experiment Name: At_Drought_Soil_Dry_P Parameter: Organism Value: A. thaliana
  misc_feature: MA Experiment 20001559 PARAMETER Experiment Name: At_Drought_Soil_Dry_P Parameter: Plant Line Value: WS
  misc_feature: MA Experiment 20001559 PARAMETER Experiment Name: At_Drought_Soil_Dry_P Parameter: Post Timepoint (hr) Value: 29
  misc_feature: MA Experiment 20001559 PARAMETER Experiment Name: At_Drought_Soil_Dry_P Parameter: Post-Treatment Value: Re-Water vs. No Drought
  misc_feature: MA Experiment 20001559 PARAMETER Experiment Name: At_Drought_Soil_Dry_P Parameter: Timepoint (day) Value: 14
  misc_feature: MA Experiment 20001559 PARAMETER Experiment Name: At_Drought_Soil_Dry_P Parameter: Treatment Value: Drought vs. No Drought
  misc_feature: MA Experiment ID: 20001904 Result: Down-regulated in Transcription
  misc_feature: MA Experiment 20001904 PARAMETER Experiment Name: At_Drought_Reproduction_P Parameter: Age (day) Value: 37
  misc_feature: MA Experiment 20001904 PARAMETER Experiment Name: At_Drought_Reproduction_P Parameter: Organism Value: A. thaliana
  misc_feature: MA Experiment 20001904 PARAMETER Experiment Name: At_Drought_Reproduction_P Parameter: Plant Line Value: WS
  misc_feature: MA Experiment 20001904 PARAMETER Experiment Name: At_Drought_Reproduction_P Parameter: Timepoint (day) Value: 7
  misc_feature: MA Experiment 20001904 PARAMETER Experiment Name: At_Drought_Reproduction_P Parameter: Tissue Value: Rosettes
  misc_feature: MA Experiment 20001904 PARAMETER Experiment Name: At_Drought_Reproduction_P Parameter: Treatment Value: Drought vs. No Drought
  misc_feature: MA Experiment ID: 20001905 Result: Down-regulated in Transcription
  misc_feature: MA Experiment 20001905 PARAMETER Experiment Name: At_Drought_Reproduction_P Parameter: Age (day) Value: 40
  misc_feature: MA Experiment 20001905 PARAMETER Experiment Name: At_Drought_Reproduction_P Parameter: Organism Value: A. thaliana
  misc_feature: MA Experiment 20001905 PARAMETER Experiment Name: At_Drought_Reproduction_P Parameter: Plant Line Value: WS
  misc_feature: MA Experiment 20001905 PARAMETER Experiment Name: At_Drought_Reproduction_P Parameter: Timepoint (day) Value: 10
  misc_feature: MA Experiment 20001905 PARAMETER Experiment Name: At_Drought_Reproduction_P Parameter: Tissue Value: Rosettes
  misc_feature: MA Experiment 20001905 PARAMETER Experiment Name: At_Drought_Reproduction_P Parameter: Treatment Value: Drought vs. No Drought
  misc_feature: MA Experiment ID: 20001906 Result: Down-regulated in Transcription
  misc_feature: MA Experiment 20001906 PARAMETER Experiment Name: At_Drought_Reproduction_P Parameter: Age (day) Value: 35
  misc_feature: MA Experiment 20001906 PARAMETER Experiment Name: At_Drought_Reproduction_P Parameter: Organism Value: A. thaliana
  misc_feature: MA Experiment 20001906 PARAMETER Experiment Name: At_Drought_Reproduction_P Parameter: Plant Line Value: WS
  misc_feature: MA Experiment 20001906 PARAMETER Experiment Name: At_Drought_Reproduction_P Parameter: Timepoint (day) Value: 5
  misc_feature: MA Experiment 20001906 PARAMETER Experiment Name: At_Drought_Reproduction_P Parameter: Tissue Value: Siliques
  misc_feature: MA Experiment 20001906 PARAMETER Experiment Name: At_Drought_Reproduction_P Parameter: Treatment Value: Drought vs. No Drought
  misc_feature: MA Experiment ID: 20001908 Result: Down-regulated in Transcription
  misc_feature: MA Experiment 20001908 PARAMETER Experiment Name: At_Drought_Reproduction_P Parameter: Age (day) Value: 40
  misc_feature: MA Experiment 20001908 PARAMETER Experiment Name: At_Drought_Reproduction_P Parameter: Organism Value: A. thaliana
  misc_feature: MA Experiment 20001908 PARAMETER Experiment Name: At_Drought_Reproduction_P Parameter: Plant Line Value: WS
  misc_feature: MA Experiment 20001908 PARAMETER Experiment Name: At_Drought_Reproduction_P Parameter: Timepoint (day) Value: 10
  misc_feature: MA Experiment 20001908 PARAMETER Experiment Name: At_Drought_Reproduction_P Parameter: Tissue Value: Siliques
  misc_feature: MA Experiment 20001908 PARAMETER Experiment Name: At_Drought_Reproduction_P Parameter: Treatment Value: Drought vs. No Drought

SEQ ID NO: 33591 - protein, 235 aa, Arabidopsis thaliana; identical to SEQ ID NO: 26743
  peptide (1)..(235): Ceres Seq. ID no. 12482240
  misc_feature (127)..(160): Pfam Name: Photosystem II protein Y (PsbY) Pfam Description: Photosystem II protein Y (PsbY)
  misc_feature (127)..(160): Pfam Name: Photosystem II protein Y (PsbY) Pfam Description: Photosystem II protein Y (PsbY)
  misc_feature (46)..(233): Homolog of NCBI NO: 6093830 NR Description: Photosystem II core complex proteins psbY,
  misc_feature (51)..(235): Homolog of NCBI NO: 21593330 NR Description: unknown [Arabidopsis thaliana]
  misc_feature (51)..(235): Homolog of NCBI NO: 21593330 NR Description: unknown [Arabidopsis thaliana]
  misc_feature (47)..(235): Homolog of NCBI NO: 15220530 NR Description: F12A21.13
  misc_feature (46)..(233): Homolog of NCBI NO: 6093830 NR Description: Photosystem II core complex proteins psbY,
  misc_feature (47)..(235): Homolog of NCBI NO: 15220530 NR Description: F12A21.13

SEQ ID NO: 33592 - protein, 189 aa, Arabidopsis thaliana; identical to SEQ ID NO: 26744
  peptide (1)..(189): Ceres Seq. ID no. 12482241
  misc_feature (81)..(114): Pfam Name: Photosystem II protein Y (PsbY) Pfam Description: Photosystem II protein Y (PsbY)
  misc_feature (81)..(114): Pfam Name: Photosystem II protein Y (PsbY) Pfam Description: Photosystem II protein Y (PsbY)
  misc_feature (1)..(187): Homolog of NCBI NO: 6093830 NR Description: Photosystem II core complex proteins psbY,
  misc_feature (5)..(189): Homolog of NCBI NO: 21593330 NR Description: unknown [Arabidopsis thaliana]
  misc_feature (5)..(189): Homolog of NCBI NO: 21593330 NR Description: unknown [Arabidopsis thaliana]
  misc_feature (1)..(189): Homolog of NCBI NO: 15220530 NR Description: F12A21.13
  misc_feature (1)..(187): Homolog of NCBI NO: 6093830 NR Description: Photosystem II core complex proteins psbY,
  misc_feature (1)..(189): Homolog of NCBI NO: 15220530 NR Description: F12A21.13

SEQ ID NO: 33593 - protein, 185 aa, Arabidopsis thaliana; identical to SEQ ID NO: 26745
  peptide (1)..(185): Ceres Seq. ID no. 12482242
  misc_feature (77)..(110): Pfam Name: Photosystem II protein Y (PsbY) Pfam Description: Photosystem II protein Y (PsbY)
  misc_feature (77)..(110): Pfam Name: Photosystem II protein Y (PsbY) Pfam Description: Photosystem II protein Y (PsbY)
  misc_feature (1)..(183): Homolog of NCBI NO: 6093830 NR Description: Photosystem II core complex proteins psbY,
  misc_feature (1)..(185): Homolog of NCBI NO: 21593330 NR Description: unknown [Arabidopsis thaliana]
  misc_feature (1)..(185): Homolog of NCBI NO: 21593330 NR Description: unknown [Arabidopsis thaliana]
  misc_feature (1)..(185): Homolog of NCBI NO: 15220530 NR Description: F12A21.13
  misc_feature (1)..(183): Homolog of NCBI NO: 6093830 NR Description: Photosystem II core complex proteins psbY,
  misc_feature (1)..(185): Homolog of NCBI NO: 15220530 NR Description: F12A21.13

SEQ ID NO: 33594 - DNA, 1055 bp, Arabidopsis thaliana; identical to SEQ ID NO: 30004
  misc_feature (1)..(1055): Ceres Seq. ID no. 13503881
  misc_feature: MA Experiment ID: 108433 Result: Up-regulated in Transcription
  misc_feature: MA Experiment 108433 PARAMETER Experiment Name: At_rhl_Mutant2_cDNA_P Parameter: Age (day) Value: 7
  misc_feature: MA Experiment 108433 PARAMETER Experiment Name: At_rhl_Mutant2_cDNA_P Parameter: Organism Value: A. thaliana
  misc_feature: MA Experiment 108433 PARAMETER Experiment Name: At_rhl_Mutant2_cDNA_P Parameter: Plant Line Value: rhl Mutant vs. wt landsburg
  misc_feature: MA Experiment 108433 PARAMETER Experiment Name: At_rhl_Mutant2_cDNA_P Parameter: Tissue Value: Roots
  misc_feature: MA Experiment ID: 108461 Result: Up-regulated in Transcription
  misc_feature: MA Experiment 108461 PARAMETER Experiment Name: At_Germinating_Seeds_cDNA_P Parameter: Age (day) Value: 1 vs. 0
  misc_feature: MA Experiment 108461 PARAMETER Experiment Name: At_Germinating_Seeds_cDNA_P Parameter: Tissue Value: Germinating Seeds
  misc_feature: MA Experiment ID: 108462 Result: Up-regulated in Transcription
  misc_feature: MA Experiment 108462 PARAMETER Experiment Name: At_Germinating_Seeds_cDNA_P Parameter: Age (day) Value: 2 vs. 0
  misc_feature: MA Experiment 108462 PARAMETER Experiment Name: At_Germinating_Seeds_cDNA_P Parameter: Tissue Value: Germinating Seeds
  misc_feature: MA Experiment ID: 108463 Result: Up-regulated in Transcription
  misc_feature: MA Experiment 108463 PARAMETER Experiment Name: At_Germinating_Seeds_cDNA_P Parameter: Age (day) Value: 3 vs. 0
  misc_feature: MA Experiment 108463 PARAMETER Experiment Name: At_Germinating_Seeds_cDNA_P Parameter: Tissue Value: Germinating Seeds
  misc_feature: MA Experiment ID: 108464 Result: Up-regulated in Transcription
  misc_feature: MA Experiment 108464 PARAMETER Experiment Name: At_Germinating_Seeds_cDNA_P Parameter: Age (day) Value: 4 vs. 0
  misc_feature: MA Experiment 108464 PARAMETER Experiment Name: At_Germinating_Seeds_cDNA_P Parameter: Tissue Value: Germinating Seeds
  misc_feature: MA Experiment ID: 20000179 Result: Up-regulated in Transcription
  misc_feature: MA Experiment 20000179 PARAMETER Experiment Name: At_Germinating_Seeds_P Parameter: Age (hr) Value: 6 vs. 0
  misc_feature: MA Experiment 20000179 PARAMETER Experiment Name: At_Germinating_Seeds_P Parameter: Tissue Value: Germinating Seeds
  misc_feature: MA Experiment ID: 20000180 Result: Up-regulated in Transcription
  misc_feature: MA Experiment 20000180 PARAMETER Experiment Name: At_Germinating_Seeds_P Parameter: Age (hr) Value: 24 vs. 0
  misc_feature: MA Experiment 20000180 PARAMETER Experiment Name: At_Germinating_Seeds_P Parameter: Tissue Value: Germinating Seeds
  misc_feature: MA Experiment ID: 20000185 Result: Up-regulated in Transcription
  misc_feature: MA Experiment 20000185 PARAMETER Experiment Name: At_Roots__P Parameter: Age (day) Value: 7 vs. 21
  misc_feature: MA Experiment 20000185 PARAMETER Experiment Name: At_Roots__P Parameter: Organism Value: A. thaliana
  misc_feature: MA Experiment 20000185 PARAMETER Experiment Name: At_Roots__P Parameter: Tissue Value: Roots vs. Whole Plant
  misc_feature: MA Experiment ID: 20000224 Result: Up-regulated in Transcription
  misc_feature: MA Experiment ID: 20000227 Result: Down-regulated in Transcription
  misc_feature: MA Experiment 20000227 PARAMETER Experiment Name: At_Root-Tips-vs-Tops_P Parameter: Tissue Value: Root Tips vs. Root Tops
  misc_feature: MA Experiment ID: 20000235 Result: Up-regulated in Transcription
  misc_feature: MA Experiment 20000235 PARAMETER Experiment Name: At_Siliques_P Parameter: Age (day) Value: 21
  misc_feature: MA Experiment 20000235 PARAMETER Experiment Name: At_Siliques_P Parameter: Organism Value: A. thaliana
  misc_feature: MA Experiment 20000235 PARAMETER Experiment Name: At_Siliques_P Parameter: Plant Line Value: WS
  misc_feature: MA Experiment 20000235 PARAMETER Experiment Name: At_Siliques_P Parameter: Tissue Value: 5-10mm Siliques vs. Whole Plant
  misc_feature: MA Experiment ID: 20000439 Result: Up-regulated in Transcription
  misc_feature: MA Experiment 20000439 PARAMETER Experiment Name: At_Roots__P Parameter: Age (day) Value: 14 vs. 21
  misc_feature: MA Experiment 20000439 PARAMETER Experiment Name: At_Roots__P Parameter: Organism Value: A. thaliana
  misc_feature: MA Experiment 20000439 PARAMETER Experiment Name: At_Roots__P Parameter: Tissue Value: Roots vs. Whole Plant
  misc_feature: MA Experiment ID: 20001905 Result: Down-regulated in Transcription
  misc_feature: MA Experiment 20001905 PARAMETER Experiment Name: At_Drought_Reproduction_P Parameter: Age (day) Value: 40
  misc_feature: MA Experiment 20001905 PARAMETER Experiment Name: At_Drought_Reproduction_P Parameter: Organism Value: A. thaliana
  misc_feature: MA Experiment 20001905 PARAMETER Experiment Name: At_Drought_Reproduction_P Parameter: Plant Line Value: WS
  misc_feature: MA Experiment 20001905 PARAMETER Experiment Name: At_Drought_Reproduction_P Parameter: Timepoint (day) Value: 10
  misc_feature: MA Experiment 20001905 PARAMETER Experiment Name: At_Drought_Reproduction_P Parameter: Tissue Value: Rosettes
  misc_feature: MA Experiment 20001905 PARAMETER Experiment Name: At_Drought_Reproduction_P Parameter: Treatment Value: Drought vs. No Drought

SEQ ID NO: 33595 - protein, 267 aa, Arabidopsis thaliana; identical to SEQ ID NO: 30005
  peptide (1)..(267): Ceres Seq. ID no. 13503882
  misc_feature (108)..(159): Pfam Name: Helix-loop-helix DNA-binding domain Pfam Description: Helix-loop-helix DNA-binding domain
  misc_feature (73)..(227): Homolog of NCBI NO: 7487183 NR Description: hypothetical protein T19K4.190 - Arabidopsis
  misc_feature (93)..(267): Homolog of NCBI NO: 22331274 NR Description: bHLH protein [Arabidopsis thaliana]
  misc_feature (93)..(267): Homolog of NCBI NO: 20127030 NR Description: putative bHLH transcription factor [Arabidopsis
  misc_feature (92)..(267): Homolog of NCBI NO: 30682847 NR Description: bHLH protein [Arabidopsis thaliana]
  misc_feature (92)..(267): Homolog of NCBI NO: 18414212 NR Description: bHLH protein [Arabidopsis thaliana]
  misc_feature (68)..(267): Homolog of NCBI NO: 29367409 NR Description: helix-loop-helix-like protein
  misc_feature (49)..(267): Homolog of NCBI NO: 38636768 NR Description: helix-loop-helix-like protein
  misc_feature (42)..(267): Homolog of NCBI NO: 15239706 NR Description: bHLH protein [Arabidopsis thaliana]
  misc_feature (42)..(267): Homolog of NCBI NO: 21592325 NR Description: bHLH transcription factor, putative [Arabidopsis
  misc_feature (42)..(267): Homolog of NCBI NO: 15223710 NR Description: bHLH protein [Arabidopsis thaliana]

SEQ ID NO: 33596 - protein, 226 aa, Arabidopsis thaliana; identical to SEQ ID NO: 30006
  peptide (1)..(226): Ceres Seq. ID no. 13503883
  misc_feature (67)..(118): Pfam Name: Helix-loop-helix DNA-binding domain Pfam Description: Helix-loop-helix DNA-binding domain
  misc_feature (32)..(186): Homolog of NCBI NO: 7487183 NR Description: hypothetical protein T19K4.190 - Arabidopsis
  misc_feature (52)..(226): Homolog of NCBI NO: 22331274 NR Description: bHLH protein [Arabidopsis thaliana]
  misc_feature (52)..(226): Homolog of NCBI NO: 20127030 NR Description: putative bHLH transcription factor [Arabidopsis
  misc_feature (51)..(226): Homolog of NCBI NO: 30682847 NR Description: bHLH protein [Arabidopsis thaliana]
  misc_feature (51)..(226): Homolog of NCBI NO: 18414212 NR Description: bHLH protein [Arabidopsis thaliana]
  misc_feature (27)..(226): Homolog of NCBI NO: 29367409 NR Description: helix-loop-helix-like protein
  misc_feature (8)..(226): Homolog of NCBI NO: 38636768 NR Description: helix-loop-helix-like protein
  misc_feature (1)..(226): Homolog of NCBI NO: 15239706 NR Description: bHLH protein [Arabidopsis thaliana]
  misc_feature (1)..(226): Homolog of NCBI NO: 21592325 NR Description: bHLH transcription factor, putative [Arabidopsis
  misc_feature (1)..(226): Homolog of NCBI NO: 15223710 NR Description: bHLH protein [Arabidopsis thaliana]

SEQ ID NO: 33597 - DNA, 810 bp, Arabidopsis thaliana; identical to SEQ ID NO: 30007
  misc_feature (1)..(810): Ceres Seq. ID no. 12332907
  misc_feature: MA Experiment ID: 108434 Result: Up-regulated in Transcription
  misc_feature: MA Experiment 108434 PARAMETER Experiment Name: At_Root_Tips_cDNA_P Parameter: Tissue Value: Root Tips
  misc_feature: MA Experiment ID: 20000495 Result: Up-regulated in Transcription
  misc_feature: MA Experiment 20000495 PARAMETER Experiment Name: At_Guard_Cells_P Parameter: Harvest Date Value: 8/2/2002
  misc_feature: MA Experiment 20000495 PARAMETER Experiment Name: At_Guard_Cells_P Parameter: Organism Value: A. thaliana
  misc_feature: MA Experiment 20000495 PARAMETER Experiment Name: At_Guard_Cells_P Parameter: Tissue Value: Guard Cells vs. Leaves

SEQ ID NO: 33598 - protein, 217 aa, Arabidopsis thaliana; identical to SEQ ID NO: 30008
  peptide (1)..(217): Ceres Seq. ID no. 12332908
  misc_feature (35)..(214): Pfam Name: Translocon-associated protein beta (TRAPB) Pfam Description: Translocon-associated protein beta (TRAPB)
  misc_feature (43)..(143): Homolog of NCBI NO: 134931 NR Description: TRANSLOCON-ASSOCIATED PROTEIN, BETA SUBUNIT (TRAP-BETA) (SIGNAL SEQUENCE RECEPTOR BETA SUBUNIT) (SSR-BETA)
  misc_feature (29)..(150): Homolog of NCBI NO: 40643038 NR Description: signal sequence receptor beta-like protein
  misc_feature (34)..(143): Homolog of NCBI NO: 27692921 NR Description: similar to RIKEN cDNA 1500032E05
  misc_feature (35)..(143): Homolog of NCBI NO: 16307352 NR Description: RIKEN cDNA 1500032E05 gene [Mus musculus]
  misc_feature (35)..(143): Homolog of NCBI NO: 13384850 NR Description: RIKEN cDNA 1500032E05 [Mus musculus]
  misc_feature (35)..(143): Homolog of NCBI NO: 12860639 NR Description: unnamed protein product [Mus musculus]
  misc_feature (31)..(217): Homolog of NCBI NO: 9945068 NR Description: rice EST BE041002 corresponds to a region of the
  misc_feature (33)..(216): Homolog of NCBI NO: 34894034 NR Description: P0672D08.29 [Oryza sativa (japonica
  misc_feature (23)..(217): Homolog of NCBI NO: 9757784 NR Description: gene_id:MUA22.2~similar to unknown
  misc_feature (23)..(217): Homolog of NCBI NO: 18417271 NR Description: expressed protein

SEQ ID NO: 33599 - protein, 195 aa, Arabidopsis thaliana; identical to SEQ ID NO: 30009
  peptide (1)..(195): Ceres Seq. ID no. 12332909
  misc_feature (13)..(192): Pfam Name: Translocon-associated protein beta (TRAPB) Pfam Description: Translocon-associated protein beta (TRAPB)
  misc_feature (21)..(121): Homolog of NCBI NO: 134931 NR Description: TRANSLOCON-ASSOCIATED PROTEIN, BETA SUBUNIT (TRAP-BETA) (SIGNAL SEQUENCE RECEPTOR BETA SUBUNIT) (SSR-BETA)
  misc_feature (7)..(128): Homolog of NCBI NO: 40643038 NR Description: signal sequence receptor beta-like protein
  misc_feature (12)..(121): Homolog of NCBI NO: 27692921 NR Description: similar to RIKEN cDNA 1500032E05
  misc_feature (13)..(121): Homolog of NCBI NO: 13384850 NR Description: RIKEN cDNA 1500032E05 [Mus musculus]
  misc_feature (13)..(121): Homolog of NCBI NO: 16307352 NR Description: RIKEN cDNA 1500032E05 gene [Mus musculus]
  misc_feature (13)..(121): Homolog of NCBI NO: 12860639 NR Description: unnamed protein product [Mus musculus]
  misc_feature (9)..(195): Homolog of NCBI NO: 9945068 NR Description: rice EST BE041002 corresponds to a region of the
  misc_feature (11)..(194): Homolog of NCBI NO: 34894034 NR Description: P0672D08.29 [Oryza sativa (japonica
  misc_feature (1)..(195): Homolog of NCBI NO: 9757784 NR Description: gene_id:MUA22.2~similar to unknown
  misc_feature (1)..(195): Homolog of NCBI NO: 18417271 NR Description: expressed protein

SEQ ID NO: 33600 - protein, 183 aa, Arabidopsis thaliana; identical to SEQ ID NO: 30010
  peptide (1)..(183): Ceres Seq. ID no. 12332910
  misc_feature (1)..(180): Pfam Name: Translocon-associated protein beta (TRAPB) Pfam Description: Translocon-associated protein beta (TRAPB)
  misc_feature (9)..(109): Homolog of NCBI NO: 134931 NR Description: TRANSLOCON-ASSOCIATED PROTEIN, BETA SUBUNIT (TRAP-BETA) (SIGNAL SEQUENCE RECEPTOR BETA SUBUNIT) (SSR-BETA)
  misc_feature (1)..(116): Homolog of NCBI NO: 40643038 NR Description: signal sequence receptor beta-like protein
  misc_feature (1)..(109): Homolog of NCBI NO: 27692921 NR Description: similar to RIKEN cDNA 1500032E05
  misc_feature (1)..(109): Homolog of NCBI NO: 13384850 NR Description: RIKEN cDNA 1500032E05 [Mus musculus]
  misc_feature (1)..(109): Homolog of NCBI NO: 16307352 NR Description: RIKEN cDNA 1500032E05 gene [Mus musculus]
  misc_feature (1)..(109): Homolog of NCBI NO: 12860639 NR Description: unnamed protein product [Mus musculus]
  misc_feature (1)..(183): Homolog of NCBI NO: 9945068 NR Description: rice EST BE041002 corresponds to a region of the
  misc_feature (1)..(182): Homolog of NCBI NO: 34894034 NR Description: P0672D08.29 [Oryza sativa (japonica
  misc_feature (1)..(183): Homolog of NCBI NO: 9757784 NR Description: gene_id:MUA22.2~similar to unknown
  misc_feature (1)..(183): Homolog of NCBI NO: 18417271 NR Description: expressed protein

SEQ ID NO: 33601 - DNA, 688 bp, Arabidopsis thaliana; identical to SEQ ID NO: 30011
  misc_feature (1)..(688): Ceres Seq. ID no. 12348526
  misc_feature: MA Experiment ID: 20000307 Result: Down-regulated in Transcription
  misc_feature: MA Experiment 20000307 PARAMETER Experiment Name: At_Germinating_Seeds_Sub_P Parameter: Age (hr) Value: 24 vs. 0
  misc_feature: MA Experiment 20000307 PARAMETER Experiment Name: At_Germinating_Seeds_Sub_P Parameter: Organism Value: A. thaliana
  misc_feature: MA Experiment 20000307 PARAMETER Experiment Name: At_Germinating_Seeds_Sub_P Parameter: Plant Line Value: WS
  misc_feature: MA Experiment 20000307 PARAMETER Experiment Name: At_Germinating_Seeds_Sub_P Parameter: Tissue Value: Germinating Seeds
  misc_feature: MA Experiment ID: 20000440 Result: Up-regulated in Transcription
  misc_feature: MA Experiment 20000440 PARAMETER Experiment Name: At_Closed-Flower__Sub_P Parameter: Tissue Value: Closed Flower vs. Whole Plant

SEQ ID NO: 33602 - protein, 180 aa, Arabidopsis thaliana; identical to SEQ ID NO: 30012
  peptide (1)..(180): Ceres Seq. ID no. 12348527
  misc_feature (59)..(130): Pfam Name: RNA recognition motif. (a.k.a. RRM, RBD, or RNP domain) Pfam Description: RNA recognition motif. (a.k.a. RRM, RBD, or RNP
  misc_feature (23)..(172): Homolog of NCBI NO: 34906972 NR Description: putative glycine-rich RNA-binding protein 2
  misc_feature (23)..(179): Homolog of NCBI NO: 15239505 NR Description: glycine-rich RNA-binding protein
  misc_feature (23)..(161): Homolog of NCBI NO: 7439995 NR Description: RNA binding protein 3 - wood tobacco
  misc_feature (23)..(171): Homolog of NCBI NO: 7439994 NR Description: glycine-rich RNA-binding protein - garden pea
  misc_feature (23)..(155): Homolog of NCBI NO: 21553972 NR Description: glycine-rich RNA binding protein, putative
  misc_feature (23)..(155): Homolog of NCBI NO: 15229525 NR Description: glycine-rich RNA-binding protein
  misc_feature (42)..(180): Homolog of NCBI NO: 322514 NR Description: glycine-rich RNA-binding protein (clone A81) -
  misc_feature (23)..(170): Homolog of NCBI NO: 2826811 NR Description: AtGRP2 [Arabidopsis thaliana]
  misc_feature (23)..(180): Homolog of NCBI NO: 30682622 NR Description: glycine-rich RNA-binding protein (AtGRP2)
  misc_feature (23)..(180): Homolog of NCBI NO: 15236359 NR Description: glycine-rich RNA-binding protein AtGRP2

SEQ ID NO: 33603 - protein, 158 aa, Arabidopsis thaliana; identical to SEQ ID NO: 30013
  peptide (1)..(158): Ceres Seq. ID no. 12348528
  misc_feature (37)..(108): Pfam Name: RNA recognition motif. (a.k.a. RRM, RBD, or RNP domain) Pfam Description: RNA recognition motif. (a.k.a. RRM, RBD, or RNP
  misc_feature (1)..(150): Homolog of NCBI NO: 34906972 NR Description: putative glycine-rich RNA-binding protein 2
  misc_feature (1)..(157): Homolog of NCBI NO: 15239505 NR Description: glycine-rich RNA-binding protein
  misc_feature (1)..(139): Homolog of NCBI NO: 7439995 NR Description: RNA binding protein 3 - wood tobacco
  misc_feature (1)..(149): Homolog of NCBI NO: 7439994 NR Description: glycine-rich RNA-binding protein - garden pea
  misc_feature (1)..(133): Homolog of NCBI NO: 21553972 NR Description: glycine-rich RNA binding protein, putative
  misc_feature (1)..(133): Homolog of NCBI NO: 15229525 NR Description: glycine-rich RNA-binding protein
  misc_feature (20)..(158): Homolog of NCBI NO: 322514 NR Description: glycine-rich RNA-binding protein (clone A81) -
  misc_feature (1)..(148): Homolog of NCBI NO: 2826811 NR Description: AtGRP2 [Arabidopsis thaliana]
  misc_feature (1)..(158): Homolog of NCBI NO: 30682622 NR Description: glycine-rich RNA-binding protein (AtGRP2)
  misc_feature (1)..(158): Homolog of NCBI NO: 15236359 NR Description: glycine-rich RNA-binding protein AtGRP2

SEQ ID NO: 33604 - protein, 133 aa, Arabidopsis thaliana; identical to SEQ ID NO: 30014
  peptide (1)..(133): Ceres Seq. ID no. 12348529
  misc_feature (12)..(83): Pfam Name: RNA recognition motif. (a.k.a. RRM, RBD, or RNP domain) Pfam Description: RNA recognition motif. (a.k.a. RRM, RBD, or RNP
  misc_feature (1)..(125): Homolog of NCBI NO: 34906972 NR Description: putative glycine-rich RNA-binding protein 2
  misc_feature (1)..(132): Homolog of NCBI NO: 15239505 NR Description: glycine-rich RNA-binding protein
  misc_feature (1)..(114): Homolog of NCBI NO: 7439995 NR Description: RNA binding protein 3 - wood tobacco
  misc_feature (1)..(124): Homolog of NCBI NO: 7439994 NR Description: glycine-rich RNA-binding protein - garden pea
  misc_feature (1)..(108): Homolog of NCBI NO: 21553972 NR Description: glycine-rich RNA binding protein, putative
  misc_feature (1)..(108): Homolog of NCBI NO: 15229525 NR Description: glycine-rich RNA-binding protein
  misc_feature (1)..(133): Homolog of NCBI NO: 322514 NR Description: glycine-rich RNA-binding protein (clone A81) -
  misc_feature (1)..(123): Homolog of NCBI NO: 2826811 NR Description: AtGRP2 [Arabidopsis thaliana]
  misc_feature (1)..(133): Homolog of NCBI NO: 30682622 NR Description: glycine-rich RNA-binding protein (AtGRP2)
  misc_feature (1)..(133): Homolog of NCBI NO: 15236359 NR Description: glycine-rich RNA-binding protein AtGRP2

SEQ ID NO: 33605 - DNA, 927 bp, Arabidopsis thaliana; identical to SEQ ID NO: 30015
  misc_feature (1)..(927): Ceres Seq. ID no. 13490173
  misc_feature: MA Experiment ID: 108434 Result: Down-regulated in Transcription
  misc_feature: MA Experiment 108434 PARAMETER Experiment Name: At_Root_Tips_cDNA_P Parameter: Tissue Value: Root Tips
  misc_feature: MA Experiment ID: 108595 Result: Down-regulated in Transcription
  misc_feature: MA Experiment 108595 PARAMETER Experiment Name: At_Ler-pi_Ovule_cDNA_P Parameter: Plant Line Value: null
  misc_feature: MA Experiment ID: 20000070 Result: Up-regulated in Transcription
  misc_feature: MA Experiment 20000070 PARAMETER Experiment Name: At_100uM_ABA_Mutants_cDNA_P Parameter: Plant Line Value: CS24
  misc_feature: MA Experiment 20000070 PARAMETER Experiment Name: At_100uM_ABA_Mutants_cDNA_P Parameter: Timepoint (hr) Value: 6
  misc_feature: MA Experiment 20000070 PARAMETER Experiment Name: At_100uM_ABA_Mutants_cDNA_P Parameter: Tissue Value: Aerial
  misc_feature: MA Experiment 20000070 PARAMETER Experiment Name: At_100uM_ABA_Mutants_cDNA_P Parameter: Treatment Value: 100uM ABA vs. No Treatment
  misc_feature: MA Experiment ID: 20000071 Result: Up-regulated in Transcription
  misc_feature: MA Experiment 20000071 PARAMETER Experiment Name: At_100uM_ABA_Mutants_cDNA_P Parameter: Plant Line Value: CS8104
  misc_feature: MA Experiment 20000071 PARAMETER Experiment Name: At_100uM_ABA_Mutants_cDNA_P Parameter: Timepoint (hr) Value: 6
  misc_feature: MA Experiment 20000071 PARAMETER Experiment Name: At_100uM_ABA_Mutants_cDNA_P Parameter: Tissue Value: Aerial
  misc_feature: MA Experiment 20000071 PARAMETER Experiment Name: At_100uM_ABA_Mutants_cDNA_P Parameter: Treatment Value: 100uM ABA vs. No Treatment
  misc_feature: MA Experiment ID: 20000072 Result: Up-regulated in Transcription
  misc_feature: MA Experiment 20000072 PARAMETER Experiment Name: At_100uM_ABA_Mutants_cDNA_P Parameter: Plant Line Value: CS8105
  misc_feature: MA Experiment 20000072 PARAMETER Experiment Name: At_100uM_ABA_Mutants_cDNA_P Parameter: Timepoint (hr) Value: 6
  misc_feature: MA Experiment 20000072 PARAMETER Experiment Name: At_100uM_ABA_Mutants_cDNA_P Parameter: Tissue Value: Aerial
  misc_feature: MA Experiment 20000072 PARAMETER Experiment Name: At_100uM_ABA_Mutants_cDNA_P Parameter: Treatment Value: 100uM ABA vs. No Treatment
  misc_feature: MA Experiment ID: 20000086 Result: Up-regulated in Transcription
  misc_feature: MA Experiment 20000086 PARAMETER Experiment Name: At_100uM_ABA_Mutants_cDNA_P Parameter: Plant Line Value: CS22
  misc_feature: MA Experiment 20000086 PARAMETER Experiment Name: At_100uM_ABA_Mutants_cDNA_P Parameter: Timepoint (hr) Value: 6
  misc_feature: MA Experiment 20000086 PARAMETER Experiment Name: At_100uM_ABA_Mutants_cDNA_P Parameter: Tissue Value: Aerial
  misc_feature: MA Experiment 20000086 PARAMETER Experiment Name: At_100uM_ABA_Mutants_cDNA_P Parameter: Treatment Value: 100uM ABA vs. No Treatment
  misc_feature: MA Experiment ID: 20000087 Result: Up-regulated in Transcription
  misc_feature: MA Experiment 20000087 PARAMETER Experiment Name: At_100uM_ABA_Mutants_cDNA_P Parameter: Plant Line Value: WS
  misc_feature: MA Experiment 20000087 PARAMETER Experiment Name: At_100uM_ABA_Mutants_cDNA_P Parameter: Timepoint (hr) Value: 6
  misc_feature: MA Experiment 20000087 PARAMETER Experiment Name: At_100uM_ABA_Mutants_cDNA_P Parameter: Tissue Value: Aerial
  misc_feature: MA Experiment 20000087 PARAMETER Experiment Name: At_100uM_ABA_Mutants_cDNA_P Parameter: Treatment Value: 100uM ABA vs. No Treatment
  misc_feature: MA Experiment ID: 20000088 Result: Up-regulated in Transcription
  misc_feature: MA Experiment 20000088 PARAMETER Experiment Name: At_100uM_ABA_Mutants_cDNA_P Parameter: Plant Line Value: Landsberg
  misc_feature: MA Experiment 20000088 PARAMETER Experiment Name: At_100uM_ABA_Mutants_cDNA_P Parameter: Timepoint (hr) Value: 6
  misc_feature: MA Experiment 20000088 PARAMETER Experiment Name: At_100uM_ABA_Mutants_cDNA_P Parameter: Tissue Value: Aerial
  misc_feature: MA Experiment 20000088 PARAMETER Experiment Name: At_100uM_ABA_Mutants_cDNA_P Parameter: Treatment Value: 100uM ABA vs. No Treatment
  misc_feature: MA Experiment ID: 20000089 Result: Up-regulated in Transcription
  misc_feature: MA Experiment ID: 20000117 Result: Up-regulated in Transcription
  misc_feature: MA Experiment 20000117 PARAMETER Experiment Name: At_100uM_ABA_Mutants_cDNA_P Parameter: Plant Line Value: Columbia
  misc_feature: MA Experiment 20000117 PARAMETER Experiment Name: At_100uM_ABA_Mutants_cDNA_P Parameter: Timepoint (hr) Value: 6
  misc_feature: MA Experiment 20000117 PARAMETER Experiment Name: At_100uM_ABA_Mutants_cDNA_P Parameter: Tissue Value: Aerial
  misc_feature: MA Experiment 20000117 PARAMETER Experiment Name: At_100uM_ABA_Mutants_cDNA_P Parameter: Treatment Value: 100uM ABA vs. No Treatment
  misc_feature: MA Experiment ID: 20000184 Result: Down-regulated in Transcription
  misc_feature: MA Experiment 20000184 PARAMETER Experiment Name: At_Shoots__P Parameter: Age (day) Value: 7
  misc_feature: MA Experiment 20000184 PARAMETER Experiment Name: At_Shoots__P Parameter: Tissue Value: Shoots vs. Whole Plant
  misc_feature: MA Experiment ID: 20001247 Result: Down-regulated in Transcription
  misc_feature: MA Experiment 20001247 PARAMETER Experiment Name: At_Far-red-induction_P Parameter: Age (day) Value: 7
  misc_feature: MA Experiment 20001247 PARAMETER Experiment Name: At_Far-red-induction_P Parameter: Light Value: Far-red vs. White
  misc_feature: MA Experiment 20001247 PARAMETER Experiment Name: At_Far-red-induction_P Parameter: Organism Value: A. thaliana
  misc_feature: MA Experiment 20001247 PARAMETER Experiment Name: At_Far-red-induction_P Parameter: Plant Line Value: Columbia
  misc_feature: MA Experiment 20001247 PARAMETER Experiment Name: At_Far-red-induction_P Parameter: Timepoint (hr) Value: 1
  misc_feature: MA Experiment 20001247 PARAMETER Experiment Name: At_Far-red-induction_P Parameter: Tissue Value: Whole Plant
  misc_feature: MA Experiment ID: 20001451 Result: Down-regulated in Transcription
  misc_feature: MA Experiment 20001451 PARAMETER Experiment Name: At_Far-red-induction_P Parameter: Age (day) Value: 7
  misc_feature: MA Experiment 20001451 PARAMETER Experiment Name: At_Far-red-induction_P Parameter: Light Value: Far-red vs. White
  misc_feature: MA Experiment 20001451 PARAMETER Experiment Name: At_Far-red-induction_P Parameter: Organism Value: A. thaliana
  misc_feature: MA Experiment 20001451 PARAMETER Experiment Name: At_Far-red-induction_P Parameter: Plant Line Value: Columbia
  misc_feature: MA Experiment 20001451 PARAMETER Experiment Name: At_Far-red-induction_P Parameter: Timepoint (hr) Value: 24
  misc_feature: MA Experiment 20001451 PARAMETER Experiment Name: At_Far-red-induction_P Parameter: Tissue Value: Whole Plant
  misc_feature: MA Experiment ID: 20001558 Result: Down-regulated in Transcription
  misc_feature: MA Experiment 20001558 PARAMETER Experiment Name: At_Drought_Soil_Dry_P Parameter: Age (day) Value: 27
  misc_feature: MA Experiment 20001558 PARAMETER Experiment Name: At_Drought_Soil_Dry_P Parameter: Organism Value: A. thaliana
  misc_feature: MA Experiment 20001558 PARAMETER Experiment Name: At_Drought_Soil_Dry_P Parameter: Plant Line Value: WS
  misc_feature: MA Experiment 20001558 PARAMETER Experiment Name: At_Drought_Soil_Dry_P Parameter: Post Timepoint (hr) Value: 6
  misc_feature: MA Experiment 20001558 PARAMETER Experiment Name: At_Drought_Soil_Dry_P Parameter: Post-Treatment Value: Re-Water vs. No Drought
  misc_feature: MA Experiment 20001558 PARAMETER Experiment Name: At_Drought_Soil_Dry_P Parameter: Timepoint (day) Value: 13
  misc_feature: MA Experiment 20001558 PARAMETER Experiment Name: At_Drought_Soil_Dry_P Parameter: Treatment Value: Drought vs. No Drought

SEQ ID NO: 33606 - protein, 149 aa, Arabidopsis thaliana; identical to SEQ ID NO: 30016
  peptide (1)..(149): Ceres Seq. ID no. 15218712
  misc_feature (14)..(135): Pfam Name: ARD/ARD' family Pfam Description: ARD/ARD' family
  misc_feature (7)..(135): Homolog of NCBI NO: 37534408 NR Description: putative zinc finger protein ID1
  misc_feature (1)..(135): Homolog of NCBI NO: 7489558 NR Description: probable submergence induced protein 2 - rice
  misc_feature (5)..(135): Homolog of NCBI NO: 34902616 NR Description: Putative probable submergence induced,
  misc_feature (1)..(135): Homolog of NCBI NO: 14522834 NR Description: iron-deficiency induced gene [Hordeum vulgare]
  misc_feature (1)..(135): Homolog of NCBI NO: 7489559 NR Description: probable submergence induced, nickel-binding
  misc_feature (1)..(135): Homolog of NCBI NO: 15225298 NR Description: hypothetical protein [Arabidopsis thaliana]
  misc_feature (69)..(135): Homolog of NCBI NO: 7485194 NR Description: hypothetical protein - Arabidopsis thaliana
  misc_feature (1)..(75): Homolog of NCBI NO: 7485194 NR Description: hypothetical protein - Arabidopsis thaliana
  misc_feature (1)..(135): Homolog of NCBI NO: 18414289 NR Description: expressed protein [Arabidopsis thaliana]
  misc_feature (1)..(135): Homolog of NCBI NO: 18414293 NR Description: expressed protein [Arabidopsis thaliana]

SEQ ID NO: 33607 - protein, 132 aa, Arabidopsis thaliana; identical to SEQ ID NO: 30017
  peptide (1)..(132): Ceres Seq. ID no. 15218713
  misc_feature (1)..(118): Pfam Name: ARD/ARD' family Pfam Description: ARD/ARD' family
  misc_feature (1)..(118): Homolog of NCBI NO: 37534408 NR Description: putative zinc finger protein ID1
  misc_feature (1)..(118): Homolog of NCBI NO: 7489558 NR Description: probable submergence induced protein 2 - rice
  misc_feature (1)..(118): Homolog of NCBI NO: 34902616 NR Description: Putative probable submergence induced,
  misc_feature (1)..(118): Homolog of NCBI NO: 14522834 NR Description: iron-deficiency induced gene [Hordeum vulgare]
  misc_feature (1)..(118): Homolog of NCBI NO: 7489559 NR Description: probable submergence induced, nickel-binding
  misc_feature (1)..(118): Homolog of NCBI NO: 15225298 NR Description: hypothetical protein [Arabidopsis thaliana]
  misc_feature (52)..(118): Homolog of NCBI NO: 7485194 NR Description: hypothetical protein - Arabidopsis thaliana
  misc_feature (1)..(58): Homolog of NCBI NO: 7485194 NR Description: hypothetical protein - Arabidopsis thaliana
  misc_feature (1)..(118): Homolog of NCBI NO: 18414289 NR Description: expressed protein [Arabidopsis thaliana]
  misc_feature (1)..(118): Homolog of NCBI NO: 18414293 NR Description: expressed protein [Arabidopsis thaliana]

SEQ ID NO: 33608 - protein, 101 aa, Arabidopsis thaliana; identical to SEQ ID NO: 30018
  peptide (1)..(101): Ceres Seq. ID no. 15218714

SEQ ID NO: 33609 - DNA, 888 bp, Arabidopsis thaliana; identical to SEQ ID NO: 30019
  misc_feature (1)..(888): Ceres Seq. ID no. 12338180
  misc_feature: MA Experiment ID: 108434 Result: Down-regulated in Transcription
  misc_feature: MA Experiment 108434 PARAMETER Experiment Name: At_Root_Tips_cDNA_P Parameter: Tissue Value: Root Tips
  misc_feature: MA Experiment ID: 108461 Result: Up-regulated in Transcription
  misc_feature: MA Experiment 108461 PARAMETER Experiment Name: At_Germinating_Seeds_cDNA_P Parameter: Age (day) Value: 1 vs. 0
  misc_feature: MA Experiment 108461 PARAMETER Experiment Name: At_Germinating_Seeds_cDNA_P Parameter: Tissue Value: Germinating Seeds
  misc_feature: MA Experiment ID: 108462 Result: Up-regulated in Transcription
  misc_feature: MA Experiment 108462 PARAMETER Experiment Name: At_Germinating_Seeds_cDNA_P Parameter: Age (day) Value: 2 vs. 0
  misc_feature: MA Experiment 108462 PARAMETER Experiment Name: At_Germinating_Seeds_cDNA_P Parameter: Tissue Value: Germinating Seeds
  misc_feature: MA Experiment ID: 108464 Result: Up-regulated in Transcription
  misc_feature: MA Experiment 108464 PARAMETER Experiment Name: At_Germinating_Seeds_cDNA_P Parameter: Age (day) Value: 4 vs. 0
  misc_feature: MA Experiment 108464 PARAMETER Experiment Name: At_Germinating_Seeds_cDNA_P Parameter: Tissue Value: Germinating Seeds
  misc_feature: MA Experiment ID: 108605 Result: Up-regulated in Transcription
  misc_feature: MA Experiment 108605 PARAMETER Experiment Name: At_100uM_ABA_cDNA_P Parameter: Timepoint (hr) Value: 6
  misc_feature: MA Experiment 108605 PARAMETER Experiment Name: At_100uM_ABA_cDNA_P Parameter: Tissue Value: Aerial
  misc_feature: MA Experiment 108605 PARAMETER Experiment Name: At_100uM_ABA_cDNA_P Parameter: Treatment Value: 100uM ABA vs. No Treatment
  misc_feature: MA Experiment ID: 108607 Result: Up-regulated in Transcription
  misc_feature: MA Experiment 108607 PARAMETER Experiment Name: At_100uM_ABA_cDNA_P Parameter: Timepoint (hr) Value: 4
  misc_feature: MA Experiment 108607 PARAMETER Experiment Name: At_100uM_ABA_cDNA_P Parameter: Tissue Value: Aerial
  misc_feature: MA Experiment 108607 PARAMETER Experiment Name: At_100uM_ABA_cDNA_P Parameter: Treatment Value: 100uM ABA vs. No Treatment
  misc_feature: MA Experiment ID: 108609 Result: Up-regulated in Transcription
  misc_feature: MA Experiment 108609 PARAMETER Experiment Name: At_100uM_ABA_cDNA_P Parameter: Timepoint (hr) Value: 24
  misc_feature: MA Experiment 108609 PARAMETER Experiment Name: At_100uM_ABA_cDNA_P Parameter: Tissue Value: Aerial
  misc_feature: MA Experiment 108609 PARAMETER Experiment Name: At_100uM_ABA_cDNA_P Parameter: Treatment Value: 100uM ABA vs. No Treatment
  misc_feature: MA Experiment ID: 20000069 Result: Up-regulated in Transcription
  misc_feature: MA Experiment 20000069 PARAMETER Experiment Name: At_100uM_ABA_Mutants_cDNA_P Parameter: Plant Line Value: CS23
  misc_feature: MA Experiment 20000069 PARAMETER Experiment Name: At_100uM_ABA_Mutants_cDNA_P Parameter: Timepoint (hr) Value: 6
  misc_feature: MA Experiment 20000069 PARAMETER Experiment Name: At_100uM_ABA_Mutants_cDNA_P Parameter: Tissue Value: Aerial
  misc_feature: MA Experiment 20000069 PARAMETER Experiment Name: At_100uM_ABA_Mutants_cDNA_P Parameter: Treatment Value: 100uM ABA vs. No Treatment
  misc_feature: MA Experiment ID: 20000070 Result: Up-regulated in Transcription
  misc_feature: MA Experiment 20000070 PARAMETER Experiment Name: At_100uM_ABA_Mutants_cDNA_P Parameter: Plant Line Value: CS24
  misc_feature: MA Experiment 20000070 PARAMETER Experiment Name: At_100uM_ABA_Mutants_cDNA_P Parameter: Timepoint (hr) Value: 6
  misc_feature: MA Experiment 20000070 PARAMETER Experiment Name: At_100uM_ABA_Mutants_cDNA_P Parameter: Tissue Value: Aerial
  misc_feature: MA Experiment 20000070 PARAMETER Experiment Name: At_100uM_ABA_Mutants_cDNA_P Parameter: Treatment Value: 100uM ABA vs. No Treatment
  misc_feature: MA Experiment ID: 20000071 Result: Up-regulated in Transcription
  misc_feature: MA Experiment 20000071 PARAMETER Experiment Name: At_100uM_ABA_Mutants_cDNA_P Parameter: Plant Line Value: CS8104
  misc_feature: MA Experiment 20000071 PARAMETER Experiment Name: At_100uM_ABA_Mutants_cDNA_P Parameter: Timepoint (hr) Value: 6
  misc_feature: MA Experiment 20000071 PARAMETER Experiment Name: At_100uM_ABA_Mutants_cDNA_P Parameter: Tissue Value: Aerial
  misc_feature: MA Experiment 20000071 PARAMETER Experiment Name: At_100uM_ABA_Mutants_cDNA_P Parameter: Treatment Value: 100uM ABA vs. No Treatment
  misc_feature: MA Experiment ID: 20000086 Result: Up-regulated in Transcription
  misc_feature: MA Experiment 20000086 PARAMETER Experiment Name: At_100uM_ABA_Mutants_cDNA_P Parameter: Plant Line Value: CS22
  misc_feature: MA Experiment 20000086 PARAMETER Experiment Name: At_100uM_ABA_Mutants_cDNA_P Parameter: Timepoint (hr) Value: 6
  misc_feature: MA Experiment 20000086 PARAMETER Experiment Name: At_100uM_ABA_Mutants_cDNA_P Parameter: Tissue Value: Aerial
  misc_feature: MA Experiment 20000086 PARAMETER Experiment Name: At_100uM_ABA_Mutants_cDNA_P Parameter: Treatment Value: 100uM ABA vs. No Treatment
  misc_feature: MA Experiment ID: 20000087 Result: Up-regulated in Transcription
  misc_feature: MA Experiment 20000087 PARAMETER Experiment Name: At_100uM_ABA_Mutants_cDNA_P Parameter: Plant Line Value: WS
  misc_feature: MA Experiment 20000087 PARAMETER Experiment Name: At_100uM_ABA_Mutants_cDNA_P Parameter: Timepoint (hr) Value: 6
  misc_feature: MA Experiment 20000087 PARAMETER Experiment Name: At_100uM_ABA_Mutants_cDNA_P Parameter: Tissue Value: Aerial
  misc_feature: MA Experiment 20000087 PARAMETER Experiment Name: At_100uM_ABA_Mutants_cDNA_P Parameter: Treatment Value: 100uM ABA vs. No Treatment
  misc_feature: MA Experiment ID: 20000088 Result: Up-regulated in Transcription
  misc_feature: MA Experiment 20000088 PARAMETER Experiment Name: At_100uM_ABA_Mutants_cDNA_P Parameter: Plant Line Value: Landsberg
  misc_feature: MA Experiment 20000088 PARAMETER Experiment Name: At_100uM_ABA_Mutants_cDNA_P Parameter: Timepoint (hr) Value: 6
  misc_feature: MA Experiment 20000088 PARAMETER Experiment Name: At_100uM_ABA_Mutants_cDNA_P Parameter: Tissue Value: Aerial
  misc_feature: MA Experiment 20000088 PARAMETER Experiment Name: At_100uM_ABA_Mutants_cDNA_P Parameter: Treatment Value: 100uM ABA vs. No Treatment
  misc_feature: MA Experiment ID: 20000113 Result: Down-regulated in Transcription
  misc_feature: MA Experiment 20000113 PARAMETER Experiment Name: At_42deg_Heat_cDNA_P Parameter: Temperature (deg C) Value: 42 vs. 22
  misc_feature: MA Experiment 20000113 PARAMETER Experiment Name: At_42deg_Heat_cDNA_P Parameter: Timepoint (hr) Value: 8
  misc_feature: MA Experiment 20000113 PARAMETER Experiment Name: At_42deg_Heat_cDNA_P Parameter: Tissue Value: Aerial
  misc_feature: MA Experiment ID: 20000117 Result: Up-regulated in Transcription
  misc_feature: MA Experiment 20000117 PARAMETER Experiment Name: At_100uM_ABA_Mutants_cDNA_P Parameter: Plant Line Value: Columbia
  misc_feature: MA Experiment 20000117 PARAMETER Experiment Name: At_100uM_ABA_Mutants_cDNA_P Parameter: Timepoint (hr) Value: 6
  misc_feature: MA Experiment 20000117 PARAMETER Experiment Name: At_100uM_ABA_Mutants_cDNA_P Parameter: Tissue Value: Aerial
  misc_feature: MA Experiment 20000117 PARAMETER Experiment Name: At_100uM_ABA_Mutants_cDNA_P Parameter: Treatment Value: 100uM ABA vs. No Treatment
  misc_feature: MA Experiment ID: 20000169 Result: Up-regulated in Transcription
  misc_feature: MA Experiment 20000169 PARAMETER Experiment Name: At_100uM_ABA_P Parameter: Age (day) Value: 14
  misc_feature: MA Experiment 20000169 PARAMETER Experiment Name: At_100uM_ABA_P Parameter: Organism Value: A. thaliana
  misc_feature: MA Experiment 20000169 PARAMETER Experiment Name: At_100uM_ABA_P Parameter: Plant Line Value: WS
  misc_feature: MA Experiment 20000169 PARAMETER Experiment Name: At_100uM_ABA_P Parameter: Timepoint (hr) Value: 6
  misc_feature: MA Experiment 20000169 PARAMETER Experiment Name: At_100uM_ABA_P Parameter: Tissue Value: Aerial
  misc_feature: MA Experiment 20000169 PARAMETER Experiment Name: At_100uM_ABA_P Parameter: Treatment Value: 100uM ABA vs. No Treatment
  misc_feature: MA Experiment ID: 20000180 Result: Up-regulated in Transcription
  misc_feature: MA Experiment 20000180 PARAMETER Experiment Name: At_Germinating_Seeds_P Parameter: Age (hr) Value: 24 vs. 0
  misc_feature: MA Experiment 20000180 PARAMETER Experiment Name: At_Germinating_Seeds_P Parameter: Tissue Value: Germinating Seeds
  misc_feature: MA Experiment ID: 20000211 Result: Up-regulated in Transcription
  misc_feature: MA Experiment 20000211 PARAMETER Experiment Name: At_0.001percent_MeJA__P Parameter: Age (day) Value: 14
  misc_feature: MA Experiment 20000211 PARAMETER Experiment Name: At_0.001percent_MeJA__P Parameter: Organism Value: A. thaliana
  misc_feature: MA Experiment 20000211 PARAMETER Experiment Name: At_0.001percent_MeJA__P Parameter: Plant Line Value: WS
  misc_feature: MA Experiment 20000211 PARAMETER Experiment Name: At_0.001percent_MeJA__P Parameter: Timepoint (hr) Value: 1
  misc_feature: MA Experiment 20000211 PARAMETER Experiment Name: At_0.001percent_MeJA__P Parameter: Tissue Value: Aerial
  misc_feature: MA Experiment 20000211 PARAMETER Experiment Name: At_0.001percent_MeJA__P Parameter: Treatment Value: 0.001percent MeJA vs. No Treatment
  misc_feature: MA Experiment ID: 20000227 Result: Down-regulated in Transcription
  misc_feature: MA Experiment 20000227 PARAMETER Experiment Name: At_Root-Tips-vs-Tops_P Parameter: Tissue Value: Root Tips vs. Root Tops
  misc_feature: MA Experiment ID: 20000265 Result: Up-regulated in Transcription
  misc_feature: MA Experiment 20000265 PARAMETER Experiment Name: At_Open_Flower_P Parameter: Age (day) Value: 21
  misc_feature: MA Experiment 20000265 PARAMETER Experiment Name: At_Open_Flower_P Parameter: Plant Line Value: WS
  misc_feature: MA Experiment 20000265 PARAMETER Experiment Name: At_Open_Flower_P Parameter: Tissue Value: Closed Flower vs. Whole Plant
  misc_feature: MA Experiment ID: 20000436 Result: Up-regulated in Transcription
  misc_feature: MA Experiment 20000436 PARAMETER Experiment Name: At_Drought_P Parameter: Age (day) Value: 7
  misc_feature: MA Experiment 20000436 PARAMETER Experiment Name: At_Drought_P Parameter: Organism Value: A. thaliana
  misc_feature: MA Experiment 20000436 PARAMETER Experiment Name: At_Drought_P Parameter: Plant Line Value: WS
  misc_feature: MA Experiment 20000436 PARAMETER Experiment Name: At_Drought_P Parameter: Timepoint (hr) Value: 12
  misc_feature: MA Experiment 20000436 PARAMETER Experiment Name: At_Drought_P Parameter: Tissue Value: Whole Plant
  misc_feature: MA Experiment 20000436 PARAMETER Experiment Name: At_Drought_P Parameter: Treatment Value: Drought vs. No Drought
  misc_feature: MA Experiment ID: 20000451 Result: Down-regulated in Transcription
  misc_feature: MA Experiment 20000451 PARAMETER Experiment Name: At_CS6879_Shoots-Roots_P Parameter: Age (day) Value: 14
  misc_feature: MA Experiment 20000451 PARAMETER Experiment Name: At_CS6879_Shoots-Roots_P Parameter: Organism Value: A. thaliana
  misc_feature: MA Experiment 20000451 PARAMETER Experiment Name: At_CS6879_Shoots-Roots_P Parameter: Plant Line Value: CS6879 vs. WS
  misc_feature: MA Experiment 20000451 PARAMETER Experiment Name: At_CS6879_Shoots-Roots_P Parameter: Tissue Value: Roots
  misc_feature: MA Experiment ID: 20000453 Result: Up-regulated in Transcription
  misc_feature: MA Experiment 20000453 PARAMETER Experiment Name: At_100uM_ABA_P Parameter: Age (day) Value: 15
  misc_feature: MA Experiment 20000453 PARAMETER Experiment Name: At_100uM_ABA_P Parameter: Organism Value: A. thaliana
  misc_feature: MA Experiment 20000453 PARAMETER Experiment Name: At_100uM_ABA_P Parameter: Plant Line Value: WS
  misc_feature: MA Experiment 20000453 PARAMETER Experiment Name: At_100uM_ABA_P Parameter: Timepoint (hr) Value: 24
  misc_feature: MA Experiment 20000453 PARAMETER Experiment Name: At_100uM_ABA_P Parameter: Tissue Value: Aerial
  misc_feature: MA Experiment 20000453 PARAMETER Experiment Name: At_100uM_ABA_P Parameter: Treatment Value: 100uM ABA vs. No Treatment
  misc_feature: MA Experiment ID: 20001451 Result: Down-regulated in Transcription
  misc_feature: MA Experiment 20001451 PARAMETER Experiment Name: At_Far-red-induction_P Parameter: Age (day) Value: 7
  misc_feature: MA Experiment 20001451 PARAMETER Experiment Name: At_Far-red-induction_P Parameter: Light Value: Far-red vs. White
  misc_feature: MA Experiment 20001451 PARAMETER Experiment Name: At_Far-red-induction_P Parameter: Organism Value: A. thaliana
  misc_feature: MA Experiment 20001451 PARAMETER Experiment Name: At_Far-red-induction_P Parameter: Plant Line Value: Columbia
  misc_feature: MA Experiment 20001451 PARAMETER Experiment Name: At_Far-red-induction_P Parameter: Timepoint (hr) Value: 24
  misc_feature: MA Experiment 20001451 PARAMETER Experiment Name: At_Far-red-induction_P Parameter: Tissue Value: Whole Plant
  misc_feature: MA Experiment ID: 20001554 Result: Up-regulated in Transcription
  misc_feature: MA Experiment 20001554 PARAMETER Experiment Name: At_Drought_Soil_Dry_P Parameter: Age (day) Value: 21
  misc_feature: MA Experiment 20001554 PARAMETER Experiment Name: At_Drought_Soil_Dry_P Parameter: Organism Value: A. thaliana
  misc_feature: MA Experiment 20001554 PARAMETER Experiment Name: At_Drought_Soil_Dry_P Parameter: Plant Line Value: WS
  misc_feature: MA Experiment 20001554 PARAMETER Experiment Name: At_Drought_Soil_Dry_P Parameter: Post Timepoint (hr) Value: None
  misc_feature: MA Experiment 20001554 PARAMETER Experiment Name: At_Drought_Soil_Dry_P Parameter: Post-Treatment Value: None
  misc_feature: MA Experiment 20001554 PARAMETER Experiment Name: At_Drought_Soil_Dry_P Parameter: Timepoint (day) Value: 7
  misc_feature: MA Experiment 20001554 PARAMETER Experiment Name: At_Drought_Soil_Dry_P Parameter: Treatment Value: Drought vs. No Drought
  misc_feature: MA Experiment ID: 20001555 Result: Up-regulated in Transcription
  misc_feature: MA Experiment 20001555 PARAMETER Experiment Name: At_Drought_Soil_Dry_P Parameter: Age (day) Value: 24
  misc_feature: MA Experiment 20001555 PARAMETER Experiment Name: At_Drought_Soil_Dry_P Parameter: Organism Value: A. thaliana
  misc_feature: MA Experiment 20001555 PARAMETER Experiment Name: At_Drought_Soil_Dry_P Parameter: Plant Line Value: WS
  misc_feature: MA Experiment 20001555 PARAMETER Experiment Name: At_Drought_Soil_Dry_P Parameter: Post Timepoint (hr) Value: None
  misc_feature: MA Experiment 20001555 PARAMETER Experiment Name: At_Drought_Soil_Dry_P Parameter: Post-Treatment Value: None
  misc_feature: MA Experiment 20001555 PARAMETER Experiment Name: At_Drought_Soil_Dry_P Parameter: Timepoint (day) Value: 10
  misc_feature: MA Experiment 20001555 PARAMETER Experiment Name: At_Drought_Soil_Dry_P Parameter: Treatment Value: Drought vs. No Drought
  misc_feature: MA Experiment ID: 20001558 Result: Down-regulated in Transcription
  misc_feature: MA Experiment 20001558 PARAMETER Experiment Name: At_Drought_Soil_Dry_P Parameter: Age (day) Value: 27
  misc_feature: MA Experiment 20001558 PARAMETER Experiment Name: At_Drought_Soil_Dry_P Parameter: Organism Value: A. thaliana
  misc_feature: MA Experiment 20001558 PARAMETER Experiment Name: At_Drought_Soil_Dry_P Parameter: Plant Line Value: WS
  misc_feature: MA Experiment 20001558 PARAMETER Experiment Name: At_Drought_Soil_Dry_P Parameter: Post Timepoint (hr) Value: 6
  misc_feature: MA Experiment 20001558 PARAMETER Experiment Name: At_Drought_Soil_Dry_P Parameter: Post-Treatment Value: Re-Water vs. No Drought
  misc_feature: MA Experiment 20001558 PARAMETER Experiment Name: At_Drought_Soil_Dry_P Parameter: Timepoint (day) Value: 13
  misc_feature: MA Experiment 20001558 PARAMETER Experiment Name: At_Drought_Soil_Dry_P Parameter: Treatment Value: Drought vs. No Drought
  misc_feature: MA Experiment ID: 20001559 Result: Up-regulated in Transcription
  misc_feature: MA Experiment 20001559 PARAMETER Experiment Name: At_Drought_Soil_Dry_P Parameter: Age (day) Value: 28
  misc_feature: MA Experiment 20001559 PARAMETER Experiment Name: At_Drought_Soil_Dry_P Parameter: Organism Value: A. thaliana
  misc_feature: MA Experiment 20001559 PARAMETER Experiment Name: At_Drought_Soil_Dry_P Parameter: Plant Line Value: WS
  misc_feature: MA Experiment 20001559 PARAMETER Experiment Name: At_Drought_Soil_Dry_P Parameter: Post Timepoint (hr) Value: 29
  misc_feature: MA Experiment 20001559 PARAMETER Experiment Name: At_Drought_Soil_Dry_P Parameter: Post-Treatment Value: Re-Water vs. No Drought
  misc_feature: MA Experiment 20001559 PARAMETER Experiment Name: At_Drought_Soil_Dry_P Parameter: Timepoint (day) Value: 14
  misc_feature: MA Experiment 20001559 PARAMETER Experiment Name: At_Drought_Soil_Dry_P Parameter: Treatment Value: Drought vs. No Drought

SEQ ID NO: 33610 - protein, 213 aa, Arabidopsis thaliana; identical to SEQ ID NO: 29716
  peptide (1)..(213): Ceres Seq. ID no. 12338181
  misc_feature (119)..(191): Pfam Name: Glutathione S-transferase, C-terminal domain Pfam Description: Glutathione S-transferase, C-terminal domain
  misc_feature (128)..(213): Homolog of NCBI NO: 15223575 NR Description: GSH-dependent dehydroascorbate reductase 1,
  misc_feature (1)..(212): Homolog of NCBI NO: 6939839 NR Description: GSH-dependent dehydroascorbate reductase 1
  misc_feature (4)..(213): Homolog of NCBI NO: 28192421 NR Description: dehydroascorbate reductase [Triticum aestivum]
  misc_feature (1)..(212): Homolog of NCBI NO: 28192425 NR Description: dehydroascorbate reductase [Oryza sativa]
  misc_feature (1)..(212): Homolog of NCBI NO: 15239354 NR Description: dehydroascorbate reductase, putative; protein id:
  misc_feature (1)..(213): Homolog of NCBI NO: 28192427 NR Description: dehydroascorbate reductase [Nicotiana tabacum]
  misc_feature (1)..(212): Homolog of NCBI NO: 15222163 NR Description: dehydroascorbate reductase, putative
  misc_feature (1)..(212): Homolog of NCBI NO: 21593056 NR Description: GSH-dependent dehydroascorbate reductase 1,
  misc_feature (1)..(201): Homolog of NCBI NO: 25402899 NR Description: protein F18O14.33 [imported] - Arabidopsis
  misc_feature (1)..(213): Homolog of NCBI NO: 15223576 NR Description: dehydroascorbate reductase, putative

SEQ ID NO: 33611 - DNA, 796 bp, Arabidopsis thaliana; identical to SEQ ID NO: 30021
  misc_feature (1)..(796): Ceres Seq. ID no. 12332827
  misc_feature: MA Experiment ID: 108464 Result: Up-regulated in Transcription
  misc_feature: MA Experiment 108464 PARAMETER Experiment Name: At_Germinating_Seeds_cDNA_P Parameter: Age (day) Value: 4 vs. 0
  misc_feature: MA Experiment 108464 PARAMETER Experiment Name: At_Germinating_Seeds_cDNA_P Parameter: Tissue Value: Germinating Seeds
  misc_feature: MA Experiment ID: 20000348 Result: Up-regulated in Transcription
  misc_feature: MA Experiment 20000348 PARAMETER Experiment Name: At_100uM_ABA_Sub_P Parameter: Age (day) Value: 14
  misc_feature: MA Experiment 20000348 PARAMETER Experiment Name: At_100uM_ABA_Sub_P Parameter: Organism Value: A. thaliana
  misc_feature: MA Experiment 20000348 PARAMETER Experiment Name: At_100uM_ABA_Sub_P Parameter: Plant Line Value: WS
  misc_feature: MA Experiment 20000348 PARAMETER Experiment Name: At_100uM_ABA_Sub_P Parameter: Timepoint (hr) Value: 1
  misc_feature: MA Experiment 20000348 PARAMETER Experiment Name: At_100uM_ABA_Sub_P Parameter: Tissue Value: Aerial
  misc_feature: MA Experiment 20000348 PARAMETER Experiment Name: At_100uM_ABA_Sub_P Parameter: Treatment Value: 100uM ABA vs. No Treatment
  misc_feature: MA Experiment ID: 20000355 Result: Up-regulated in Transcription
  misc_feature: MA Experiment 20000355 PARAMETER Experiment Name: At_Siliques_Sub_P Parameter: Age (day) Value: 21
  misc_feature: MA Experiment 20000355 PARAMETER Experiment Name: At_Siliques_Sub_P Parameter: Organism Value: A. thaliana
  misc_feature: MA Experiment 20000355 PARAMETER Experiment Name: At_Siliques_Sub_P Parameter: Plant Line Value: WS
  misc_feature: MA Experiment 20000355 PARAMETER Experiment Name: At_Siliques_Sub_P Parameter: Tissue Value: Less Than 5mm Siliques vs. Whole Plant
  misc_feature: MA Experiment ID: 20000440 Result: Up-regulated in Transcription
  misc_feature: MA Experiment 20000440 PARAMETER Experiment Name: At_Closed-Flower__Sub_P Parameter: Tissue Value: Closed Flower vs. Whole Plant

SEQ ID NO: 33612 - protein, 264 aa, Arabidopsis thaliana; identical to SEQ ID NO: 30022
  peptide (1)..(264): Ceres Seq. ID no. 12332828
  misc_feature (101)..(173): Homolog of NCBI NO: 38567956 NR Description: OSJNBb0115I21.12 [Oryza sativa (japonica
  misc_feature (101)..(263): Homolog of NCBI NO: 38346468 NR Description: OSJNBa0019G23.16 [Oryza sativa (japonica
  misc_feature (103)..(263): Homolog of NCBI NO: 37533376 NR Description: hypothetical protein [Oryza sativa (japonica
  misc_feature (103)..(263): Homolog of NCBI NO: 18767383 NR Description: Hypothetical protein [Oryza sativa]
  misc_feature (72)..(263): Homolog of NCBI NO: 18394724 NR Description: expressed protein
  misc_feature (72)..(263): Homolog of NCBI NO: 25372870 NR Description: protein F18O14.5 [imported] - Arabidopsis
  misc_feature (72)..(263): Homolog of NCBI NO: 15222092 NR Description: hypothetical protein; protein id: At1g75060.1

SEQ ID NO: 33613 - protein, 193 aa, Arabidopsis thaliana; identical to SEQ ID NO: 30023
  peptide (1)..(193): Ceres Seq. ID no. 12332829
  misc_feature (30)..(102): Homolog of NCBI NO: 38567956 NR Description: OSJNBb0115I21.12 [Oryza sativa (japonica
  misc_feature (30)..(192): Homolog of NCBI NO: 38346468 NR Description: OSJNBa0019G23.16 [Oryza sativa (japonica
  misc_feature (32)..(192): Homolog of NCBI NO: 37533376 NR Description: hypothetical protein [Oryza sativa (japonica
  misc_feature (32)..(192): Homolog of NCBI NO: 18767383 NR Description: Hypothetical protein [Oryza sativa]
  misc_feature (1)..(192): Homolog of NCBI NO: 18394724 NR Description: expressed protein
  misc_feature (1)..(192): Homolog of NCBI NO: 25372870 NR Description: protein F18O14.5 [imported] - Arabidopsis
  misc_feature (1)..(192): Homolog of NCBI NO: 15222092 NR Description: hypothetical protein; protein id: At1g75060.1

SEQ ID NO: 33614 - DNA, 589 bp, Arabidopsis thaliana; identical to SEQ ID NO: 30024
  misc_feature (1)..(589): Ceres Seq. ID no. 13591389
  misc_feature: MA Experiment ID: 20000440 Result: Down-regulated in Transcription
  misc_feature: MA Experiment 20000440 PARAMETER Experiment Name: At_Closed-Flower__Sub_P Parameter: Tissue Value: Closed Flower vs. Whole Plant

SEQ ID NO: 33615 - protein, 155 aa, Arabidopsis thaliana; identical to SEQ ID NO: 30025
  peptide (1)..(155): Ceres Seq. ID no. 13591390
  misc_feature (35)..(149): Pfam Name: Ctr copper transporter family Pfam Description: Ctr copper transporter family
  misc_feature (12)..(150): Homolog of NCBI NO: 34909916 NR Description: P0665A11.18 [Oryza sativa (japonica
  misc_feature (34)..(144): Homolog of NCBI NO: 18496856 NR Description: COPT4 [Arabidopsis thaliana]
  misc_feature (34)..(144): Homolog of NCBI NO: 30687312 NR Description: COPT4 protein [Arabidopsis thaliana]
  misc_feature (27)..(148): Homolog of NCBI NO: 18496854 NR Description: copper transporter-like protein COPT3
  misc_feature (17)..(148): Homolog of NCBI NO: 21592951 NR Description: copper transport protein-like [Arabidopsis
  misc_feature (17)..(148): Homolog of NCBI NO: 15237804 NR Description: copper transport protein - like [Arabidopsis
  misc_feature (19)..(150): Homolog of NCBI NO: 15237802 NR Description: copper transport protein [Arabidopsis thaliana]
  misc_feature (13)..(150): Homolog of NCBI NO: 11288418 NR Description: copper transport protein [imported] - Arabidopsis
  misc_feature (11)..(155): Homolog of NCBI NO: 15232677 NR Description: copper transport protein - like protein
  misc_feature (11)..(155): Homolog of NCBI NO: 30683324 NR Description: copper transport protein -related protein

SEQ ID NO: 33616 - protein, 145 aa, Arabidopsis thaliana; identical to SEQ ID NO: 30026
  peptide (1)..(145): Ceres Seq. ID no. 13591391
  misc_feature (25)..(139): Pfam Name: Ctr copper transporter family Pfam Description: Ctr copper transporter family
  misc_feature (2)..(140): Homolog of NCBI NO: 34909916 NR Description: P0665A11.18 [Oryza sativa (japonica
  misc_feature (24)..(134): Homolog of NCBI NO: 18496856 NR Description: COPT4 [Arabidopsis thaliana]
  misc_feature (24)..(134): Homolog of NCBI NO: 30687312 NR Description: COPT4 protein [Arabidopsis thaliana]
  misc_feature (17)..(138): Homolog of NCBI NO: 18496854 NR Description: copper transporter-like protein COPT3
  misc_feature (7)..(138): Homolog of NCBI NO: 21592951 NR Description: copper transport protein-like [Arabidopsis
  misc_feature (7)..(138): Homolog of NCBI NO: 15237804 NR Description: copper transport protein - like [Arabidopsis
  misc_feature (9)..(140): Homolog of NCBI NO: 15237802 NR Description: copper transport protein [Arabidopsis thaliana]
  misc_feature (3)..(140): Homolog of NCBI NO: 11288418 NR Description: copper transport protein [imported] - Arabidopsis
  misc_feature (1)..(145): Homolog of NCBI NO: 15232677 NR Description: copper transport protein - like protein
  misc_feature (1)..(145): Homolog of NCBI NO: 30683324 NR Description: copper transport protein -related protein

SEQ ID NO: 33617 - protein, 140 aa, Arabidopsis thaliana; identical to SEQ ID NO: 30027
  peptide (1)..(140): Ceres Seq. ID no. 13591392
  misc_feature (20)..(134): Pfam Name: Ctr copper transporter family Pfam Description: Ctr copper transporter family
  misc_feature (1)..(135): Homolog of NCBI NO: 34909916 NR Description: P0665A11.18 [Oryza sativa (japonica
  misc_feature (19)..(129): Homolog of NCBI NO: 18496856 NR Description: COPT4 [Arabidopsis thaliana]
  misc_feature (19)..(129): Homolog of NCBI NO: 30687312 NR Description: COPT4 protein [Arabidopsis thaliana]
  misc_feature (12)..(133): Homolog of NCBI NO: 18496854 NR Description: copper transporter-like protein COPT3
  misc_feature (2)..(133): Homolog of NCBI NO: 21592951 NR Description: copper transport protein-like [Arabidopsis
  misc_feature (2)..(133): Homolog of NCBI NO: 15237804 NR Description: copper transport protein - like [Arabidopsis
  misc_feature (4)..(135): Homolog of NCBI NO: 15237802 NR Description: copper transport protein [Arabidopsis thaliana]
  misc_feature (1)..(135): Homolog of NCBI NO: 11288418 NR Description: copper transport protein [imported] - Arabidopsis
  misc_feature (1)..(140): Homolog of NCBI NO: 15232677 NR Description: copper transport protein - like protein
  misc_feature (1)..(140): Homolog of NCBI NO: 30683324 NR Description: copper transport protein -related protein

SEQ ID NO: 33618 - DNA, 1466 bp, Arabidopsis thaliana; identical to SEQ ID NO: 30028
  misc_feature (1)..(1466): Ceres Seq. ID no. 13486699
  misc_feature: MA Experiment ID: 20000184 Result: Down-regulated in Transcription
  misc_feature: MA Experiment 20000184 PARAMETER Experiment Name: At_Shoots__P Parameter: Age (day) Value: 7
  misc_feature: MA Experiment 20000184 PARAMETER Experiment Name: At_Shoots__P Parameter: Tissue Value: Shoots vs. Whole Plant
  misc_feature: MA Experiment ID: 20000185 Result: Down-regulated in Transcription
  misc_feature: MA Experiment 20000185 PARAMETER Experiment Name: At_Roots__P Parameter: Age (day) Value: 7 vs. 21
  misc_feature: MA Experiment 20000185 PARAMETER Experiment Name: At_Roots__P Parameter: Organism Value: A. thaliana
  misc_feature: MA Experiment 20000185 PARAMETER Experiment Name: At_Roots__P Parameter: Tissue Value: Roots vs. Whole Plant
  misc_feature: MA Experiment ID: 20000234 Result: Up-regulated in Transcription
  misc_feature: MA Experiment 20000234 PARAMETER Experiment Name: At_Siliques_P Parameter: Age (day) Value: 21
  misc_feature: MA Experiment 20000234 PARAMETER Experiment Name: At_Siliques_P Parameter: Organism Value: A. thaliana
  misc_feature: MA Experiment 20000234 PARAMETER Experiment Name: At_Siliques_P Parameter: Plant Line Value: WS
  misc_feature: MA Experiment 20000234 PARAMETER Experiment Name: At_Siliques_P Parameter: Tissue Value: Less Than 5mm Siliques vs. Whole Plant
  misc_feature: MA Experiment ID: 20000264 Result: Up-regulated in Transcription
  misc_feature: MA Experiment 20000264 PARAMETER Experiment Name: At_Open_Flower_P Parameter: Age (day) Value: 21
  misc_feature: MA Experiment 20000264 PARAMETER Experiment Name: At_Open_Flower_P Parameter: Plant Line Value: WS
  misc_feature: MA Experiment 20000264 PARAMETER Experiment Name: At_Open_Flower_P Parameter: Tissue Value: Open Flower vs. Whole Plant
  misc_feature: MA Experiment ID: 20000265 Result: Up-regulated in Transcription
  misc_feature: MA Experiment 20000265 PARAMETER Experiment Name: At_Open_Flower_P Parameter: Age (day) Value: 21
  misc_feature: MA Experiment 20000265 PARAMETER Experiment Name: At_Open_Flower_P Parameter: Plant Line Value: WS
  misc_feature: MA Experiment 20000265 PARAMETER Experiment Name: At_Open_Flower_P Parameter: Tissue Value: Closed Flower vs. Whole Plant
  misc_feature: MA Experiment ID: 20000286 Result: Up-regulated in Transcription
  misc_feature: MA Experiment 20000286 PARAMETER Experiment Name: At_Open_Flower_P Parameter: Age (day) Value: 21
  misc_feature: MA Experiment 20000286 PARAMETER Experiment Name: At_Open_Flower_P Parameter: Plant Line Value: WS
  misc_feature: MA Experiment 20000286 PARAMETER Experiment Name: At_Open_Flower_P Parameter: Tissue Value: Half Open vs. Whole Plant
  misc_feature: MA Experiment ID: 20000794 Result: Up-regulated in Transcription
  misc_feature: MA Experiment 20000794 PARAMETER Experiment Name: At_Petals_P Parameter: Age (day) Value: 23-25 days
  misc_feature: MA Experiment 20000794 PARAMETER Experiment Name: At_Petals_P Parameter: Plant Line Value: WS
  misc_feature: MA Experiment 20000794 PARAMETER Experiment Name: At_Petals_P Parameter: Tissue Value: Petals vs. Whole plant
  misc_feature: MA Experiment ID: 20001757 Result: Down-regulated in Transcription
  misc_feature: MA Experiment 20001757 PARAMETER Experiment Name: At_50mM_NH4NO3_L-to-H_P Parameter: Timepoint (hr) Value: 6
  misc_feature: MA Experiment 20001757 PARAMETER Experiment Name: At_50mM_NH4NO3_L-to-H_P Parameter: Tissue Value: Leaf
  misc_feature: MA Experiment 20001757 PARAMETER Experiment Name: At_50mM_NH4NO3_L-to-H_P Parameter: Treatment Value: 50mM NH4NO3 vs 100mM Mannitol
  misc_feature: MA Experiment ID: 20001910 Result: Up-regulated in Transcription
  misc_feature: MA Experiment 20001910 PARAMETER Experiment Name: At_Drought_Reproduction_P Parameter: Age (day) Value: 37
  misc_feature: MA Experiment 20001910 PARAMETER Experiment Name: At_Drought_Reproduction_P Parameter: Organism Value: A. thaliana
  misc_feature: MA Experiment 20001910 PARAMETER Experiment Name: At_Drought_Reproduction_P Parameter: Plant Line Value: WS
  misc_feature: MA Experiment 20001910 PARAMETER Experiment Name: At_Drought_Reproduction_P Parameter: Timepoint (day) Value: 7
  misc_feature: MA Experiment 20001910 PARAMETER Experiment Name: At_Drought_Reproduction_P Parameter: Tissue Value: Flowers
  misc_feature: MA Experiment 20001910 PARAMETER Experiment Name: At_Drought_Reproduction_P Parameter: Treatment Value: Drought vs. No Drought
  misc_feature: MA Experiment ID: 20001911 Result: Up-regulated in Transcription
  misc_feature: MA Experiment 20001911 PARAMETER Experiment Name: At_Drought_Reproduction_P Parameter: Age (day) Value: 40
  misc_feature: MA Experiment 20001911 PARAMETER Experiment Name: At_Drought_Reproduction_P Parameter: Organism Value: A. thaliana
  misc_feature: MA Experiment 20001911 PARAMETER Experiment Name: At_Drought_Reproduction_P Parameter: Plant Line Value: WS
  misc_feature: MA Experiment 20001911 PARAMETER Experiment Name: At_Drought_Reproduction_P Parameter: Timepoint (day) Value: 10
  misc_feature: MA Experiment 20001911 PARAMETER Experiment Name: At_Drought_Reproduction_P Parameter: Tissue Value: Flowers
  misc_feature: MA Experiment 20001911 PARAMETER Experiment Name: At_Drought_Reproduction_P Parameter: Treatment Value: Drought vs. No Drought

SEQ ID NO: 33619 - protein, 395 aa, Arabidopsis thaliana; identical to SEQ ID NO: 30029
  peptide (1)..(395): Ceres Seq. ID no. 13486700
  misc_feature (48)..(386): Pfam Name: Glycosyl hydrolases family 28 Pfam Description: Glycosyl hydrolases family 28
  misc_feature (8)..(394): Homolog of NCBI NO: 3024386 NR Description: POLYGALACTURONASE PRECURSOR (PG) (PECTINASE)
  misc_feature (8)..(394): Homolog of NCBI NO: 3024385 NR Description: POLYGALACTURONASE PRECURSOR (PG) (PECTINASE)
  misc_feature (1)..(394): Homolog of NCBI NO: 548490 NR Description: Polygalacturonase precursor (PG) (Pectinase)
  misc_feature (1)..(394): Homolog of NCBI NO: 30984029 NR Description: polygalacturonase [Brassica napus]
  misc_feature (1)..(394): Homolog of NCBI NO: 21668071 NR Description: putative pollen polygalacturonase [Brassica
  misc_feature (1)..(392): Homolog of NCBI NO: 15231878 NR Description: exopolygalacturonase [Arabidopsis thaliana]
  misc_feature (1)..(395): Homolog of NCBI NO: 15231876 NR Description: polygalacturonase, putative [Arabidopsis
  misc_feature (5)..(389): Homolog of NCBI NO: 15231874 NR Description: polygalacturonase, putative [Arabidopsis
  misc_feature (5)..(389): Homolog of NCBI NO: 11263969 NR Description: polygalacturonase (EC 3.2.1.15) [imported] -
  misc_feature (1)..(395): Homolog of NCBI NO: 15238902 NR Description: polygalacturonase, putative [Arabidopsis

SEQ ID NO: 33620 - protein, 339 aa, Arabidopsis thaliana; identical to SEQ ID NO: 30030
  peptide (1)..(339): Ceres Seq. ID no. 13486701
  misc_feature (1)..(330): Pfam Name: Glycosyl hydrolases family 28 Pfam Description: Glycosyl hydrolases family 28
  misc_feature (1)..(338): Homolog of NCBI NO: 3024386 NR Description: POLYGALACTURONASE PRECURSOR (PG) (PECTINASE)
  misc_feature (1)..(338): Homolog of NCBI NO: 3024385 NR Description: POLYGALACTURONASE PRECURSOR (PG) (PECTINASE)
  misc_feature (1)..(338): Homolog of NCBI NO: 548490 NR Description: Polygalacturonase precursor (PG) (Pectinase)
  misc_feature (1)..(338): Homolog of NCBI NO: 30984029 NR Description: polygalacturonase [Brassica napus]
  misc_feature (1)..(338): Homolog of NCBI NO: 21668071 NR Description: putative pollen polygalacturonase [Brassica
  misc_feature (1)..(336): Homolog of NCBI NO: 15231878 NR Description: exopolygalacturonase [Arabidopsis thaliana]
  misc_feature (1)..(339): Homolog of NCBI NO: 15231876 NR Description: polygalacturonase, putative [Arabidopsis
  misc_feature (1)..(333): Homolog of NCBI NO: 15231874 NR Description: polygalacturonase, putative [Arabidopsis
  misc_feature (1)..(333): Homolog of NCBI NO: 11263969 NR Description: polygalacturonase (EC 3.2.1.15) [imported] -
  misc_feature (1)..(339): Homolog of NCBI NO: 15238902 NR Description: polygalacturonase, putative [Arabidopsis

SEQ ID NO: 33621 - protein, 326 aa, Arabidopsis thaliana; identical to SEQ ID NO: 30031
  peptide (1)..(326): Ceres Seq. ID no. 13486702
  misc_feature (1)..(317): Pfam Name: Glycosyl hydrolases family 28 Pfam Description: Glycosyl hydrolases family 28
  misc_feature (1)..(325): Homolog of NCBI NO: 3024386 NR Description: POLYGALACTURONASE PRECURSOR (PG) (PECTINASE)
  misc_feature (1)..(325): Homolog of NCBI NO: 3024385 NR Description: POLYGALACTURONASE PRECURSOR (PG) (PECTINASE)
  misc_feature (1)..(325): Homolog of NCBI NO: 548490 NR Description: Polygalacturonase precursor (PG) (Pectinase)
  misc_feature (1)..(325): Homolog of NCBI NO: 30984029 NR Description: polygalacturonase [Brassica napus]
  misc_feature (1)..(325): Homolog of NCBI NO: 21668071 NR Description: putative pollen polygalacturonase [Brassica
  misc_feature (1)..(323): Homolog of NCBI NO: 15231878 NR Description: exopolygalacturonase [Arabidopsis thaliana]
  misc_feature (1)..(326): Homolog of NCBI NO: 15231876 NR Description: polygalacturonase, putative [Arabidopsis
  misc_feature (1)..(320): Homolog of NCBI NO: 15231874 NR Description: polygalacturonase, putative [Arabidopsis
  misc_feature (1)..(320): Homolog of NCBI NO: 11263969 NR Description: polygalacturonase (EC 3.2.1.15) [imported] -
  misc_feature (1)..(326): Homolog of NCBI NO: 15238902 NR Description: polygalacturonase, putative [Arabidopsis

SEQ ID NO: 33622 - DNA, 1558 bp, Arabidopsis thaliana; identical to SEQ ID NO: 30032
  misc_feature (1)..(1558): Ceres Seq. ID no. 13497382
  misc_feature: MA Experiment ID: 108462 Result: Down-regulated in Transcription
  misc_feature: MA Experiment 108462 PARAMETER Experiment Name: At_Germinating_Seeds_cDNA_P Parameter: Age (day) Value: 2 vs. 0
  misc_feature: MA Experiment 108462 PARAMETER Experiment Name: At_Germinating_Seeds_cDNA_P Parameter: Tissue Value: Germinating Seeds
  misc_feature: MA Experiment ID: 108463 Result: Down-regulated in Transcription
  misc_feature: MA Experiment 108463 PARAMETER Experiment Name: At_Germinating_Seeds_cDNA_P Parameter: Age (day) Value: 3 vs. 0
  misc_feature: MA Experiment 108463 PARAMETER Experiment Name: At_Germinating_Seeds_cDNA_P Parameter: Tissue Value: Germinating Seeds
  misc_feature: MA Experiment ID: 108464 Result: Down-regulated in Transcription
  misc_feature: MA Experiment 108464 PARAMETER Experiment Name: At_Germinating_Seeds_cDNA_P Parameter: Age (day) Value: 4 vs. 0
  misc_feature: MA Experiment 108464 PARAMETER Experiment Name: At_Germinating_Seeds_cDNA_P Parameter: Tissue Value: Germinating Seeds
  misc_feature: MA Experiment ID: 20000180 Result: Down-regulated in Transcription
  misc_feature: MA Experiment 20000180 PARAMETER Experiment Name: At_Germinating_Seeds_P Parameter: Age (hr) Value: 24 vs. 0
  misc_feature: MA Experiment 20000180 PARAMETER Experiment Name: At_Germinating_Seeds_P Parameter: Tissue Value: Germinating Seeds

SEQ ID NO: 33623 - protein, 386 aa, Arabidopsis thaliana; identical to SEQ ID NO: 30033
  peptide (1)..(386): Ceres Seq. ID no. 13497383
  misc_feature (5)..(384): Homolog of NCBI NO: 7706278 NR Description: serologically defined breast cancer antigen 84
  misc_feature (5)..(384): Homolog of NCBI NO: 34860248 NR Description: similar to serologically defined breast cancer
  misc_feature (5)..(384): Homolog of NCBI NO: 13384938 NR Description: serologically defined breast cancer antigen 84
  misc_feature (5)..(384): Homolog of NCBI NO: 28278376 NR Description: Similar to serologically defined breast cancer
  misc_feature (358)..(386): Homolog of NCBI NO: 6598578 NR Description: F5J5.4 [Arabidopsis thaliana]
  misc_feature (1)..(154): Homolog of NCBI NO: 6598578 NR Description: F5J5.4 [Arabidopsis thaliana]
  misc_feature (149)..(362): Homolog of NCBI NO: 6598578 NR Description: F5J5.4 [Arabidopsis thaliana]
  misc_feature (1)..(386): Homolog of NCBI NO: 38347102 NR Description: OSJNBa0006M15.17 [Oryza sativa (japonica
  misc_feature (1)..(386): Homolog of NCBI NO: 30693281 NR Description: expressed protein [Arabidopsis thaliana]
  misc_feature (1)..(386): Homolog of NCBI NO: 18395087 NR Description: expressed protein [Arabidopsis thaliana]

SEQ ID NO: 33624 - protein, 382 aa, Arabidopsis thaliana; identical to SEQ ID NO: 30034
  peptide (1)..(382): Ceres Seq. ID no. 13497384
  misc_feature (1)..(380): Homolog of NCBI NO: 7706278 NR Description: serologically defined breast cancer antigen 84
  misc_feature (1)..(380): Homolog of NCBI NO: 34860248 NR Description: similar to serologically defined breast cancer
  misc_feature (1)..(380): Homolog of NCBI NO: 13384938 NR Description: serologically defined breast cancer antigen 84
  misc_feature (1)..(380): Homolog of NCBI NO: 28278376 NR Description: Similar to serologically defined breast cancer
  misc_feature (354)..(382): Homolog of NCBI NO: 6598578 NR Description: F5J5.4 [Arabidopsis thaliana]
  misc_feature (1)..(150): Homolog of NCBI NO: 6598578 NR Description: F5J5.4 [Arabidopsis thaliana]
  misc_feature (145)..(358): Homolog of NCBI NO: 6598578 NR Description: F5J5.4 [Arabidopsis thaliana]
  misc_feature (1)..(382): Homolog of NCBI NO: 38347102 NR Description: OSJNBa0006M15.17 [Oryza sativa (japonica
  misc_feature (1)..(382): Homolog of NCBI NO: 30693281 NR Description: expressed protein [Arabidopsis thaliana]
  misc_feature (1)..(382): Homolog of NCBI NO: 18395087 NR Description: expressed protein [Arabidopsis thaliana]

SEQ ID NO: 33625 - protein, 348 aa, Arabidopsis thaliana; identical to SEQ ID NO: 30035
  peptide (1)..(348): Ceres Seq. ID no. 13497385
  misc_feature (1)..(346): Homolog of NCBI NO: 7706278 NR Description: serologically defined breast cancer antigen 84
  misc_feature (1)..(346): Homolog of NCBI NO: 34860248 NR Description: similar to serologically defined breast cancer
  misc_feature (1)..(346): Homolog of NCBI NO: 13384938 NR Description: serologically defined breast cancer antigen 84
  misc_feature (1)..(346): Homolog of NCBI NO: 28278376 NR Description: Similar to serologically defined breast cancer
  misc_feature (320)..(348): Homolog of NCBI NO: 6598578 NR Description: F5J5.4 [Arabidopsis thaliana]
  misc_feature (1)..(116): Homolog of NCBI NO: 6598578 NR Description: F5J5.4 [Arabidopsis thaliana]
  misc_feature (111)..(324): Homolog of NCBI NO: 6598578 NR Description: F5J5.4 [Arabidopsis thaliana]
  misc_feature (1)..(348): Homolog of NCBI NO: 38347102 NR Description: OSJNBa0006M15.17 [Oryza sativa (japonica
  misc_feature (1)..(348): Homolog of NCBI NO: 30693281 NR Description: expressed protein [Arabidopsis thaliana]
  misc_feature (1)..(348): Homolog of NCBI NO: 18395087 NR Description: expressed protein [Arabidopsis thaliana]

SEQ ID NO: 33626 - DNA, 1613 bp, Arabidopsis thaliana; identical to SEQ ID NO: 30036
  misc_feature (1)..(1613): Ceres Seq. ID no. 13490265
  misc_feature: MA Experiment ID: 108434 Result: Up-regulated in Transcription
  misc_feature: MA Experiment 108434 PARAMETER Experiment Name: At_Root_Tips_cDNA_P Parameter: Tissue Value: Root Tips
  misc_feature: MA Experiment ID: 108461 Result: Down-regulated in Transcription
  misc_feature: MA Experiment 108461 PARAMETER Experiment Name: At_Germinating_Seeds_cDNA_P Parameter: Age (day) Value: 1 vs. 0
  misc_feature: MA Experiment 108461 PARAMETER Experiment Name: At_Germinating_Seeds_cDNA_P Parameter: Tissue Value: Germinating Seeds
  misc_feature: MA Experiment ID: 108462 Result: Down-regulated in Transcription
  misc_feature: MA Experiment 108462 PARAMETER Experiment Name: At_Germinating_Seeds_cDNA_P Parameter: Age (day) Value: 2 vs. 0
  misc_feature: MA Experiment 108462 PARAMETER Experiment Name: At_Germinating_Seeds_cDNA_P Parameter: Tissue Value: Germinating Seeds
  misc_feature: MA Experiment ID: 108463 Result: Down-regulated in Transcription
  misc_feature: MA Experiment 108463 PARAMETER Experiment Name: At_Germinating_Seeds_cDNA_P Parameter: Age (day) Value: 3 vs. 0
  misc_feature: MA Experiment 108463 PARAMETER Experiment Name: At_Germinating_Seeds_cDNA_P Parameter: Tissue Value: Germinating Seeds
  misc_feature: MA Experiment ID: 108464 Result: Down-regulated in Transcription
  misc_feature: MA Experiment 108464 PARAMETER Experiment Name: At_Germinating_Seeds_cDNA_P Parameter: Age (day) Value: 4 vs. 0
  misc_feature: MA Experiment 108464 PARAMETER Experiment Name: At_Germinating_Seeds_cDNA_P Parameter: Tissue Value: Germinating Seeds
  misc_feature: MA Experiment ID: 108572 Result: Down-regulated in Transcription
  misc_feature: MA Experiment 108572 PARAMETER Experiment Name: At_Drought_cDNA_P Parameter: Timepoint (hr) Value: 1
  misc_feature: MA Experiment 108572 PARAMETER Experiment Name: At_Drought_cDNA_P Parameter: Tissue Value: Aerial
  misc_feature: MA Experiment 108572 PARAMETER Experiment Name: At_Drought_cDNA_P Parameter: Treatment Value: Drought vs. No Drought
  misc_feature: MA Experiment ID: 108573 Result: Down-regulated in Transcription
  misc_feature: MA Experiment 108573 PARAMETER Experiment Name: At_Drought_cDNA_P Parameter: Timepoint (hr) Value: 6
  misc_feature: MA Experiment 108573 PARAMETER Experiment Name: At_Drought_cDNA_P Parameter: Tissue Value: Aerial
  misc_feature: MA Experiment 108573 PARAMETER Experiment Name: At_Drought_cDNA_P Parameter: Treatment Value: Drought vs. No Drought
  misc_feature: MA Experiment ID: 20000171 Result: Down-regulated in Transcription
  misc_feature: MA Experiment 20000171 PARAMETER Experiment Name: At_42deg_Heat_P Parameter: Age (day) Value: 14
  misc_feature: MA Experiment 20000171 PARAMETER Experiment Name: At_42deg_Heat_P Parameter: Organism Value: A. thaliana
  misc_feature: MA Experiment 20000171 PARAMETER Experiment Name: At_42deg_Heat_P Parameter: Plant Line Value: WS
  misc_feature: MA Experiment 20000171 PARAMETER Experiment Name: At_42deg_Heat_P Parameter: Temperature (deg C) Value: 42 vs. 22
  misc_feature: MA Experiment 20000171 PARAMETER Experiment Name: At_42deg_Heat_P Parameter: Timepoint (hr) Value: 1
  misc_feature: MA Experiment 20000171 PARAMETER Experiment Name: At_42deg_Heat_P Parameter: Tissue Value: Aerial
  misc_feature: MA Experiment ID: 20000180 Result: Down-regulated in Transcription
  misc_feature: MA Experiment 20000180 PARAMETER Experiment Name: At_Germinating_Seeds_P Parameter: Age (hr) Value: 24 vs. 0
  misc_feature: MA Experiment 20000180 PARAMETER Experiment Name: At_Germinating_Seeds_P Parameter: Tissue Value: Germinating Seeds
  misc_feature: MA Experiment ID: 20000224 Result: Down-regulated in Transcription
  misc_feature: MA Experiment ID: 20000437 Result: Down-regulated in Transcription
  misc_feature: MA Experiment 20000437 PARAMETER Experiment Name: At_Drought_P Parameter: Age (day) Value: 8
  misc_feature: MA Experiment 20000437 PARAMETER Experiment Name: At_Drought_P Parameter: Organism Value: A. thaliana
  misc_feature: MA Experiment 20000437 PARAMETER Experiment Name: At_Drought_P Parameter: Plant Line Value: WS
  misc_feature: MA Experiment 20000437 PARAMETER Experiment Name: At_Drought_P Parameter: Timepoint (hr) Value: 24
  misc_feature: MA Experiment 20000437 PARAMETER Experiment Name: At_Drought_P Parameter: Tissue Value: Whole Plant
  misc_feature: MA Experiment 20000437 PARAMETER Experiment Name: At_Drought_P Parameter: Treatment Value: Drought vs. No Drought
  misc_feature: MA Experiment ID: 20000573 Result: Down-regulated in Transcription
  misc_feature: MA Experiment 20000573 PARAMETER Experiment Name: At_100uM_ABA_Mutants__P Parameter: Organism Value: A. thaliana
  misc_feature: MA Experiment 20000573 PARAMETER Experiment Name: At_100uM_ABA_Mutants__P Parameter: Plant Line Value: CS22 vs. Ler wt
  misc_feature: MA Experiment 20000573 PARAMETER Experiment Name: At_100uM_ABA_Mutants__P Parameter: Timepoint (hr) Value: N/A
  misc_feature: MA Experiment 20000573 PARAMETER Experiment Name: At_100uM_ABA_Mutants__P Parameter: Tissue Value: Whole Plant
  misc_feature: MA Experiment 20000573 PARAMETER Experiment Name: At_100uM_ABA_Mutants__P Parameter: Treatment Value: None
  misc_feature: MA Experiment ID: 20000574 Result: Down-regulated in Transcription
  misc_feature: MA Experiment 20000574 PARAMETER Experiment Name: At_100uM_ABA_Mutants__P Parameter: Organism Value: A. thaliana
  misc_feature: MA Experiment 20000574 PARAMETER Experiment Name: At_100uM_ABA_Mutants__P Parameter: Plant Line Value: CS23 vs. Ler wt
  misc_feature: MA Experiment 20000574 PARAMETER Experiment Name: At_100uM_ABA_Mutants__P Parameter: Timepoint (hr) Value: N/A
  misc_feature: MA Experiment 20000574 PARAMETER Experiment Name: At_100uM_ABA_Mutants__P Parameter: Tissue Value: Whole Plant
  misc_feature: MA Experiment 20000574 PARAMETER Experiment Name: At_100uM_ABA_Mutants__P Parameter: Treatment Value: None
  misc_feature: MA Experiment ID: 20000794 Result: Down-regulated in Transcription
  misc_feature: MA Experiment 20000794 PARAMETER Experiment Name: At_Petals_P Parameter: Age (day) Value: 23-25 days
  misc_feature: MA Experiment 20000794 PARAMETER Experiment Name: At_Petals_P Parameter: Plant Line Value: WS
  misc_feature: MA Experiment 20000794 PARAMETER Experiment Name: At_Petals_P Parameter: Tissue Value: Petals vs. Whole plant
  misc_feature: MA Experiment ID: 20001451 Result: Down-regulated in Transcription
  misc_feature: MA Experiment 20001451 PARAMETER Experiment Name: At_Far-red-induction_P Parameter: Age (day) Value: 7
  misc_feature: MA Experiment 20001451 PARAMETER Experiment Name: At_Far-red-induction_P Parameter: Light Value: Far-red vs. White
  misc_feature: MA Experiment 20001451 PARAMETER Experiment Name: At_Far-red-induction_P Parameter: Organism Value: A. thaliana
  misc_feature: MA Experiment 20001451 PARAMETER Experiment Name: At_Far-red-induction_P Parameter: Plant Line Value: Columbia
  misc_feature: MA Experiment 20001451 PARAMETER Experiment Name: At_Far-red-induction_P Parameter: Timepoint (hr) Value: 24
  misc_feature: MA Experiment 20001451 PARAMETER Experiment Name: At_Far-red-induction_P Parameter: Tissue Value: Whole Plant
  misc_feature: MA Experiment ID: 20001911 Result: Down-regulated in Transcription
  misc_feature: MA Experiment 20001911 PARAMETER Experiment Name: At_Drought_Reproduction_P Parameter: Age (day) Value: 40
  misc_feature: MA Experiment 20001911 PARAMETER Experiment Name: At_Drought_Reproduction_P Parameter: Organism Value: A. thaliana
  misc_feature: MA Experiment 20001911 PARAMETER Experiment Name: At_Drought_Reproduction_P Parameter: Plant Line Value: WS
  misc_feature: MA Experiment 20001911 PARAMETER Experiment Name: At_Drought_Reproduction_P Parameter: Timepoint (day) Value: 10
  misc_feature: MA Experiment 20001911 PARAMETER Experiment Name: At_Drought_Reproduction_P Parameter: Tissue Value: Flowers
  misc_feature: MA Experiment 20001911 PARAMETER Experiment Name: At_Drought_Reproduction_P Parameter: Treatment Value: Drought vs. No Drought

SEQ ID NO: 33627 - protein, 407 aa, Arabidopsis thaliana; identical to SEQ ID NO: 30037
  peptide (1)..(407): Ceres Seq. ID no. 15218814
  misc_feature (327)..(361): Pfam Name: PPR repeat Pfam Description: PPR repeat
  misc_feature (1)..(388): Homolog of NCBI NO: 18399887 NR Description: pentatricopeptide (PPR) repeat-containing protein
  misc_feature (19)..(388): Homolog of NCBI NO: 21617993 NR Description: unknown [Arabidopsis thaliana]
  misc_feature (23)..(405): Homolog of NCBI NO: 18398767 NR Description: pentatricopeptide (PPR) repeat-containing protein
  misc_feature (23)..(405): Homolog of NCBI NO: 25455786 NR Description: membrane-associated salt-inducible protein like
  misc_feature (23)..(405): Homolog of NCBI NO: 15234493 NR Description: pentatricopeptide (PPR) repeat-containing protein
  misc_feature (1)..(384): Homolog of NCBI NO: 15222796 NR Description: pentatricopeptide (PPR) repeat-containing protein
  misc_feature (31)..(407): Homolog of NCBI NO: 34908820 NR Description: P0557A01.33 [Oryza sativa (japonica
  misc_feature (1)..(406): Homolog of NCBI NO: 15221069 NR Description: pentatricopeptide (PPR) repeat-containing protein
  misc_feature (1)..(407): Homolog of NCBI NO: 18407365 NR Description: pentatricopeptide (PPR) repeat-containing protein
  misc_feature (1)..(407): Homolog of NCBI NO: 21553755 NR Description: putative membrane-associated salt-inducible

SEQ ID NO: 33628 - protein, 278 aa, Arabidopsis thaliana; identical to SEQ ID NO: 30038
  peptide (1)..(278): Ceres Seq. ID no. 15218815
  misc_feature (198)..(232): Pfam Name: PPR repeat Pfam Description: PPR repeat
  misc_feature (1)..(259): Homolog of NCBI NO: 18399887 NR Description: pentatricopeptide (PPR) repeat-containing protein
  misc_feature (1)..(259): Homolog of NCBI NO: 21617993 NR Description: unknown [Arabidopsis thaliana]
  misc_feature (1)..(276): Homolog of NCBI NO: 18398767 NR Description: pentatricopeptide (PPR) repeat-containing protein
  misc_feature (1)..(276): Homolog of NCBI NO: 25455786 NR Description: membrane-associated salt-inducible protein like
  misc_feature (1)..(276): Homolog of NCBI NO: 15234493 NR Description: pentatricopeptide (PPR) repeat-containing protein
  misc_feature (1)..(255): Homolog of NCBI NO: 15222796 NR Description: pentatricopeptide (PPR) repeat-containing protein
  misc_feature (1)..(278): Homolog of NCBI NO: 34908820 NR Description: P0557A01.33 [Oryza sativa (japonica
  misc_feature (1)..(277): Homolog of NCBI NO: 15221069 NR Description: pentatricopeptide (PPR) repeat-containing protein
  misc_feature (1)..(278): Homolog of NCBI NO: 18407365 NR Description: pentatricopeptide (PPR) repeat-containing protein
  misc_feature (1)..(278): Homolog of NCBI NO: 21553755 NR Description: putative membrane-associated salt-inducible

SEQ ID NO: 33629 - protein, 232 aa, Arabidopsis thaliana; identical to SEQ ID NO: 30039
  peptide (1)..(232): Ceres Seq. ID no. 15218816
  misc_feature (152)..(186): Pfam Name: PPR repeat Pfam Description: PPR repeat
  misc_feature (1)..(213): Homolog of NCBI NO: 18399887 NR Description: pentatricopeptide (PPR) repeat-containing protein
  misc_feature (1)..(213): Homolog of NCBI NO: 21617993 NR Description: unknown [Arabidopsis thaliana]
  misc_feature (1)..(230): Homolog of NCBI NO: 18398767 NR Description: pentatricopeptide (PPR) repeat-containing protein
  misc_feature (1)..(230): Homolog of NCBI NO: 25455786 NR Description: membrane-associated salt-inducible protein like
  misc_feature (1)..(230): Homolog of NCBI NO: 15234493 NR Description: pentatricopeptide (PPR) repeat-containing protein
  misc_feature (1)..(209): Homolog of NCBI NO: 15222796 NR Description: pentatricopeptide (PPR) repeat-containing protein
  misc_feature (1)..(232): Homolog of NCBI NO: 34908820 NR Description: P0557A01.33 [Oryza sativa (japonica
  misc_feature (1)..(231): Homolog of NCBI NO: 15221069 NR Description: pentatricopeptide (PPR) repeat-containing protein
  misc_feature (1)..(232): Homolog of NCBI NO: 18407365 NR Description: pentatricopeptide (PPR) repeat-containing protein
  misc_feature (1)..(232): Homolog of NCBI NO: 21553755 NR Description: putative membrane-associated salt-inducible

SEQ ID NO: 33630 - DNA, 1370 bp, Arabidopsis thaliana; identical to SEQ ID NO: 30040
  misc_feature (1)..(1370): Ceres Seq. ID no. 13490428
  misc_feature: MA Experiment ID: 108434 Result: Down-regulated in Transcription
  misc_feature: MA Experiment 108434 PARAMETER Experiment Name: At_Root_Tips_cDNA_P Parameter: Tissue Value: Root Tips
  misc_feature: MA Experiment ID: 108461 Result: Up-regulated in Transcription
  misc_feature: MA Experiment 108461 PARAMETER Experiment Name: At_Germinating_Seeds_cDNA_P Parameter: Age (day) Value: 1 vs. 0
  misc_feature: MA Experiment 108461 PARAMETER Experiment Name: At_Germinating_Seeds_cDNA_P Parameter: Tissue Value: Germinating Seeds
  misc_feature: MA Experiment ID: 108462 Result: Up-regulated in Transcription
  misc_feature: MA Experiment 108462 PARAMETER Experiment Name: At_Germinating_Seeds_cDNA_P Parameter: Age (day) Value: 2 vs. 0
  misc_feature: MA Experiment 108462 PARAMETER Experiment Name: At_Germinating_Seeds_cDNA_P Parameter: Tissue Value: Germinating Seeds
  misc_feature: MA Experiment ID: 108463 Result: Up-regulated in Transcription
  misc_feature: MA Experiment 108463 PARAMETER Experiment Name: At_Germinating_Seeds_cDNA_P Parameter: Age (day) Value: 3 vs. 0
  misc_feature: MA Experiment 108463 PARAMETER Experiment Name: At_Germinating_Seeds_cDNA_P Parameter: Tissue Value: Germinating Seeds
  misc_feature: MA Experiment ID: 108573 Result: Down-regulated in Transcription
  misc_feature: MA Experiment 108573 PARAMETER Experiment Name: At_Drought_cDNA_P Parameter: Timepoint (hr) Value: 6
  misc_feature: MA Experiment 108573 PARAMETER Experiment Name: At_Drought_cDNA_P Parameter: Tissue Value: Aerial
  misc_feature: MA Experiment 108573 PARAMETER Experiment Name: At_Drought_cDNA_P Parameter: Treatment Value: Drought vs. No Drought
  misc_feature: MA Experiment ID: 108594 Result: Down-regulated in Transcription
  misc_feature: MA Experiment 108594 PARAMETER Experiment Name: At_Ler-rhl_Root_cDNA_P Parameter: Plant Line Value: null
  misc_feature: MA Experiment ID: 108607 Result: Down-regulated in Transcription
  misc_feature: MA Experiment 108607 PARAMETER Experiment Name: At_100uM_ABA_cDNA_P Parameter: Timepoint (hr) Value: 4
  misc_feature: MA Experiment 108607 PARAMETER Experiment Name: At_100uM_ABA_cDNA_P Parameter: Tissue Value: Aerial
  misc_feature: MA Experiment 108607 PARAMETER Experiment Name: At_100uM_ABA_cDNA_P Parameter: Treatment Value: 100uM ABA vs. No Treatment
  misc_feature: MA Experiment ID: 108608 Result: Down-regulated in Transcription
  misc_feature: MA Experiment 108608 PARAMETER Experiment Name: At_100uM_ABA_cDNA_P Parameter: Timepoint (hr) Value: 1
  misc_feature: MA Experiment 108608 PARAMETER Experiment Name: At_100uM_ABA_cDNA_P Parameter: Tissue Value: Aerial
  misc_feature: MA Experiment 108608 PARAMETER Experiment Name: At_100uM_ABA_cDNA_P Parameter: Treatment Value: 100uM ABA vs. No Treatment
  misc_feature: MA Experiment ID: 108667 Result: Down-regulated in Transcription
  misc_feature: MA Experiment 108667 PARAMETER Experiment Name: At_2mM_SA_cDNA_P Parameter: Plant Line Value: WS
  misc_feature: MA Experiment 108667 PARAMETER Experiment Name: At_2mM_SA_cDNA_P Parameter: Timepoint (hr) Value: 1
  misc_feature: MA Experiment 108667 PARAMETER Experiment Name: At_2mM_SA_cDNA_P Parameter: Treatment Value: 2mM SA vs. No Treatment
  misc_feature: MA Experiment ID: 108668 Result: Down-regulated in Transcription
  misc_feature: MA Experiment 108668 PARAMETER Experiment Name: At_2mM_SA_cDNA_P Parameter: Plant Line Value: WS
  misc_feature: MA Experiment 108668 PARAMETER Experiment Name: At_2mM_SA_cDNA_P Parameter: Timepoint (hr) Value: 6
  misc_feature: MA Experiment 108668 PARAMETER Experiment Name: At_2mM_SA_cDNA_P Parameter: Treatment Value: 2mM SA vs. No Treatment
  misc_feature: MA Experiment ID: 20000069 Result: Down-regulated in Transcription
  misc_feature: MA Experiment 20000069 PARAMETER Experiment Name: At_100uM_ABA_Mutants_cDNA_P Parameter: Plant Line Value: CS23
  misc_feature: MA Experiment 20000069 PARAMETER Experiment Name: At_100uM_ABA_Mutants_cDNA_P Parameter: Timepoint (hr) Value: 6
  misc_feature: MA Experiment 20000069 PARAMETER Experiment Name: At_100uM_ABA_Mutants_cDNA_P Parameter: Tissue Value: Aerial
  misc_feature: MA Experiment 20000069 PARAMETER Experiment Name: At_100uM_ABA_Mutants_cDNA_P Parameter: Treatment Value: 100uM ABA vs. No Treatment
  misc_feature: MA Experiment ID: 20000070 Result: Down-regulated in Transcription
  misc_feature: MA Experiment 20000070 PARAMETER Experiment Name: At_100uM_ABA_Mutants_cDNA_P Parameter: Plant Line Value: CS24
  misc_feature: MA Experiment 20000070 PARAMETER Experiment Name: At_100uM_ABA_Mutants_cDNA_P Parameter: Timepoint (hr) Value: 6
  misc_feature: MA Experiment 20000070 PARAMETER Experiment Name: At_100uM_ABA_Mutants_cDNA_P Parameter: Tissue Value: Aerial
  misc_feature: MA Experiment 20000070 PARAMETER Experiment Name: At_100uM_ABA_Mutants_cDNA_P Parameter: Treatment Value: 100uM ABA vs. No Treatment
  misc_feature: MA Experiment ID: 20000071 Result: Down-regulated in Transcription
  misc_feature: MA Experiment 20000071 PARAMETER Experiment Name: At_100uM_ABA_Mutants_cDNA_P Parameter: Plant Line Value: CS8104
  misc_feature: MA Experiment 20000071 PARAMETER Experiment Name: At_100uM_ABA_Mutants_cDNA_P Parameter: Timepoint (hr) Value: 6
  misc_feature: MA Experiment 20000071 PARAMETER Experiment Name: At_100uM_ABA_Mutants_cDNA_P Parameter: Tissue Value: Aerial
  misc_feature: MA Experiment 20000071 PARAMETER Experiment Name: At_100uM_ABA_Mutants_cDNA_P Parameter: Treatment Value: 100uM ABA vs. No Treatment
  misc_feature: MA Experiment ID: 20000072 Result: Down-regulated in Transcription
  misc_feature: MA Experiment 20000072 PARAMETER Experiment Name: At_100uM_ABA_Mutants_cDNA_P Parameter: Plant Line Value: CS8105
  misc_feature: MA Experiment 20000072 PARAMETER Experiment Name: At_100uM_ABA_Mutants_cDNA_P Parameter: Timepoint (hr) Value: 6
  misc_feature: MA Experiment 20000072 PARAMETER Experiment Name: At_100uM_ABA_Mutants_cDNA_P Parameter: Tissue Value: Aerial
  misc_feature: MA Experiment 20000072 PARAMETER Experiment Name: At_100uM_ABA_Mutants_cDNA_P Parameter: Treatment Value: 100uM ABA vs. No Treatment
  misc_feature: MA Experiment ID: 20000087 Result: Down-regulated in Transcription
  misc_feature: MA Experiment 20000087 PARAMETER Experiment Name: At_100uM_ABA_Mutants_cDNA_P Parameter: Plant Line Value: WS
  misc_feature: MA Experiment 20000087 PARAMETER Experiment Name: At_100uM_ABA_Mutants_cDNA_P Parameter: Timepoint (hr) Value: 6
  misc_feature: MA Experiment 20000087 PARAMETER Experiment Name: At_100uM_ABA_Mutants_cDNA_P Parameter: Tissue Value: Aerial
  misc_feature: MA Experiment 20000087 PARAMETER Experiment Name: At_100uM_ABA_Mutants_cDNA_P Parameter: Treatment Value: 100uM ABA vs. No Treatment
  misc_feature: MA Experiment ID: 20000089 Result: Down-regulated in Transcription
  misc_feature: MA Experiment ID: 20000090 Result: Down-regulated in Transcription
  misc_feature: MA Experiment ID: 20000117 Result: Down-regulated in Transcription
  misc_feature: MA Experiment 20000117 PARAMETER Experiment Name: At_100uM_ABA_Mutants_cDNA_P Parameter: Plant Line Value: Columbia
  misc_feature: MA Experiment 20000117 PARAMETER Experiment Name: At_100uM_ABA_Mutants_cDNA_P Parameter: Timepoint (hr) Value: 6
  misc_feature: MA Experiment 20000117 PARAMETER Experiment Name: At_100uM_ABA_Mutants_cDNA_P Parameter: Tissue Value: Aerial
  misc_feature: MA Experiment 20000117 PARAMETER Experiment Name: At_100uM_ABA_Mutants_cDNA_P Parameter: Treatment Value: 100uM ABA vs. No Treatment
  misc_feature: MA Experiment ID: 20000166 Result: Down-regulated in Transcription
  misc_feature: MA Experiment 20000166 PARAMETER Experiment Name: At_100uM_ABA_P Parameter: Age (day) Value: 14
  misc_feature: MA Experiment 20000166 PARAMETER Experiment Name: At_100uM_ABA_P Parameter: Organism Value: A. thaliana
  misc_feature: MA Experiment 20000166 PARAMETER Experiment Name: At_100uM_ABA_P Parameter: Plant Line Value: WS
  misc_feature: MA Experiment 20000166 PARAMETER Experiment Name: At_100uM_ABA_P Parameter: Timepoint (hr) Value: 1
  misc_feature: MA Experiment 20000166 PARAMETER Experiment Name: At_100uM_ABA_P Parameter: Tissue Value: Aerial
  misc_feature: MA Experiment 20000166 PARAMETER Experiment Name: At_100uM_ABA_P Parameter: Treatment Value: 100uM ABA vs. No Treatment
  misc_feature: MA Experiment ID: 20000173 Result: Down-regulated in Transcription
  misc_feature: MA Experiment 20000173 PARAMETER Experiment Name: At_42deg_Heat_P Parameter: Age (day) Value: 14
  misc_feature: MA Experiment 20000173 PARAMETER Experiment Name: At_42deg_Heat_P Parameter: Organism Value: A. thaliana
  misc_feature: MA Experiment 20000173 PARAMETER Experiment Name: At_42deg_Heat_P Parameter: Plant Line Value: WS
  misc_feature: MA Experiment 20000173 PARAMETER Experiment Name: At_42deg_Heat_P Parameter: Temperature (deg C) Value: 42 vs. 22
  misc_feature: MA Experiment 20000173 PARAMETER Experiment Name: At_42deg_Heat_P Parameter: Timepoint (hr) Value: 6
  misc_feature: MA Experiment 20000173 PARAMETER Experiment Name: At_42deg_Heat_P Parameter: Tissue Value: Aerial
  misc_feature: MA Experiment ID: 20000179 Result: Up-regulated in Transcription
  misc_feature: MA Experiment 20000179 PARAMETER Experiment Name: At_Germinating_Seeds_P Parameter: Age (hr) Value: 6 vs. 0
  misc_feature: MA Experiment 20000179 PARAMETER Experiment Name: At_Germinating_Seeds_P Parameter: Tissue Value: Germinating Seeds
  misc_feature: MA Experiment ID: 20000180 Result: Up-regulated in Transcription
  misc_feature: MA Experiment 20000180 PARAMETER Experiment Name: At_Germinating_Seeds_P Parameter: Age (hr) Value: 24 vs. 0
  misc_feature: MA Experiment 20000180 PARAMETER Experiment Name: At_Germinating_Seeds_P Parameter: Tissue Value: Germinating Seeds
  misc_feature: MA Experiment ID: 20000182 Result: Down-regulated in Transcription
  misc_feature: MA Experiment 20000182 PARAMETER Experiment Name: At_2mM_SA_P Parameter: Age (day) Value: 14
  misc_feature: MA Experiment 20000182 PARAMETER Experiment Name: At_2mM_SA_P Parameter: Organism Value: A. thaliana
  misc_feature: MA Experiment 20000182 PARAMETER Experiment Name: At_2mM_SA_P Parameter: Plant Line Value: WS
  misc_feature: MA Experiment 20000182 PARAMETER Experiment Name: At_2mM_SA_P Parameter: Timepoint (hr) Value: 6
  misc_feature: MA Experiment 20000182 PARAMETER Experiment Name: At_2mM_SA_P Parameter: Tissue Value: Aerial
  misc_feature: MA Experiment 20000182 PARAMETER Experiment Name: At_2mM_SA_P Parameter: Treatment Value: 2mM SA vs. No Treatment
  misc_feature: MA Experiment ID: 20000184 Result: Down-regulated in Transcription
  misc_feature: MA Experiment 20000184 PARAMETER Experiment Name: At_Shoots__P Parameter: Age (day) Value: 7
  misc_feature: MA Experiment 20000184 PARAMETER Experiment Name: At_Shoots__P Parameter: Tissue Value: Shoots vs. Whole Plant
  misc_feature: MA Experiment ID: 20000234 Result: Down-regulated in Transcription
  misc_feature: MA Experiment 20000234 PARAMETER Experiment Name: At_Siliques_P Parameter: Age (day) Value: 21
  misc_feature: MA Experiment 20000234 PARAMETER Experiment Name: At_Siliques_P Parameter: Organism Value: A. thaliana
  misc_feature: MA Experiment 20000234 PARAMETER Experiment Name: At_Siliques_P Parameter: Plant Line Value: WS
  misc_feature: MA Experiment 20000234 PARAMETER Experiment Name: At_Siliques_P Parameter: Tissue Value: Less Than 5mm Siliques vs. Whole Plant
  misc_feature: MA Experiment ID: 20000264 Result: Up-regulated in Transcription
  misc_feature: MA Experiment 20000264 PARAMETER Experiment Name: At_Open_Flower_P Parameter: Age (day) Value: 21
  misc_feature: MA Experiment 20000264 PARAMETER Experiment Name: At_Open_Flower_P Parameter: Plant Line Value: WS
  misc_feature: MA Experiment 20000264 PARAMETER Experiment Name: At_Open_Flower_P Parameter: Tissue Value: Open Flower vs. Whole Plant
  misc_feature: MA Experiment ID: 20000437 Result: Down-regulated in Transcription
  misc_feature: MA Experiment 20000437 PARAMETER Experiment Name: At_Drought_P Parameter: Age (day) Value: 8
  misc_feature: MA Experiment 20000437 PARAMETER Experiment Name: At_Drought_P Parameter: Organism Value: A. thaliana
  misc_feature: MA Experiment 20000437 PARAMETER Experiment Name: At_Drought_P Parameter: Plant Line Value: WS
  misc_feature: MA Experiment 20000437 PARAMETER Experiment Name: At_Drought_P Parameter: Timepoint (hr) Value: 24
  misc_feature: MA Experiment 20000437 PARAMETER Experiment Name: At_Drought_P Parameter: Tissue Value: Whole Plant
  misc_feature: MA Experiment 20000437 PARAMETER Experiment Name: At_Drought_P Parameter: Treatment Value: Drought vs. No Drought
  misc_feature: MA Experiment ID: 20000438 Result: Down-regulated in Transcription
  misc_feature: MA Experiment 20000438 PARAMETER Experiment Name: At_Shoots__P Parameter: Age (day) Value: 14
  misc_feature: MA Experiment 20000438 PARAMETER Experiment Name: At_Shoots__P Parameter: Tissue Value: Shoots vs. Whole Plant
  misc_feature: MA Experiment ID: 20000451 Result: Down-regulated in Transcription
  misc_feature: MA Experiment 20000451 PARAMETER Experiment Name: At_CS6879_Shoots-Roots_P Parameter: Age (day) Value: 14
  misc_feature: MA Experiment 20000451 PARAMETER Experiment Name: At_CS6879_Shoots-Roots_P Parameter: Organism Value: A. thaliana
  misc_feature: MA Experiment 20000451 PARAMETER Experiment Name: At_CS6879_Shoots-Roots_P Parameter: Plant Line Value: CS6879 vs. WS
  misc_feature: MA Experiment 20000451 PARAMETER Experiment Name: At_CS6879_Shoots-Roots_P Parameter: Tissue Value: Roots
  misc_feature: MA Experiment ID: 20000495 Result: Up-regulated in Transcription
  misc_feature: MA Experiment 20000495 PARAMETER Experiment Name: At_Guard_Cells_P Parameter: Harvest Date Value: 8/2/2002
  misc_feature: MA Experiment 20000495 PARAMETER Experiment Name: At_Guard_Cells_P Parameter: Organism Value: A. thaliana
  misc_feature: MA Experiment 20000495 PARAMETER Experiment Name: At_Guard_Cells_P Parameter: Tissue Value: Guard Cells vs. Leaves
  misc_feature: MA Experiment ID: 20000794 Result: Up-regulated in Transcription
  misc_feature: MA Experiment 20000794 PARAMETER Experiment Name: At_Petals_P Parameter: Age (day) Value: 23-25 days
  misc_feature: MA Experiment 20000794 PARAMETER Experiment Name: At_Petals_P Parameter: Plant Line Value: WS
  misc_feature: MA Experiment 20000794 PARAMETER Experiment Name: At_Petals_P Parameter: Tissue Value: Petals vs. Whole plant
  misc_feature: MA Experiment ID: 20001248 Result: Down-regulated in Transcription
  misc_feature: MA Experiment 20001248 PARAMETER Experiment Name: At_Far-red-induction_P Parameter: Age (day) Value: 7
  misc_feature: MA Experiment 20001248 PARAMETER Experiment Name: At_Far-red-induction_P Parameter: Light Value: Far-red vs. White
  misc_feature: MA Experiment 20001248 PARAMETER Experiment Name: At_Far-red-induction_P Parameter: Organism Value: A. thaliana
  misc_feature: MA Experiment 20001248 PARAMETER Experiment Name: At_Far-red-induction_P Parameter: Plant Line Value: Columbia
  misc_feature: MA Experiment 20001248 PARAMETER Experiment Name: At_Far-red-induction_P Parameter: Timepoint (hr) Value: 4
  misc_feature: MA Experiment 20001248 PARAMETER Experiment Name: At_Far-red-induction_P Parameter: Tissue Value: Whole Plant
  misc_feature: MA Experiment ID: 20001555 Result: Down-regulated in Transcription
  misc_feature: MA Experiment 20001555 PARAMETER Experiment Name: At_Drought_Soil_Dry_P Parameter: Age (day) Value: 24
  misc_feature: MA Experiment 20001555 PARAMETER Experiment Name: At_Drought_Soil_Dry_P Parameter: Organism Value: A. thaliana
  misc_feature: MA Experiment 20001555 PARAMETER Experiment Name: At_Drought_Soil_Dry_P Parameter: Plant Line Value: WS
  misc_feature: MA Experiment 20001555 PARAMETER Experiment Name: At_Drought_Soil_Dry_P Parameter: Post Timepoint (hr) Value: None
  misc_feature: MA Experiment 20001555 PARAMETER Experiment Name: At_Drought_Soil_Dry_P Parameter: Post-Treatment Value: None
  misc_feature: MA Experiment 20001555 PARAMETER Experiment Name: At_Drought_Soil_Dry_P Parameter: Timepoint (day) Value: 10
  misc_feature: MA Experiment 20001555 PARAMETER Experiment Name: At_Drought_Soil_Dry_P Parameter: Treatment Value: Drought vs. No Drought
  misc_feature: MA Experiment ID: 20001556 Result: Down-regulated in Transcription
  misc_feature: MA Experiment 20001556 PARAMETER Experiment Name: At_Drought_Soil_Dry_P Parameter: Age (day) Value: 26
  misc_feature: MA Experiment 20001556 PARAMETER Experiment Name: At_Drought_Soil_Dry_P Parameter: Organism Value: A. thaliana
  misc_feature: MA Experiment 20001556 PARAMETER Experiment Name: At_Drought_Soil_Dry_P Parameter: Plant Line Value: WS
  misc_feature: MA Experiment 20001556 PARAMETER Experiment Name: At_Drought_Soil_Dry_P Parameter: Post Timepoint (hr) Value: None
  misc_feature: MA Experiment 20001556 PARAMETER Experiment Name: At_Drought_Soil_Dry_P Parameter: Post-Treatment Value: None
  misc_feature: MA Experiment 20001556 PARAMETER Experiment Name: At_Drought_Soil_Dry_P Parameter: Timepoint (day) Value: 12
  misc_feature: MA Experiment 20001556 PARAMETER Experiment Name: At_Drought_Soil_Dry_P Parameter: Treatment Value: Drought vs. No Drought
  misc_feature: MA Experiment ID: 20001560 Result: Down-regulated in Transcription
  misc_feature: MA Experiment 20001560 PARAMETER Experiment Name: At_Drought_Soil_Dry_P Parameter: Age (day) Value: 28
  misc_feature: MA Experiment 20001560 PARAMETER Experiment Name: At_Drought_Soil_Dry_P Parameter: Organism Value: A. thaliana
  misc_feature: MA Experiment 20001560 PARAMETER Experiment Name: At_Drought_Soil_Dry_P Parameter: Plant Line Value: WS
  misc_feature: MA Experiment 20001560 PARAMETER Experiment Name: At_Drought_Soil_Dry_P Parameter: Post Timepoint (hr) Value: None
  misc_feature: MA Experiment 20001560 PARAMETER Experiment Name: At_Drought_Soil_Dry_P Parameter: Post-Treatment Value: None
  misc_feature: MA Experiment 20001560 PARAMETER Experiment Name: At_Drought_Soil_Dry_P Parameter: Timepoint (day) Value: 14
  misc_feature: MA Experiment 20001560 PARAMETER Experiment Name: At_Drought_Soil_Dry_P Parameter: Treatment Value: Drought vs. No Drought
  misc_feature: MA Experiment ID: 20001757 Result: Down-regulated in Transcription
  misc_feature: MA Experiment 20001757 PARAMETER Experiment Name: At_50mM_NH4NO3_L-to-H_P Parameter: Timepoint (hr) Value: 6
  misc_feature: MA Experiment 20001757 PARAMETER Experiment Name: At_50mM_NH4NO3_L-to-H_P Parameter: Tissue Value: Leaf
  misc_feature: MA Experiment 20001757 PARAMETER Experiment Name: At_50mM_NH4NO3_L-to-H_P Parameter: Treatment Value: 50mM NH4NO3 vs 100mM Mannitol
  misc_feature: MA Experiment ID: 20001905 Result: Down-regulated in Transcription
  misc_feature: MA Experiment 20001905 PARAMETER Experiment Name: At_Drought_Reproduction_P Parameter: Age (day) Value: 40
  misc_feature: MA Experiment 20001905 PARAMETER Experiment Name: At_Drought_Reproduction_P Parameter: Organism Value: A. thaliana
  misc_feature: MA Experiment 20001905 PARAMETER Experiment Name: At_Drought_Reproduction_P Parameter: Plant Line Value: WS
  misc_feature: MA Experiment 20001905 PARAMETER Experiment Name: At_Drought_Reproduction_P Parameter: Timepoint (day) Value: 10
  misc_feature: MA Experiment 20001905 PARAMETER Experiment Name: At_Drought_Reproduction_P Parameter: Tissue Value: Rosettes
  misc_feature: MA Experiment 20001905 PARAMETER Experiment Name: At_Drought_Reproduction_P Parameter: Treatment Value: Drought vs. No Drought
  misc_feature: MA Experiment ID: 20001908 Result: Up-regulated in Transcription
  misc_feature: MA Experiment 20001908 PARAMETER Experiment Name: At_Drought_Reproduction_P Parameter: Age (day) Value: 40
  misc_feature: MA Experiment 20001908 PARAMETER Experiment Name: At_Drought_Reproduction_P Parameter: Organism Value: A. thaliana
  misc_feature: MA Experiment 20001908 PARAMETER Experiment Name: At_Drought_Reproduction_P Parameter: Plant Line Value: WS
  misc_feature: MA Experiment 20001908 PARAMETER Experiment Name: At_Drought_Reproduction_P Parameter: Timepoint (day) Value: 10
  misc_feature: MA Experiment 20001908 PARAMETER Experiment Name: At_Drought_Reproduction_P Parameter: Tissue Value: Siliques
  misc_feature: MA Experiment 20001908 PARAMETER Experiment Name: At_Drought_Reproduction_P Parameter: Treatment Value: Drought vs. No Drought
  misc_feature: MA Experiment ID: 20001911 Result: Down-regulated in Transcription
  misc_feature: MA Experiment 20001911 PARAMETER Experiment Name: At_Drought_Reproduction_P Parameter: Age (day) Value: 40
  misc_feature: MA Experiment 20001911 PARAMETER Experiment Name: At_Drought_Reproduction_P Parameter: Organism Value: A. thaliana
  misc_feature: MA Experiment 20001911 PARAMETER Experiment Name: At_Drought_Reproduction_P Parameter: Plant Line Value: WS
  misc_feature: MA Experiment 20001911 PARAMETER Experiment Name: At_Drought_Reproduction_P Parameter: Timepoint (day) Value: 10
  misc_feature: MA Experiment 20001911 PARAMETER Experiment Name: At_Drought_Reproduction_P Parameter: Tissue Value: Flowers
  misc_feature: MA Experiment 20001911 PARAMETER Experiment Name: At_Drought_Reproduction_P Parameter: Treatment Value: Drought vs. No Drought

SEQ ID NO: 33631 - protein, 380 aa, Arabidopsis thaliana; identical to SEQ ID NO: 30041
  peptide (1)..(380): Ceres Seq. ID no. 13490429
  misc_feature (196)..(326): Pfam Name: Integral membrane protein DUF6 Pfam Description: Integral membrane protein DUF6
  misc_feature (7)..(379): Homolog of NCBI NO: 15219123 NR Description: nodulin N21 family protein [Arabidopsis thaliana]
  misc_feature (10)..(365): Homolog of NCBI NO: 26452235 NR Description: putative nodulin [Arabidopsis thaliana]
  misc_feature (1)..(355): Homolog of NCBI NO: 15240683 NR Description: nodulin MtN21 family protein [Arabidopsis
  misc_feature (10)..(365): Homolog of NCBI NO: 15236455 NR Description: nodulin MtN21 family protein [Arabidopsis
  misc_feature (10)..(365): Homolog of NCBI NO: 21593603 NR Description: nodulin-like protein [Arabidopsis thaliana]
  misc_feature (67)..(346): Homolog of NCBI NO: 18404429 NR Description: nodulin MtN21 family protein [Arabidopsis
  misc_feature (14)..(368): Homolog of NCBI NO: 15225480 NR Description: nodulin MtN21 family protein [Arabidopsis
  misc_feature (9)..(346): Homolog of NCBI NO: 25408555 NR Description: nodulin-like protein [imported] - Arabidopsis
  misc_feature (19)..(380): Homolog of NCBI NO: 21553757 NR Description: nodulin-like protein [Arabidopsis thaliana]
  misc_feature (1)..(380): Homolog of NCBI NO: 15224291 NR Description: nodulin MtN21 family protein [Arabidopsis

SEQ ID NO: 33632 - protein, 371 aa, Arabidopsis thaliana; identical to SEQ ID NO: 30042
  peptide (1)..(371): Ceres Seq. ID no. 13490430
  misc_feature (187)..(317): Pfam Name: Integral membrane protein DUF6 Pfam Description: Integral membrane protein DUF6
  misc_feature (1)..(370): Homolog of NCBI NO: 15219123 NR Description: nodulin N21 family protein [Arabidopsis thaliana]
  misc_feature (1)..(356): Homolog of NCBI NO: 26452235 NR Description: putative nodulin [Arabidopsis thaliana]
  misc_feature (1)..(346): Homolog of NCBI NO: 15240683 NR Description: nodulin MtN21 family protein [Arabidopsis
  misc_feature (1)..(356): Homolog of NCBI NO: 15236455 NR Description: nodulin MtN21 family protein [Arabidopsis
  misc_feature (1)..(356): Homolog of NCBI NO: 21593603 NR Description: nodulin-like protein [Arabidopsis thaliana]
  misc_feature (58)..(337): Homolog of NCBI NO: 18404429 NR Description: nodulin MtN21 family protein [Arabidopsis
  misc_feature (5)..(359): Homolog of NCBI NO: 15225480 NR Description: nodulin MtN21 family protein [Arabidopsis
  misc_feature (1)..(337): Homolog of NCBI NO: 25408555 NR Description: nodulin-like protein [imported] - Arabidopsis
  misc_feature (10)..(371): Homolog of NCBI NO: 21553757 NR Description: nodulin-like protein [Arabidopsis thaliana]
  misc_feature (1)..(371): Homolog of NCBI NO: 15224291 NR Description: nodulin MtN21 family protein [Arabidopsis

SEQ ID NO: 33633 - protein, 362 aa, Arabidopsis thaliana; identical to SEQ ID NO: 30043
  peptide (1)..(362): Ceres Seq. ID no. 13490431
  misc_feature (178)..(308): Pfam Name: Integral membrane protein DUF6 Pfam Description: Integral membrane protein DUF6
  misc_feature (1)..(361): Homolog of NCBI NO: 15219123 NR Description: nodulin N21 family protein [Arabidopsis thaliana]
  misc_feature (1)..(347): Homolog of NCBI NO: 26452235 NR Description: putative nodulin [Arabidopsis thaliana]
  misc_feature (1)..(337): Homolog of NCBI NO: 15240683 NR Description: nodulin MtN21 family protein [Arabidopsis
  misc_feature (1)..(347): Homolog of NCBI NO: 15236455 NR Description: nodulin MtN21 family protein [Arabidopsis
  misc_feature (1)..(347): Homolog of NCBI NO: 21593603 NR Description: nodulin-like protein [Arabidopsis thaliana]
  misc_feature (49)..(328): Homolog of NCBI NO: 18404429 NR Description: nodulin MtN21 family protein [Arabidopsis
  misc_feature (1)..(350): Homolog of NCBI NO: 15225480 NR Description: nodulin MtN21 family protein [Arabidopsis
  misc_feature (1)..(328): Homolog of NCBI NO: 25408555 NR Description: nodulin-like protein [imported] - Arabidopsis
  misc_feature (1)..(362): Homolog of NCBI NO: 21553757 NR Description: nodulin-like protein [Arabidopsis thaliana]
  misc_feature (1)..(362): Homolog of NCBI NO: 15224291 NR Description: nodulin MtN21 family protein [Arabidopsis

SEQ ID NO: 33634 - DNA, 1623 bp, Arabidopsis thaliana; identical to SEQ ID NO: 30044
  misc_feature (1)..(1623): Ceres Seq. ID no. 12335112
  misc_feature: MA Experiment ID: 108435 Result: Down-regulated in Transcription
  misc_feature: MA Experiment 108435 PARAMETER Experiment Name: At_stm_Mutants_cDNA_P Parameter: Plant Line Value: wt Landsburg vs stm
  misc_feature: MA Experiment 108435 PARAMETER Experiment Name: At_stm_Mutants_cDNA_P Parameter: Tissue Value: Shoot Apical Meristem Region
  misc_feature: MA Experiment ID: 108462 Result: Up-regulated in Transcription
  misc_feature: MA Experiment 108462 PARAMETER Experiment Name: At_Germinating_Seeds_cDNA_P Parameter: Age (day) Value: 2 vs. 0
  misc_feature: MA Experiment 108462 PARAMETER Experiment Name: At_Germinating_Seeds_cDNA_P Parameter: Tissue Value: Germinating Seeds
  misc_feature: MA Experiment ID: 108463 Result: Up-regulated in Transcription
  misc_feature: MA Experiment 108463 PARAMETER Experiment Name: At_Germinating_Seeds_cDNA_P Parameter: Age (day) Value: 3 vs. 0
  misc_feature: MA Experiment 108463 PARAMETER Experiment Name: At_Germinating_Seeds_cDNA_P Parameter: Tissue Value: Germinating Seeds
  misc_feature: MA Experiment ID: 108464 Result: Up-regulated in Transcription
  misc_feature: MA Experiment 108464 PARAMETER Experiment Name: At_Germinating_Seeds_cDNA_P Parameter: Age (day) Value: 4 vs. 0
  misc_feature: MA Experiment 108464 PARAMETER Experiment Name: At_Germinating_Seeds_cDNA_P Parameter: Tissue Value: Germinating Seeds
  misc_feature: MA Experiment ID: 108473 Result: Down-regulated in Transcription
  misc_feature: MA Experiment 108473 PARAMETER Experiment Name: At_Drought_Flowers_cDNA_P Parameter: Timepoint (hr) Value: 7 d
  misc_feature: MA Experiment 108473 PARAMETER Experiment Name: At_Drought_Flowers_cDNA_P Parameter: Tissue Value: Flower
  misc_feature: MA Experiment 108473 PARAMETER Experiment Name: At_Drought_Flowers_cDNA_P Parameter: Treatment Value: Drought vs. No Drought
  misc_feature: MA Experiment ID: 108585 Result: Down-regulated in Transcription
  misc_feature: MA Experiment 108585 PARAMETER Experiment Name: At_5mM_NaNP_cDNA_P Parameter: Timepoint (hr) Value: 6
  misc_feature: MA Experiment 108585 PARAMETER Experiment Name: At_5mM_NaNP_cDNA_P Parameter: Tissue Value: Aerial
  misc_feature: MA Experiment 108585 PARAMETER Experiment Name: At_5mM_NaNP_cDNA_P Parameter: Treatment Value: null
  misc_feature: MA Experiment ID: 108595 Result: Down-regulated in Transcription
  misc_feature: MA Experiment 108595 PARAMETER Experiment Name: At_Ler-pi_Ovule_cDNA_P Parameter: Plant Line Value: null
  misc_feature: MA Experiment ID: 108668 Result: Down-regulated in Transcription
  misc_feature: MA Experiment 108668 PARAMETER Experiment Name: At_2mM_SA_cDNA_P Parameter: Plant Line Value: WS
  misc_feature: MA Experiment 108668 PARAMETER Experiment Name: At_2mM_SA_cDNA_P Parameter: Timepoint (hr) Value: 6
  misc_feature: MA Experiment 108668 PARAMETER Experiment Name: At_2mM_SA_cDNA_P Parameter: Treatment Value: 2mM SA vs. No Treatment
  misc_feature: MA Experiment ID: 20000071 Result: Up-regulated in Transcription
  misc_feature: MA Experiment 20000071 PARAMETER Experiment Name: At_100uM_ABA_Mutants_cDNA_P Parameter: Plant Line Value: CS8104
  misc_feature: MA Experiment 20000071 PARAMETER Experiment Name: At_100uM_ABA_Mutants_cDNA_P Parameter: Timepoint (hr) Value: 6
  misc_feature: MA Experiment 20000071 PARAMETER Experiment Name: At_100uM_ABA_Mutants_cDNA_P Parameter: Tissue Value: Aerial
  misc_feature: MA Experiment 20000071 PARAMETER Experiment Name: At_100uM_ABA_Mutants_cDNA_P Parameter: Treatment Value: 100uM ABA vs. No Treatment
  misc_feature: MA Experiment ID: 20000111 Result: Down-regulated in Transcription
  misc_feature: MA Experiment 20000111 PARAMETER Experiment Name: At_42deg_Heat_cDNA_P Parameter: Temperature (deg C) Value: 42 vs. 22
  misc_feature: MA Experiment 20000111 PARAMETER Experiment Name: At_42deg_Heat_cDNA_P Parameter: Timepoint (hr) Value: 6
  misc_feature: MA Experiment 20000111 PARAMETER Experiment Name: At_42deg_Heat_cDNA_P Parameter: Tissue Value: Aerial
  misc_feature: MA Experiment ID: 20000113 Result: Down-regulated in Transcription
  misc_feature: MA Experiment 20000113 PARAMETER Experiment Name: At_42deg_Heat_cDNA_P Parameter: Temperature (deg C) Value: 42 vs. 22
  misc_feature: MA Experiment 20000113 PARAMETER Experiment Name: At_42deg_Heat_cDNA_P Parameter: Timepoint (hr) Value: 8
  misc_feature: MA Experiment 20000113 PARAMETER Experiment Name: At_42deg_Heat_cDNA_P Parameter: Tissue Value: Aerial
  misc_feature: Phenotype: ROSETTE LEAVES Curled-Curled 4
  misc_feature: Phenotype: ROSETTE LEAVES Shape-Lanceolate
  misc_feature: Phenotype: INFLORESCENCE Flowering Time-Late Flowering
  misc_feature: Phenotype: ROSETTE LEAVES Other
  misc_feature: Phenotype: WHOLE PLANT Size-Small
  misc_feature: Phenotype: ROSETTE LEAVES Other
  misc_feature: Phenotype: WHOLE PLANT Size-Small
  misc_feature: Phenotype: INFLORESCENCE Flowering Time-Late Flowering
  misc_feature: Phenotype: ROSETTE LEAVES Shape-Elliptic
  misc_feature: Phenotype: ROSETTE LEAVES Other

SEQ ID NO: 33635 - protein, 506 aa, Arabidopsis thaliana; identical to SEQ ID NO: 30045
  peptide (1)..(506): Ceres Seq. ID no. 12335113
  misc_feature (24)..(503): Homolog of NCBI NO: 25289447 NR Description: hypothetical protein T2K10.15 [imported] -
  misc_feature (24)..(503): Homolog of NCBI NO: 22330338 NR Description: glycosyl hydrolase family 1; protein id:
  misc_feature (28)..(505): Homolog of NCBI NO: 22328869 NR Description: glycosyl hydrolase family 1; protein id:
  misc_feature (4)..(220): Homolog of NCBI NO: 11264268 NR Description: beta-glucosidase-like protein - Arabidopsis
  misc_feature (253)..(506): Homolog of NCBI NO: 11264268 NR Description: beta-glucosidase-like protein - Arabidopsis
  misc_feature (4)..(506): Homolog of NCBI NO: 15228847 NR Description: glycosyl hydrolase family 1; protein id:
  misc_feature (4)..(506): Homolog of NCBI NO: 7435451 NR Description: beta-glucosidase homolog T27E11.60 - Arabidopsis
  misc_feature (4)..(506): Homolog of NCBI NO: 22331910 NR Description: glycosyl hydrolase family 1; protein id:
  misc_feature (4)..(506): Homolog of NCBI NO: 7435452 NR Description: beta-glucosidase homolog T27E11.70 - Arabidopsis
  misc_feature (4)..(506): Homolog of NCBI NO: 18417073 NR Description: glycosyl hydrolase family 1

SEQ ID NO: 33636 - protein, 503 aa, Arabidopsis thaliana; identical to SEQ ID NO: 30046
  peptide (1)..(503): Ceres Seq. ID no. 12335114
  misc_feature (21)..(500): Homolog of NCBI NO: 25289447 NR Description: hypothetical protein T2K10.15 [imported] -
  misc_feature (21)..(500): Homolog of NCBI NO: 22330338 NR Description: glycosyl hydrolase family 1; protein id:
  misc_feature (25)..(502): Homolog of NCBI NO: 22328869 NR Description: glycosyl hydrolase family 1; protein id:
  misc_feature (1)..(217): Homolog of NCBI NO: 11264268 NR Description: beta-glucosidase-like protein - Arabidopsis
  misc_feature (250)..(503): Homolog of NCBI NO: 11264268 NR Description: beta-glucosidase-like protein - Arabidopsis
  misc_feature (1)..(503): Homolog of NCBI NO: 15228847 NR Description: glycosyl hydrolase family 1; protein id:
  misc_feature (1)..(503): Homolog of NCBI NO: 7435451 NR Description: beta-glucosidase homolog T27E11.60 - Arabidopsis
  misc_feature (1)..(503): Homolog of NCBI NO: 22331910 NR Description: glycosyl hydrolase family 1; protein id:
  misc_feature (1)..(503): Homolog of NCBI NO: 7435452 NR Description: beta-glucosidase homolog T27E11.70 - Arabidopsis
  misc_feature (1)..(503): Homolog of NCBI NO: 18417073 NR Description: glycosyl hydrolase family 1

SEQ ID NO: 33637 - protein, 418 aa, Arabidopsis thaliana; identical to SEQ ID NO: 30047
  peptide (1)..(418): Ceres Seq. ID no. 12335115
  misc_feature (1)..(415): Homolog of NCBI NO: 25289447 NR Description: hypothetical protein T2K10.15 [imported] -
  misc_feature (1)..(415): Homolog of NCBI NO: 22330338 NR Description: glycosyl hydrolase family 1; protein id:
  misc_feature (1)..(417): Homolog of NCBI NO: 22328869 NR Description: glycosyl hydrolase family 1; protein id:
  misc_feature (1)..(132): Homolog of NCBI NO: 11264268 NR Description: beta-glucosidase-like protein - Arabidopsis
  misc_feature (165)..(418): Homolog of NCBI NO: 11264268 NR Description: beta-glucosidase-like protein - Arabidopsis
  misc_feature (1)..(418): Homolog of NCBI NO: 15228847 NR Description: glycosyl hydrolase family 1; protein id:
  misc_feature (1)..(418): Homolog of NCBI NO: 7435451 NR Description: beta-glucosidase homolog T27E11.60 - Arabidopsis
  misc_feature (1)..(418): Homolog of NCBI NO: 22331910 NR Description: glycosyl hydrolase family 1; protein id:
  misc_feature (1)..(418): Homolog of NCBI NO: 7435452 NR Description: beta-glucosidase homolog T27E11.70 - Arabidopsis
  misc_feature (1)..(418): Homolog of NCBI NO: 18417073 NR Description: glycosyl hydrolase family 1

SEQ ID NO: 33638 - DNA, 1868 bp, Arabidopsis thaliana; identical to SEQ ID NO: 30048
  misc_feature (1)..(1868): Ceres Seq. ID no. 12333644
  misc_feature: MA Experiment ID: 108462 Result: Up-regulated in Transcription
  misc_feature: MA Experiment 108462 PARAMETER Experiment Name: At_Germinating_Seeds_cDNA_P Parameter: Age (day) Value: 2 vs. 0
  misc_feature: MA Experiment 108462 PARAMETER Experiment Name: At_Germinating_Seeds_cDNA_P Parameter: Tissue Value: Germinating Seeds
  misc_feature: MA Experiment ID: 108464 Result: Up-regulated in Transcription
  misc_feature: MA Experiment 108464 PARAMETER Experiment Name: At_Germinating_Seeds_cDNA_P Parameter: Age (day) Value: 4 vs. 0
  misc_feature: MA Experiment 108464 PARAMETER Experiment Name: At_Germinating_Seeds_cDNA_P Parameter: Tissue Value: Germinating Seeds
  misc_feature: MA Experiment ID: 108569 Result: Up-regulated in Transcription
  misc_feature: MA Experiment 108569 PARAMETER Experiment Name: At_0.001%_MeJA__cDNA_P Parameter: Timepoint (hr) Value: 6
  misc_feature: MA Experiment 108569 PARAMETER Experiment Name: At_0.001%_MeJA__cDNA_P Parameter: Tissue Value: Aerial
  misc_feature: MA Experiment 108569 PARAMETER Experiment Name: At_0.001%_MeJA__cDNA_P Parameter: Treatment Value: 0.001% MeJA vs. No Treatment
  misc_feature: MA Experiment ID: 108573 Result: Up-regulated in Transcription
  misc_feature: MA Experiment 108573 PARAMETER Experiment Name: At_Drought_cDNA_P Parameter: Timepoint (hr) Value: 6
  misc_feature: MA Experiment 108573 PARAMETER Experiment Name: At_Drought_cDNA_P Parameter: Tissue Value: Aerial
  misc_feature: MA Experiment 108573 PARAMETER Experiment Name: At_Drought_cDNA_P Parameter: Treatment Value: Drought vs. No Drought
  misc_feature: MA Experiment ID: 108574 Result: Up-regulated in Transcription
  misc_feature: MA Experiment 108574 PARAMETER Experiment Name: At_Wounding__cDNA_P Parameter: Timepoint (hr) Value: 1
  misc_feature: MA Experiment 108574 PARAMETER Experiment Name: At_Wounding__cDNA_P Parameter: Tissue Value: Aerial
  misc_feature: MA Experiment 108574 PARAMETER Experiment Name: At_Wounding__cDNA_P Parameter: Treatment Value: Wounding vs. No Wounding
  misc_feature: MA Experiment ID: 20000180 Result: Up-regulated in Transcription
  misc_feature: MA Experiment 20000180 PARAMETER Experiment Name: At_Germinating_Seeds_P Parameter: Age (hr) Value: 24 vs. 0
  misc_feature: MA Experiment 20000180 PARAMETER Experiment Name: At_Germinating_Seeds_P Parameter: Tissue Value: Germinating Seeds
  misc_feature: MA Experiment ID: 20000496 Result: Up-regulated in Transcription
  misc_feature: MA Experiment 20000496 PARAMETER Experiment Name: At_Guard_Cells_P Parameter: Harvest Date Value: 7/19/2002
  misc_feature: MA Experiment 20000496 PARAMETER Experiment Name: At_Guard_Cells_P Parameter: Organism Value: Canola
  misc_feature: MA Experiment 20000496 PARAMETER Experiment Name: At_Guard_Cells_P Parameter: Tissue Value: Guard Cells vs. Leaves

SEQ ID NO: 33639 - protein, 488 aa, Arabidopsis thaliana; identical to SEQ ID NO: 30049
  peptide (1)..(488): Ceres Seq. ID no. 12333645
  misc_feature (38)..(459): Pfam Name: Flavin containing amine oxidoreductase Pfam Description: Flavin containing amine oxidoreductase
  misc_feature (16)..(457): Homolog of NCBI NO: 38505628 NR Description: slr5093 [Synechocystis sp. PCC 6803]
  misc_feature (373)..(488): Homolog of NCBI NO: 25404949 NR Description: protein F1E22.18 [imported] - Arabidopsis
  misc_feature (21)..(393): Homolog of NCBI NO: 25404949 NR Description: protein F1E22.18 [imported] - Arabidopsis
  misc_feature (21)..(488): Homolog of NCBI NO: 13877615 NR Description: putative protein kinase gb|AAD22129 [Arabidopsis
  misc_feature (21)..(488): Homolog of NCBI NO: 15218830 NR Description: polyamine oxidase, putative
  misc_feature (24)..(488): Homolog of NCBI NO: 38344167 NR Description: OSJNBa0053K19.6 [Oryza sativa (japonica
  misc_feature (1)..(488): Homolog of NCBI NO: 18650598 NR Description: At2g43020/MFL8.12 [Arabidopsis thaliana]
  misc_feature (1)..(488): Homolog of NCBI NO: 15224204 NR Description: putative amine oxidase
  misc_feature (1)..(488): Homolog of NCBI NO: 15231622 NR Description: putative protein
  misc_feature (1)..(488): Homolog of NCBI NO: 21553762 NR Description: putative amine oxidase [Arabidopsis thaliana]

SEQ ID NO: 33640 - protein, 466 aa, Arabidopsis thaliana; identical to SEQ ID NO: 30050
  peptide (1)..(466): Ceres Seq. ID no. 12333646
  misc_feature (16)..(437): Pfam Name: Flavin containing amine oxidoreductase Pfam Description: Flavin containing amine oxidoreductase
  misc_feature (1)..(435): Homolog of NCBI NO: 38505628 NR Description: slr5093 [Synechocystis sp. PCC 6803]
  misc_feature (351)..(466): Homolog of NCBI NO: 25404949 NR Description: protein F1E22.18 [imported] - Arabidopsis
  misc_feature (1)..(371): Homolog of NCBI NO: 25404949 NR Description: protein F1E22.18 [imported] - Arabidopsis
  misc_feature (1)..(466): Homolog of NCBI NO: 13877615 NR Description: putative protein kinase gb|AAD22129 [Arabidopsis
  misc_feature (1)..(466): Homolog of NCBI NO: 15218830 NR Description: polyamine oxidase, putative
  misc_feature (2)..(466): Homolog of NCBI NO: 38344167 NR Description: OSJNBa0053K19.6 [Oryza sativa (japonica
  misc_feature (1)..(466): Homolog of NCBI NO: 18650598 NR Description: At2g43020/MFL8.12 [Arabidopsis thaliana]
  misc_feature (1)..(466): Homolog of NCBI NO: 15224204 NR Description: putative amine oxidase
  misc_feature (1)..(466): Homolog of NCBI NO: 15231622 NR Description: putative protein
  misc_feature (1)..(466): Homolog of NCBI NO: 21553762 NR Description: putative amine oxidase [Arabidopsis thaliana]

SEQ ID NO: 33641 - protein, 451 aa, Arabidopsis thaliana; identical to SEQ ID NO: 30051
  peptide (1)..(451): Ceres Seq. ID no. 12333647
  misc_feature (1)..(422): Pfam Name: Flavin containing amine oxidoreductase Pfam Description: Flavin containing amine oxidoreductase
  misc_feature (1)..(420): Homolog of NCBI NO: 38505628 NR Description: slr5093 [Synechocystis sp. PCC 6803]
  misc_feature (336)..(451): Homolog of NCBI NO: 25404949 NR Description: protein F1E22.18 [imported] - Arabidopsis
  misc_feature (1)..(356): Homolog of NCBI NO: 25404949 NR Description: protein F1E22.18 [imported] - Arabidopsis
  misc_feature (1)..(451): Homolog of NCBI NO: 13877615 NR Description: putative protein kinase gb|AAD22129 [Arabidopsis
  misc_feature (1)..(451): Homolog of NCBI NO: 15218830 NR Description: polyamine oxidase, putative
  misc_feature (1)..(451): Homolog of NCBI NO: 38344167 NR Description: OSJNBa0053K19.6 [Oryza sativa (japonica
  misc_feature (1)..(451): Homolog of NCBI NO: 18650598 NR Description: At2g43020/MFL8.12 [Arabidopsis thaliana]
  misc_feature (1)..(451): Homolog of NCBI NO: 15224204 NR Description: putative amine oxidase
  misc_feature (1)..(451): Homolog of NCBI NO: 15231622 NR Description: putative protein
  misc_feature (1)..(451): Homolog of NCBI NO: 21553762 NR Description: putative amine oxidase [Arabidopsis thaliana]

SEQ ID NO: 33642 - DNA, 872 bp, Arabidopsis thaliana; identical to SEQ ID NO: 30052
  misc_feature (1)..(872): Ceres Seq. ID no. 12333983
  misc_feature: MA Experiment ID: 108434 Result: Up-regulated in Transcription
  misc_feature: MA Experiment 108434 PARAMETER Experiment Name: At_Root_Tips_cDNA_P Parameter: Tissue Value: Root Tips
  misc_feature: MA Experiment ID: 108462 Result: Down-regulated in Transcription
  misc_feature: MA Experiment 108462 PARAMETER Experiment Name: At_Germinating_Seeds_cDNA_P Parameter: Age (day) Value: 2 vs. 0
  misc_feature: MA Experiment 108462 PARAMETER Experiment Name: At_Germinating_Seeds_cDNA_P Parameter: Tissue Value: Germinating Seeds
  misc_feature: MA Experiment ID: 108463 Result: Down-regulated in Transcription
  misc_feature: MA Experiment 108463 PARAMETER Experiment Name: At_Germinating_Seeds_cDNA_P Parameter: Age (day) Value: 3 vs. 0
  misc_feature: MA Experiment 108463 PARAMETER Experiment Name: At_Germinating_Seeds_cDNA_P Parameter: Tissue Value: Germinating Seeds
  misc_feature: MA Experiment ID: 108464 Result: Down-regulated in Transcription
  misc_feature: MA Experiment 108464 PARAMETER Experiment Name: At_Germinating_Seeds_cDNA_P Parameter: Age (day) Value: 4 vs. 0
  misc_feature: MA Experiment 108464 PARAMETER Experiment Name: At_Germinating_Seeds_cDNA_P Parameter: Tissue Value: Germinating Seeds
  misc_feature: MA Experiment ID: 108573 Result: Down-regulated in Transcription
  misc_feature: MA Experiment 108573 PARAMETER Experiment Name: At_Drought_cDNA_P Parameter: Timepoint (hr) Value: 6
  misc_feature: MA Experiment 108573 PARAMETER Experiment Name: At_Drought_cDNA_P Parameter: Tissue Value: Aerial
  misc_feature: MA Experiment 108573 PARAMETER Experiment Name: At_Drought_cDNA_P Parameter: Treatment Value: Drought vs. No Drought
  misc_feature: MA Experiment ID: 20000224 Result: Down-regulated in Transcription
  misc_feature: MA Experiment ID: 20001451 Result: Up-regulated in Transcription
  misc_feature: MA Experiment 20001451 PARAMETER Experiment Name: At_Far-red-induction_P Parameter: Age (day) Value: 7
  misc_feature: MA Experiment 20001451 PARAMETER Experiment Name: At_Far-red-induction_P Parameter: Light Value: Far-red vs. White
  misc_feature: MA Experiment 20001451 PARAMETER Experiment Name: At_Far-red-induction_P Parameter: Organism Value: A. thaliana
  misc_feature: MA Experiment 20001451 PARAMETER Experiment Name: At_Far-red-induction_P Parameter: Plant Line Value: Columbia
  misc_feature: MA Experiment 20001451 PARAMETER Experiment Name: At_Far-red-induction_P Parameter: Timepoint (hr) Value: 24
  misc_feature: MA Experiment 20001451 PARAMETER Experiment Name: At_Far-red-induction_P Parameter: Tissue Value: Whole Plant

SEQ ID NO: 33643 - protein, 232 aa, Arabidopsis thaliana; identical to SEQ ID NO: 30053
  peptide (1)..(232): Ceres Seq. ID no. 12333984
  misc_feature (85)..(144): Pfam Name: NAC domain Pfam Description: NAC domain
  misc_feature (32)..(232): Homolog of NCBI NO: 18398710 NR Description: expressed protein
  misc_feature (54)..(232): Homolog of NCBI NO: 4115918 NR Description: similar to nascent polypeptide associated complex
  misc_feature (36)..(231): Homolog of NCBI NO: 34902238 NR Description: Putative nascent polypeptide associated complex
  misc_feature (40)..(232): Homolog of NCBI NO: 15235122 NR Description: putative alpha NAC
  misc_feature (25)..(232): Homolog of NCBI NO: 15229149 NR Description: alpha NAC-like protein
  misc_feature (25)..(232): Homolog of NCBI NO: 13899101 NR Description: alpha NAC-like protein [Arabidopsis thaliana]
  misc_feature (29)..(168): Homolog of NCBI NO: 15240731 NR Description: putative protein
  misc_feature (25)..(232): Homolog of NCBI NO: 6752882 NR Description: nascent polypeptide associated complex alpha
  misc_feature (29)..(231): Homolog of NCBI NO: 34907258 NR Description: putative nascent polypeptide associated complex
  misc_feature (29)..(232): Homolog of NCBI NO: 15230476 NR Description: nascent polypeptide associated complex alpha

SEQ ID NO: 33644 - protein, 204 aa, Arabidopsis thaliana; identical to SEQ ID NO: 30054
  peptide (1)..(204): Ceres Seq. ID no. 12333985
  misc_feature (57)..(116): Pfam Name: NAC domain Pfam Description: NAC domain
  misc_feature (4)..(204): Homolog of NCBI NO: 18398710 NR Description: expressed protein
  misc_feature (26)..(204): Homolog of NCBI NO: 4115918 NR Description: similar to nascent polypeptide associated complex
  misc_feature (8)..(203): Homolog of NCBI NO: 34902238 NR Description: Putative nascent polypeptide associated complex
  misc_feature (12)..(204): Homolog of NCBI NO: 15235122 NR Description: putative alpha NAC
  misc_feature (1)..(204): Homolog of NCBI NO: 15229149 NR Description: alpha NAC-like protein
  misc_feature (1)..(204): Homolog of NCBI NO: 13899101 NR Description: alpha NAC-like protein [Arabidopsis thaliana]
  misc_feature (1)..(140): Homolog of NCBI NO: 15240731 NR Description: putative protein
  misc_feature (1)..(204): Homolog of NCBI NO: 6752882 NR Description: nascent polypeptide associated complex alpha
  misc_feature (1)..(203): Homolog of NCBI NO: 34907258 NR Description: putative nascent polypeptide associated complex
  misc_feature (1)..(204): Homolog of NCBI NO: 15230476 NR Description: nascent polypeptide associated complex alpha

SEQ ID NO: 33645 - protein, 139 aa, Arabidopsis thaliana; identical to SEQ ID NO: 30055
  peptide (1)..(139): Ceres Seq. ID no. 12333986
  misc_feature (1)..(51): Pfam Name: NAC domain Pfam Description: NAC domain
  misc_feature (1)..(139): Homolog of NCBI NO: 18398710 NR Description: expressed protein
  misc_feature (1)..(139): Homolog of NCBI NO: 4115918 NR Description: similar to nascent polypeptide associated complex
  misc_feature (1)..(138): Homolog of NCBI NO: 34902238 NR Description: Putative nascent polypeptide associated complex
  misc_feature (1)..(139): Homolog of NCBI NO: 15235122 NR Description: putative alpha NAC
  misc_feature (1)..(139): Homolog of NCBI NO: 15229149 NR Description: alpha NAC-like protein
  misc_feature (1)..(139): Homolog of NCBI NO: 13899101 NR Description: alpha NAC-like protein [Arabidopsis thaliana]
  misc_feature (1)..(75): Homolog of NCBI NO: 15240731 NR Description: putative protein
  misc_feature (1)..(139): Homolog of NCBI NO: 6752882 NR Description: nascent polypeptide associated complex alpha
  misc_feature (1)..(138): Homolog of NCBI NO: 34907258 NR Description: putative nascent polypeptide associated complex
  misc_feature (1)..(139): Homolog of NCBI NO: 15230476 NR Description: nascent polypeptide associated complex alpha
